United States Patent Application Publication US 2026/0092266 A1 - sequence listing, part 29

SEQ ID NO: 6782 - protein, 1417 aa, synthetic construct
  REGION 1..1417: note = Synthetic
MSRKILGLDLGSASIGWALVNEAENENEKSSIIKIGSRIIQYGDNLVKVDKSGKISASMTPEQDFQSGKGLSPNAGRTKQRSARRNLQRYKLRRDNLIEELKENSIVSENFIFSEEGNDTTFKTYRNRALATKSEIPLDEFVRVLLMINKKRGYKSSRKAKGEDDGQLIDGMAVAMQLYEDDKTPGQFVYELLKKNKKFIPDFYRSDLQAEFDKIWNFQKQFYSDILTNEVYEKLKGQTKKITADYFSKTLKIETPELKGKWDEKKLQRFELRSKAISLQLPLGEIAESLIEINNDINFSSGYLGAIGDRSKELVFQKLTVGQYLYKQLEANPNTSLKKQIFYRQDFLDEFNTIWDIQAKYHNALTPELKSKIRDVIIFYQRKLKSQKGLISFCEFESQQIEVIVDGKTKIKTRGMRVIPKSSPLFQEFKIWQILNNIEVVNTKTKIKEPRELSEDEKNILFEELNIKPKISKKDALKLLFDKPTDYDLNYKDIEGNKTNAALYEAYQKIVFQEGHEEKDCTKIKSSEAKDYIKQIFTALEINTEILEFDSSIEGNNIEKQLHFQLWHLLYSYEGDNTNTGNEKLILALQTKFGFKKEYAQIIANVALPDDYGSLSAKAIRKILPHLKDGFSYGGRKNKPTEPSAVEYAGYGKHSKSSLTTVEIENKAYKNKLDVLPKNSLRNPIVEKILNQMVNVVNSAIEEYGKPDEIRIELARELKKSAEERKEMTEAITKSTADHEKYRKILQSEFGLKHVSRNDLIRYKLYLELKRTGYKTLYSNTYIAPNKLFSKEFDIEHILPKAKLFDDSFSNKTLELQSVNVEKADMTAYDFVKVKYGEAELIKYEQRVEDLYVFRKNNDENNASEGKSADIKISKTKRNKLLMPESEIPSGFIDRELRDTQYIAKKAKAMMEEVCKVVTTTTGSVTDRLREDWQLIDIMQELNWEKYHALGLTHEFTNRDGNVIKRITDWTKRNDHRHHAMDAITVAFTKRSHVQYLNNLNARSDKSGSIYGIEQKELYRDKTNRLRFKPPIPIDNFRAEAKKQLENTLISFKANNKVVTKNKNTFKVKGGVKTKIELTPRGQLHLETVYGSIKRYETADVKINALLDIETINKVAKKNIKEALLKRLAEFDNDSKKAFTGKNTLEKNPIYIDKEQSYKIPEKVKIVWEETLYTIRKDITPDLKTDKIIDSKTKVILEARLIEYKNDAKLAFSNLAENPIWLNKEKGILIKRVTISGISNAVSLRDKKDHNGNIVLDNEGKNIAVDFVNTGNNHHVAIYKDEAGNLQEKVISFYEAVERVNQGLSVIDKTYNQEITWQFLFTMKQNECFVFPNDKTEFNPNEVDLLDATNYYLISPNLFRVQKIATKDYTFRHHLETTIEIKNETKNITWKRLGINGIENIVKVRINHLGKIVKIGE

SEQ ID NO: 6783 - protein, 1430 aa, synthetic construct
  REGION 1..1430: note = Synthetic
  REGION 201..251: note = misc_feature - Xaa can be any naturally occurring amino acid
MKKILGLDLGVNSIGWALVEEADNENEKSSIIKLGVRVNPLTTDELTNFEKGKSITTTADRTLKRSARRNLQRYKSRRENLIKVLKDNKFITEETLLSENGNKSTFETYNARASAAGEIIELDQFARVLLMINKKRGYKSSRKANNNDEGQLIDGMEIAKKLYNDNITPGELVLQIFKAGKKYIPDFYRSDLQAEFDKIWXXXXXXXXXXXXXXXXXXXXXXXXXXXXXXXXXXXXXXXXXXXXXXXXXXXCQKQFYPEILTDDFKSQISGKGKQITSKIFLAKHGIYTADNKGTDKKIQAYQWRVDALNKQIEKEVLAFVVSDINGNINATSGYLGAISDRSKELYLNKLTVGQYQIAQLKANPHVPLKNQVFYRQDYLDEFDTIWERQALYHKELNPELKAEIRDIVIFYQRRLKSQKGLVSFCEFESRQIEVEIDGKKKSKRVGSKVCPRSSPIYHEFTIWQTLNNLELSNKNIRGKRSLTQDEKELLFNELSLKSKLSKEGALKLLFENYKELDLNFKEIKGNATQAALFEAYRKIIELSGHGDHDFSKIPSSEILTMVKNIFEGLNYSTEILTFDSGLEGKEFEKQAMYRLWHLLYSFEGDDSKIGNEKLINKISSLFGFGKEYAAIIANVAMPRDYGSLSLKAVRKILPFLKEGNVYSEACGYAGYRHSKNSLTKPEIENKVLKERLDILPKNSLRNPVVEKILNQMINLINTLVDTYGKPDEIRVELARELKKSAKEREELTAAIAKTTKEHEDYRAILETDFGIKHVSRNDIIRYKLYLELANRGYKTLYSNTYVPQHKLFSKEFDIEHIIPQSRMFDDSFSNKTLESRSVNIEKGNDTALDYVSAKFGQAGLTDYLMSIEELYKNKTITKAKFLKLKMKADEIPDDFINRDLADSRYIAKKAKAILEDMVREVVSTTGSITNRLREDWQLIDVMQELNWDKYHKLGLTEIIENREGHKIRRIKDWTKRNDHRHHAMDALTVAFTKRSYIQYLNNLNARGEKRDSIFGKESKELYRNDREKMKFKPPIPIEQFRAEAKKHLENTLVSIKAKNKVTTTNINTIDKSGNERFKKRQLTPRGQLHLETVYGSINQYVTKEEKVGANFDEKLIARVAKVSYRHALLNRLMENGNDPKKAFTGKNSLDKNPLYIDDLKTQKVPAKVKLVDVETIYTIRKDITPDLKLDKIVDAKIKTLLQARLDQNNGDSKKAFSNLDENPIWLNEKKGISVKRVTIIGISNAIALHDKKDKEGKLILDKEGKTQPVDFVNTGNNHHVAIYRDQNGNLQENVVSFFEATVRKNNQLPVIDKDYRKQDGWEFLFTMKQNEYFVFPDDKTGFNPLETDLLNPENYSLISSNLFRVQKISTNNYLFNHHLETKAASGELLKSKKELKGVTYNLIQTPSKLDKIIKVRINHMGQIVSVGEY

SEQ ID NO: 6784 - protein, 1436 aa, synthetic construct
  REGION 1..1436: note = Synthetic
MKKNILGLDLGTTSIGFAHVIEDEQNEQSEIIQIGVRVNPLTTDEQTNFEKGKPVSVNADRTSKRGARRNLDRYQDRRSNLIHALSKANIISSDTKLAEDGKQSTFETWQIRSKAVTERIEKNELARVFLTINKKRGYKSSRKAKNEDEGQAINGMEAAKRLYEENLTPGQLVYQLLNEGKKNIPDFYRSDLQAEFDTIWNFQKQFHAQILTDDFYKALQGKGQKASSALFWTTYQFNIAEYKSKSRDEKKLIAYKWRSSAVSTQLTKEEVAFVITDINNNLKNSSGYLGAISDRSKELFFNKLTVGQYLYIQLQKNPHTRLKNQVFYRQDYMDEFEAIWKEQSKYHPELTQELKTEIRDITIFYQRKLKSQKGLISFCELESKEIKLEKNAEKVKKTIGLRVAPKSSPLFQEFKIWQRLNDVLIRKKGSKKRTTKNENGKMELFDVEKEIFVLDKETKEKLFKELNVKGNLSASKIIEYLGHKPSEWELNFNELEGNRTNQALYNAYLKILELEGYNEDLLKLSEKDDINVAELKTSAKDIEKMVQQIFEVLGINTRILNFDAELDGKEFEQQASYQLWHLLYSYEGDDSASGNEKLYELLKTKFGFKKEHAVILANVAFSDDYGNLSSRAMRRIYSYLKENKYSTAAELAGYKHSAASLTKEEIENRKLETHLELLKKNSLRNPVVEKILNQMVNLVNALIEKNSEKDEDGKIINHFKFDEIRIELSRELKKNAKERAEMTTNINASKIAHEKIFKLLTTEFGVKNPTRTDIIRYKLYEELKNNGYKDLYTNTYIPREILFSKQIDIDHIIPQAKLFDDSFSNKTIVFRKDNLEKGNRTAFDFIQSKYGEPGIEDYLKRIEHLFELGKKSKDDTSAGISKAKYQKLLKKETEIGDGFIERDLRDSQYIAKKAKNMLFSICRTVVATTGSITDRLREDWDLVNIMQELNFDKFKKLGLTEMVEKKDGTFKERIKDWSKRNDHRHHAMDALTVAFTKHSHIQYLNHLNARKNEADKWHPVISGIEHKETEMVLDDEGNAKRKFKKPLPNFRQLAKEHLEKVLVSHKAKNKVVTKNKNKTKSKTGEKVKIELTPRGQLHKETVYGKYQYYESKLEKVSAKFDETTIGLVANPSFKKLLLQRLQENGNDPKKAFTGKNAISKNPIYLDNSKTSQLPEAVKLIWLVNDFSTRKDVTPENFKDEKTIDKILDKKVKEILLNRLKQFGDPKKAFSDLDKNPIWLNQEKGIAIKRVTISGVKNAEFLHYKKDHFGKAIIDKNGKPIPVDFVSTGNNHHVAIYRDEKGNLQEKVVSLFEAVQLVNAGEPVIDKTYNQGIGWQFLFTMKQNEYFVFPNEQSGFNPNETDLLNPANKKLISPNLFRVQKLASLQYWFRHHLETTVDVKPELKNIAYYPQLGLNGIKEIVKVRLNHLGDIVKVGEY

SEQ ID NO: 6785 - protein, 1463 aa, synthetic construct
  REGION 1..1463: note = Synthetic
MKRILGLDLGTNSIGWAVVNEAESMDEKSSIIKLGVRTISYDNFVSTETGKECMDADKDFRGGKSISCNAGRTMKRSARRNLQRYKLRRKNLLDVLIKNNIITDDSVLAENGNRTTFETYRLRAKSATEEVTLEQFARILLMINKKRGYKSSRKAKSTDEGQLIDGMEVAKYIYENNLTPGQYVLELLNKGKKFIPDFYRSDLQDEFNRVWNFQKQYYPTLLTDELKEKLQGKNEKQTWAICQEPFNLVGIKRETKGDALKKENYVWRSKSLSERMDLERLTIVLQKINSNINGCSGYLGNISDRSKELYFKKLTVGQYLMDKLDKNPNYSLKNQVFYRQDYLDEFETIWEKQAQFHSELTQNLKNEIRDVVIFYQRPLKSQKGLISICELEGRKILKETDGKKKEITIGPRVCPQSSPLFQEFKIWQILNNIQVSGKVIKDAQQDLFGNATDYKFGKRYLEQEEKEILFAELNVKEKLSKTEALRLLFKNASELDLNFKTIEGNRTNTELFKAYQTIIAKSGHGEYDFSKIPAAKSIEIVETVFNGLGFNTDILHFNSNLEGKELEQQPAYRFWHLLYSAEDDDSKMGNEKLINKITELYGFDKEYATILANVIFQSDYGSLSTKAMRKILPHLKDGLEYSVACEYAGYRHSKKSLTKEKLDKKELKDRLDLLPPNTLRNPVVEKILNQMTNVVNAVIDTYGKPDEIRIELARELKKSGKERAEMTDAINQSTKQHEEYRKILQQDFGISNVSRNDIIRYKLYKELESNGYKTLYSNTYIPQEKLFSKEFDIEHIIPQAKLFDDGFSNKTIEARQANIEKSNATAYDFVESKYGNTGVVEYKNRIDKLFKDGIISKTKHDKLLMKEADIPSGFIDRDLRDSQYIAKKAREILEEIVKFVVPTTGAITDRLREDWQLVDVMQELNWDKYNKLGLTEIIEDNDGRRIRRIKDWTKRNDHRHHAMDALTIAFTKRSYIQYLNNLNARVQKGVDDYIDLEMVEQKDLDKKDRTSAVYGIEKKELYRDTHGKLKFKPPMPLDEFRAEAKRQLENTLISIKARNKVVTRNVNKAKNNASSEIVTQDGEIKKVKGQVTATPRGQLHNETVYGRMKQYVTKVEKVGATFDAEKIATVSCKRFREALMERLGESGNDPKKAFTGKNSLNKRPLYIDAEHIKSVPIKVKTVTLQDIFTIRKPVSADLKLDKVVDVKIRKVLENRLQEYGGDAKKAFSNLEENPIWLNEEKGISIKRVTITGVSNAEALHDKHDHFGNPILDENGKNQPTDFVSTSNNHHVAIYRKPVLNKDGVQKEDENGEKMWELDEHVVSFYEATTRANSGLPIIDKEYNKSENWVFLFTMKQNEYFVFPRYETRMDENGKETKVMTFDPSAIDLTNPDNFALISPNLFRVQKFSYKNYVFRHHLESSINMSSADLKGFTWTDFRSSIGLDKIVKVRINHIGHIVSVGEY

SEQ ID NO: 6786 - protein, 1362 aa, synthetic construct
  REGION 1..1362: note = Synthetic
MKKILGLDLGTTSIGWALVNEAENKNEQSEIIKLGVRVNPLSVDEKTNFDKGKPISTNTDRTLNRGARRNLQRYKQRRENLFDILFENKLIEKETPLTETGKKTTYETLKLRAKAPNEKIKLNELARVLFAINKKRGYNSSRKAKSEDEGNIIDGMSIAKELYEDNITPGQYVHELLLKGKKHIPDFYRSDLKNEFNAIWEYQKQFYADILNDEMYKKLDGQGQQSSKKRFLAIHGIYTAENKGKKDAIKLKHYKWRTEAITKKLTIAQVAYVLVEINNNLNKSSGYLGAISDRSKELYFKNETVGENLYRQIIADKHTSLRNQVFYRQDYLDEFEKVWERQAKYYPKLTAKLKSEIRDVIIFYQRKLKSQKHLISNCQFEKQHKAAPKSSLLFQEFKIWQNLNNIEFKNSKTKEIKILSDDLRISLFEELNLRGNLTEKAILIFCDLSSSWKSNFSKGLEGNNTNKVLYNIYQHIATEEGYGFNWEKKTAKEIKEELKSILPLINIDANILNFETSIEGEFFDKQTSYQLWHLLYSAEDDTKISEEDRLLYGNTNVALKKKLYGKYGFKPVYAGMIANASLQDDYGSLSAKAIRKIIPFLQDGTEYSKACTLAGYNHANSLTKEQLEKRILKPRLEILEKNSLRNPVVEKILNQMVNVINQIIDEYGKPDEIRIELARDLKKSSKEREETTKFINSATKVNDDIKALILKEFGFTATKNDVVRYKLWLELKNNGYKSLFTNKFIPKEKIFSKDIDIEHIIPKAILFDDSFSNKTLAYRSVNLKKADRTAIDFIEQDFSNEEVNNYKLRVESLFKSGEIKKGKYKKLLMGLTNLPTDFIARDLVNTQYISKKAKSMLFEVFDNVISTSGRITDKLRKDWDLINVMKELNLPKYKLLGLTETQIRKNNIKIEIIKDWTKRNDHRHHAMDALTVAFTTYNHINYINNLNASRIKESELYGVRNTITKVYENATGNKKRKFIPPIESFRIQAKKHIGSILISFKNKNKVVTKNINKSKLKGKEQFNIKTQLTPRGQLHKETVYGTSKRKMKTQIKLNKKFDLEKLKLIIEPNVKKLLIGRLNVYSNKPEIAFDAKTIKKDPIIYKNLPLTKVFCFEEIYTIRKIISPDNFKTEKDLNKVIDKKIREILKYRLSEYDGKSKEAFSDLDKNPIWLNKERGISIKRVTITGVANAEPLHYKKDHFGNEILDEKGNKQAIDFVSTGSNHHVAIYKDEKGKLQEKVVSFYEAVARVNEKLPIVDKEYKTSLGWEFIFTMKQNEMFVFPNDDFNPSEIDLLNEKNATLISANLFRVQKLGSKDYNFRHHLETTVTNNIKFTFKRINNCNALGELIKVRINHLGLIVQKGEY

SEQ ID NO: 6787 - protein, 911 aa, synthetic construct
  REGION 1..911: note = Synthetic
LNFKQIDGNRTGFSLFSAYSKMIEKYGYEPLDFKKPADEIIGQLRTIFTDLGWNTNLFTIDLTKEGKELEMQPYFRLWHLLYSFEGDNTSTGNGKLIEKIMQLCGVEKEYAVELASLSFQDDYGSLSAKAIKRILPYLKEGNLYDVACEYAGYRHSKSSLTKEEIENKVLKGKLEVLPKNSLRNPVVEKILSQMVNVINTIIDTYGKPDEIRVELARELKKSAKEREELTKAIAKSTREHEEIRKLLQDEFGMMNVSRNDIIRYKLYEELKDNGYKTLYSNTYIPKEKLFSKDFDIEHIIPQARLFDDSFSNKTLEVKSINIEKGSKTAYDFVEEKYGEQGLQEYLNRCEVLFRDKKTKLRKLKMQESEIPEGFIDRDLRNTQYIAKKALSMLNEICRRVVATTGAITDELREDWQLVDVMKELNWEKYKVLGLVEYFEDNDGRLIGRIKDWTKRNDHRHHAMDALTVAFTKDVFIQYFNNKNASLKPDTNEAAIRNKYFQNGKAIPPMSLDEFRAEAKKHLNDTLISIKTKNKVVTINLNRTKKKNGINKKQQQTPRGQLHLETVYGSHKQYVVKEEKVNASFDAAKIATVNKPAYRDALLRRLQENGNDSKKAFTGKNSLDKQPVWLDAKQNECVPEKVKTVMLETVYTVRKPIDEKLNVDKVVDARIRKLLQDRIKEYGNAKSAFANLDENPIWLNKEKGITIKRVSVFGISKAQSLHEKKDKDGNFILDKDSRRIPVDFVNTGNNHHVAIYRKPVLDKKGQAVFDENGELKFELEEVVVSFFDAVTRVNLSQPIIDKDYKRSEGWKFLFSMKQNEYFVFPNEKTGFDPKEIDLLNPENYALISPNLFRVQKIASKDYVFRHHLETVVADRKELQEITWKRISSLSILNRIIKVRVNHIGQIVMIGEY

SEQ ID NO: 6788 - protein, 1435 aa, synthetic construct
  REGION 1..1435: note = Synthetic
MTKNILGLDLGTTSIGFAHVIEGDSPEQSSIKKIGVRVNPLTTDEQTNFEKGKSVSVNADRTLKRGARRNLDRYQDRRKDLIDALLKANIITNDTVLAENGKNTTHSTYSFRAKSAVEKIEKEELARVFLAINKKRGYKSSRKAKNEDEGQIVDGMAVAKRLYEENLTPGQLAYQLLKDGKKYLPDFYRSDLQSEFDKVWNFQKQFYTEILTDEFYKELKGKGQRATSAMFWSKYGFNSAENKAKSREEKKLQAYLWRSEAVDKQLEKEEVAFVITEINNNLNNSSGYLGAISDRSKELYFNNQTVGQYLYEQLKENPHTRLKNQVFYRQDYLDEFEKIWETQTKFHSELTEKLKKEIRDIIIFYQRKLKSQKGLVSFCEFESQEKIINGHKKTIGLKAAPKSSPLFQEFKIWQVLNNVLVRKKGSKKRVAKETSPTLFDEEKQIFVFDLETKQKLFDELNIKGNLKSAKIIELLGYKPIDWEMNYSELEGNRTNKVLYDAYLKILEFEGYDEDLLKLQGKDDIDVSELKAPASEIKDMVKRIFEVLNINTEILEFDAELDGKEFEKQPSYQLWHLLYSYQEDDSKTGNDTLFRLLEEKFGFKKEHSQILANVAFSDDYGNLSSKAMRKIYPHIKELSYDKACLQADYKHSASSLTKEEIATRPLKNQLELLKKNSLRNPVVEKILNQLVNVINTIIETNSEKDEDGKIIEYFKFDEIRVELSRDLKKNAEERREMTTNINASKIAHEKIFKLLQNEFHIKNPTRNDIIRYRLYEELKNNGYKDLYSNTYIPREILFSKQIDIDHLIPQSKMFDDSFSNKTVVFRKDNLKKGNRTTFDYISEEFGEKGVEDFKLRIEMLFEQGKKNKEEGISKAKYQKLLKQESEIGDGFIERDLRDSQYIAKKARNILYEICRVVTPTTGSVTARLREDWDLVNIMQELNFEKFKALGLTEMVEKKDGTFKERIVGWSKRNDHRHHAMDALTVAFTKHSHIQYLNFLNARKNVHHKEHNAIVGIEDKETTWKYDDEGNKKRVFKLPVPNFREQAKEHLENVLVSHKAKNKIVTKNKNKTKSKNGEKAKVELTPRGQLHKETVYGKYQYYVSKEEKVSGKFNEETINKVSNPIYRKLLSQRLSENRNDPKKAFAGKNVLSKNPIYLNEEKTETLPEIVKLTWLEEDYSIRKDITPENFKDLKTIEKILDEGVKRILLNRLKDFDGDPKKAFADLEKNPIWLNQSKGISIKRVTISGVKNAEFLHYKKDHLGNEILDKNGNKIPVDFVSTGNNHHVAIYRDEKGNLQDKIVSLFDAVQLVNAGEPVIDKSYNQGLGWQFLFTMKQNEYFVFPNETGFNPKEIDLLDSKNKKLISPNLFRVQKLSRVEYGNYAVREYVFRHHLETSVDEKKELKEIAFKNIKSLGYFENIIKVRLNHLGDIASVGEY

SEQ ID NO: 6789 - protein, 1141 aa, synthetic construct
  REGION 1..1141: note = Synthetic
MKKILGLDLGTTSIGWALVKEAEIEEEKSSIIKLGVRVNPLTVDEQSNFEKGKAITTNADRTLKRTARRNLQRYKLRRENLLSVLKENGFIADDSVLCEQGNRTTFETRLLRSKAATEKISLDELARVLIMINKKRGYKSSRKVNSGEEGSLIDGMAVARKLYDEHLTPGQYVYQLLCRGKKYIPDFYPSDLNAEFEAVWNCQKQFYADIFTDELREALRSKNEKQTWAICAEPLGLKGIKRNGSTADQRVENYRWRTEAISKQMPLEQVAVVLQKINSQIAGTSGYLGAISDRSKELYFNHQTVGQFQMKQLSDNPNISLKNQAFYRQDYLDEFERIWETQAKYHSQLTAELKHELRDIVIFYQRPLKSQKGLISYCEFESRQKEMVVDGKKKTITIGLRVCPKSSPLFQCFKIWQTINNLQVTGEVVPKAQLDLFGDTTECEHGTRTLTEEEKCDLYRELSIKESLSETEILKLLFGSKKGLSLNFRKVEGNRTMALFVRACQTVLAINGYNDYDFSKMSYDKAMPIITQVFEALGFNTSFLTFDPTLDGKDFERQAAYQLWHLLYSYSGDNSATGNKKLIERLCAILNMDRDSAAVFASITFEPDYGSLSAKAMRRILPHMMDGLEYSVACEYAGYRHSRRSLTKEEIAAKPLVETIPLLPRNSLRNPVVEKILNQMINVVNAVSNRYGKPDEIRIEMARELKKNAKEREQMTRDIARANAENEKYRKILQEKFNKPNVSRNDIIRYRLYLELEANGFKTLYTQTYIPREKLFSKEFDIEHIIPQARLFDDSFSNKTLEARSANIEKGSTTAYDYVLTKYGEQGDNGSVKYKERIDSLYKEGVISKTKHDKLLMTTAEIPNGFINRDLRDTQYIARKAREILESAVRVVVPTTGAVTDRLREDWQLVDVMKELNWDKYDQLGLTEIYKDPDGRQIRRIKDWTKRNDHRHHAMDALTIAFTRHSFIQYLNNLNARSDKAGSIYAIEKKELYRDNNNKLRFVPPMPLGEFRAEARRHLKDVFVSIKAKNKVVTRNVNITRGADGKKHRTVQLTPRCQLHNETIYGSRRRYVVKQEKVSSAFNEEKISTIGNPQIREALLRRLSEFGGDAKKAFTGKNSLEKILSISMIATRSKCLRRLKR

SEQ ID NO: 6790 - protein, 1393 aa, synthetic construct
  REGION 1..1393: note = Synthetic
MKKILGLDLGTTSIGWALVNEAETDNEQSSIIKLGVRISQLDNFEKVDKTGKVTESKNPIEDFASGKGLSPNAGRTQKRGARRNLQRYKLRRRNLIDVLTNHGIINSESVLTEDGENTTFETLALRSKAAKEKIQKDQLARVLISINKKRGYKSSRKAHNEDEGQAIDGMAVAIKLYEERITPGCYCYQLLQKGRKIMPDFYRSDLINEFDRVWNFQKQHYSDILDDELYKAIEGQGQQNTRKRFLAIKGIYTAENKGKKKDKTLNAYLWRSKAISERLEIDQLAFVLAEINNNLNSTSGYLGAISDRSKILYLSKQTVGEYLYEQISKDRHTRLKGQAFYRQDYFDEFEQIWETQKLFHPELSDKLKDELRDIIIFYQRRLKSQKRLISYCEFESKPWIEVIDGKNKVKITGSRVSPRSSPLFQEFKIWQNLSNLEFKNKKTKHIEKFVEHDIETKQLLFNELNIKGNLKKNDVLRLFELNPNEWTMNYLELQGNTTNKIFYEAFQKIVFHEGHEIDFSKSTANEIKESISAIFEMLGINTDILFFNAEKEGTEFEKQKSFQLWHLLYSYEADNSKSGNEAIYKALNAKFGLKKEHAQYLINLNFQDDYGSLSTKAIRKILPFIKDSNYSKACELAGYNHSHSVTKEENEKRILKDRVKIIPKNSLRNPVVEKILNQMVNVVNSILDNSELGKPDEIRIELARELKKSAKERAEMTQNINSAKALHDEYRNILMEDFYILNPTRKDIIRYKLYLELKANGFKTLYSDQYISQEKLFSKEIDIEHIIPKTRLFDDSFSNKTLEFRHINIDKGNETAFDFMKNSFGMDKLNLYKTRIERLYKEGVLSKAKYKKLLMEGRDIGEGFIERDLRESQYIAKKAKEMLLEVFRNVVSTTGSITDTLREDWGLINTLQELNIDKYRALGLTKFEERKDGHVVEKIIDWTKRNDHRHHAMDALTVAFTKHSHIQYLNNLNARRNTEDKKHKIIIAIENKEVMRDENNKRKFKPPIPNFRLEAKRELEKILISHKAKNKVVTLNKYKIQGHPEPQSSLTPRGQLHKETVYGKSKYYESKMVKVGTSLNLTMINQVANPKFREAILRRFAENANDTVKAFGGKNSPMKNPIFTIDNKPLPEKVKVVWMADRYTIQKDVAPDLKLDKVVDKGIQRILQRRLEEYGNNPKEAFVNLNENPIWLNKESGIAIKRVTIRGVSNAEALHTKKDHFGNEILDKNGKPLPVDFVSTGNNHHVAIYKDENGKLQDEVVSFYEAVARVQQGLPIIKKQHELGWEFQFTMKQNEMFVFPTDDFDPSEIDLLNPENNRLISSHLFRVQKFSKAEYGNNAVRDYVFRHHLETELIDKKETREITYKVAKSLPKLEGIIKVRINHIGQIVGIGEY

SEQ ID NO: 6791 - protein, 1391 aa, synthetic construct
  REGION 1..1391: note = Synthetic
MKKILGLDLGTNSIGWAVVNEAEKEGEKSSIMKLGVRVNPLTVDEKSNFEKGKSITTNADRTLKRSARRNLQRYKLRRENLIEILKENKFISDDSILSEYGNKTTFETYRLRAKAAKNEVSLEELARVLLMINKKRGYKSSRKAKSNDEGQLIDGMDVAKKLYEKDLTPGQYVFDLLKSGKKYTPDFYRSDLEAEFDRVFDKQMSFYPEFLSLELKEELRGKKRDAVWAICAKHFKEKGYDLVGVKKQKAAEQKIENYSWRAKALSEKMDLEQFVIIIQQINIELNKSSGYLGAISDRSKELFFNHQTVGEYLMAGLSKDPHYSLRNKVFYRQDYLDEFETIWQIQAKYHKELTSELKKELRDVIIFYQRPLKSQKGLISFCEFENRKIEVEIEGVKKIKTVGLRVCPKSSPVFQEFRIWQNLNNLRVINKNTNESFPIDEECKKVLFAELNLKEKLSKTEVLKLLNTPKNHDLNYKEVEGNRTQAKLFKEYERIIEMTGHGEPDFSKMKASKIIEMTTSVFEALGYKTDFLAFNSHLEGKEFEKQPYYALWHLLYSFEGDDSKTGNEKLIQKISDLCGFEKNYASMLAGVTFEDDYGSLSTKAIRKILPHLKDGLEYSVACEYAGYRHSKRSLTKEELEKKEYKDKLNLLPRNSLRNPVVEKILNQMINVVNTVVDTYGKPDEIRIELARELKKSAKEREEMTKNISKTTADHEGYRKILQEKFGLINPSRNDLVRYKLYLELSENGYKTLYSNTYIPQEKLFSKEFDIEHIIPQAKIFDDSFSNKTIEVRQVNIEKSNSTAYDFVKEKYGEEEAIAYTNRIEDLLKKGVLSKTKYRKLLMKESEIPSGFIERDLRDSQYIAKKAREILEDLVKFVVPTTGSITDRLREDWQLIDVMQELNWDKYEKLGLTEVYKDKDGRSIRRIKDWTKRNDHRHHAMDALTIAFTKRSFIQYLNNLNARIGKSVDENIDLANYDLRNINPKDRTSVIYAIEKLELYRDRNGHLRFNPPIPLDEFRAEAKQQLENTLISIKAKNKVVTRNINITKGKNGSLNKKIQLTPRGQLHNETIYGSMQRPVSKEEKVDSKFTIEKIATVTSPKYRDALLARLSQFEGDSKKAFTGKNSLEKNPIYLNELHTEQVPLKVKTMTYETIYTIRKAVAPDLSLEKVIDENIRKVLEKRLIEYGNDPKKAFVNLDEKPIWLNEEKGIAIKRVTITGVSNAIALHKKSDQNGKSQPVDFVSTANNHHVAIYRDKDGNLQENVISFFEATTRVNLGLPIIDKDYRSADGWTFLFTMKQNEYFVFPNKETGFDPNEIDLLDPNNYSLISPNLFRVQKFTIKDYVFRHHLETMIDDKNNLKGITWKRGGLSSITEIVKVRTNHIGQIVSVGEY

SEQ ID NO: 6792 - protein, 1440 aa, synthetic construct
  REGION 1..1440: note = Synthetic
MKRILGLDLGTTSIGFAYIKEAENERGQSSIEKIGVRVNPLTTDEQTDFERGKPLTTNASRTLKRGARRNLDRYQLRRDSLIEVLKNTKLISDKTILAENGKNTTHETWRLRSKAATEKIEKKELARVLLAINKKRGYKSSRKAKNEEEGQVIDGMGIAKRLYEENLTPGQLAFQFLKTGKNVLPDFYRSDLQAEFDKVWNCQKQFYPKIFSDEFYKELQGKGQRATAALFWNTYQFNIAEIKDLEERLKTEKTIKLSKRQQKKLQAYKWRSDGISKQLTKEAAAYVITEINNDLNKSSGYLGAISDRSKELYFNKETVGQYLYKQLQHNLHNRLKNQVFYRQDYLDEFEAIWETQAKFHHELTQELKEEIRDIIIFYQRKLKSQKGLISFCEFESKEIEVEKNGKKVKKTIGLRVAPKSSPIFQEFKIWQNLNNLEFRNKETKEKLKPDLEAKKTLFEELNLKGNLSANKIVELLGYKSINWEVNYKTVEGNRTNKSLYEAYLKILEIEGYDVKDLFKVKSNKDEVELDDLKVSASEIKDMVKKIFDALEINTKIIDFNAELDGNNFEKQASYQLWHLLYSAEDDNKKYSEDDIFIYGNEHIGLKKQLVTKFGFKPEHAKVLVNVSLSDDYGNISTKAMRKIYPYIKEHQYSEACEQAGYRHSKHSLTKEEIENRELKSRLELLKKNSLRNPVVEKILNQMVNVINTLIDTERKKEPNFHFDEIRIELARELKKNAEERSEMTSNINSAKLRHEKIIKLLRTEFGVQNPTRNDIIRYKLYEELKNNGYKDLYTNRYIPREKLFTKEIDIEHIIPQSKAFDDSFSNKTLSFRQDNLDKGNQTAIDYIESRFGNEKLKEYLNRITQLNKTWSKDKPEEGITKAKFLKLQKREADIGEGFAERDLRDSQYIAKKAKSMLFDITRSVVSTSGNITGRLRDDWDLINVMKELNLPKYRALGLTEMQERKFGKKVEIISDWTKRNDHRHHAMDALTVAFTKHNHIQYLNYLNARKNENHKWHRSIIAIETKETELVIDDNGNKKRKFIKPIPNFRQVAKEHLESVLVSYKAKNKVVTKNKNRIKTKNGERVKIERTPRGKLHKETVYGKIKQPVVKEERIGTKFNSEIVKKVTNPVYRAVLEQRLADNNNNPKKAFGGKNALSKNPIYLSAAKTKFLPEKVKTISYVDNFTIRKDISPDNFKTIKNIEKIIDEGVKRALIERLNQYKGNAKDAFSGLDKNPILLKNGVSIKRATISGISNAEPLHHKKDYLGEFILNEKGQKIPTDYVSTGNNHHVAIYRDEKGNLQENVISFFEAVERINQKEPVIDKNFNNQLGWQFLFTMKQNEMFVFPNEKTGFNPKEIDLLDPKNKKLISSNLFRVQKIATKNYMFTNHLETQATNSDDLKNRKHLKGYKYYFIQAPSHLNEIVKIRINHIGDIVSVGEY

SEQ ID NO: 6793 - protein, 1372 aa, synthetic construct
  REGION 1..1372: note = Synthetic
MKKILGLDLGTTSIGWAYVNEAETNEEKSSIVKLGVRVIPLSSDEETDFMKGKATSINADRTLKRGARRNLDRYQERRDALIEILKDNGFISDDILLNEDGKNTTFNTYESRAKAAKKIISKEEFAKVLLMINKKRGYKSSRKAKSEEEGSAIDGMLVAKYIYDNGLTPGQYVYQLLRDKKKYIPDFYRSDLQSELSQIWEFQKQFHANILTEEFFEQISGKGKMATSKIFLGKYEIYTAENKGKRDDVKLQSYKWRAEATTIELSREELAYVVVEINNNINASSGYLGAISDRSKELYFNKQTVGEYFYSQLEENPHARLKNQVFYRQDYLDEFEAVWEMQRSLRAQSNLDTDLDLFNAELKKEIRDVIIFYQRRLKSQKHLISNCEFEKYHKVIPKSSPLFQEFKIWQIINNIELKDINTRTVYKNESIEQEVKDNLFQELNIRVKMTDKEILKILVENPDDFKLNYKELEGNRTNAALYEAYQKILEFEGEELSFSKMSADEINDRISSKFLDLGINVDILIFNADLKENEYHKQDILQLWHLLYSFEGDNTKTGDEKLIKALNTKYGFKPEYARLIANAILQGDYGSLSSKAIRKIMPYLKEGNRFDIACGYAKYNHSSSLTKEERATRVLKDAMNLLPKNSLRNPVVEKILNQLVNVVNAIIIDENLGKPDEIRIELARELKKSAKEREDMTRNINKATADHEKIRVLLQNDFGITKVTRNDIIRYKLWRELECNGFKTIYTNAYVSKEKLFSKEFDIEHIIPKARLFDDSFSNKTITIRQVNIDKSNETAYDYLKETQNEADFNQYLARIEKLYKSKNISKTKYNKLMMKLSEIPEGFIERDLRNSQYIAKKAKEMLEEVVRTVNTSTGIITDRLRSDWQLINIMKELNLPKYEKLGLLETIEGKNGKPETRIKDWTKRNDHRHHAMDALTVAFTSYSHVQYLNNLHARTDKKSSIFAIENKYLHRNEKNKLVFNAPMPLHEFRIESKKHLENILISFKAKNKVVTRNKNKSKLKGKDNYNTKIELTPRGQLHKETVYGKIERYKTKPEKVGSKFDLTKIKQVAKQSYREALLTRLIEFGSDPKKAFAGKNAPSKNPVFVDEAKTIELPEKVKLVWKETDYTKRVEINSDNFKTEKNIEKVIDVGIKSILLNRLAEYNGDSKKAFVNLEENPIWLNKDKGISIKRVTISGVSNAEALHHKKDHNGTLILDAKGNKQPTDFVSTGNNHHVAIYRDAKGKLQEEVVSFYEAVHRVNEGIPIINKNKEGLEFLFTMKQNEYFVFPSDNFKPNEIDMLNPKNTNLISPYLFRVQKIATTNYMFRHHLETTVEDKKELKDVSYKNIRSANGVQDIIKVRINHLGQIVKIGE

SEQ ID NO: 6794 - protein, 1372 aa, synthetic construct
  REGION 1..1372: note = Synthetic
MKKILGLDLGVSSIGWALVNESEKPEEKSSIIKLGVRVNPLTVDENTDFEKGKSITTNANRTLKRGMRRNLQRYKLRRDNLIKVLKDNGFIDEETILAENGNFTTFQTLRLRAKAASQEVSLEELARVLLNINKKRGYKSNRKCKSSEEDGQVVDSISIAKDLYDNNMTPGEYVSSVIFGSGRKSIPSFYRSDLQEEFDRVWLKQSEYYHELTPELKEELNGKNKSQTWAILAKSLGLVGKKRDVKRFDLIKENYGLRVKGLKEKLDPEDLAIALQEINGNIKDAGGYLGNISDRSKCLAFANMTVGQYMMSELDKNSNYSFRNQVFYRSDYMDEFDRIWEVQSKYHPELTAELKHEVRDIVIFYQRPLKSQKGLISYCEFEQKRRVCPKSSPIYQEFRTWQELNNLTIGGKTLSLADRQIVAKELLIRESLSATEICSLLGKPKNLKVNFKKIDGNRTQSTLFSAYEKIVEESGNGEFDFGKMPFSEANKIVTDVFLALGAKTDFLTTDISEDSAFFRLWHLLYSYQGDSSKSGQQSLVEKISEMAGLPIEYSSLIANVTFEDDYGNLSAKALKKKHPFMKEGDEYSVACEKAGYRHSKKSLTKEEIDSKEYKDKLELLPKNSLRNPVVEKILNQMVNVVNAVIDEYGKPDEIRIELARELKKSAKEREELTDAINKGNKRNDEVIKILKSKFGIASPSKNDITRYRLYEELDSNGHKTLYSGTYIPEEKIFSKEFDIEHIIPQSRLFDDSFSNKTLELKSINIEKGNSTARDYVLSKYGENGLSSYKSNIERLLKEKAFSRTKYKHLLMKESEIPADFIDRDLRDSQYIAKKAKEMLEDVVKYVVTTTGSVTARLREDWQLVNVMQELNWNKYDKLGLTEYEQRRDGQRVRKIKDWTKRNDHRHHAMDALTIAFTKRSYIQYLNNLNARLEKTTTDGTLFDLSDYEMDDLNRKDVTRVVRAIQDKELYRDSDNKLRFNPPIPLDEFRAEAKRQLEDVLVSIKAKNKVVTKNENRYKVAGGEVKKVQLTPRGELHEDTFYGKISRYVTKEENVGSIFNEEKIKTVACKAYREALMQRLSKAGGDPKKAFCGTNSLEKKPLFLNTPNTEHVPSRVKTVSFEEIYTIRKPIEPGLIIEKVIDIGVRKILEQRLSEYGDDAKKAFSNLDENPIWLNKEKSIVIKRVTMEARVDRVEPLHYKKDNLGNVILDSANRRVPSDYVKYGSNHHVAIYEDASGHLQEQVVSFYEATSRASMGMPIVDTSYKKEEGWKFLFSMKQNEYFVFPNKETGFDPSEVDLMNPMNYAEVSRNLFRVQTISSKDYRFRHHLETKVEDKNLKTKDIVWKRITSIDNLKDVFKVRINHIGKIVQVGEY

SEQ ID NO: 6795 - protein, 1180 aa, synthetic construct
  REGION 1..1180: note = Synthetic
LREALRGKNEKQTWGVCSEPLGLKGIKRHGSAADQRVENYRWRTEAISKQMSLEQVAIVLQKINGQIAGTSGYLGAISDRSKELYFNHQTVGQFQMKQLSDDPNTSLKNQVFYRQDYLDEFERIWETQAKYHSQLTAELKHELRDIVIFYQRPLKSQKRLVSYCEFESRQKDIVVDGKKKTITIGLRVCPKSSPLFQCFKIWQTINNLQVTGDVVPKAQIDLFGNSTDCEYGTRTLTEEEKCDLYRELSIKESLSETEILKLLFGSKKGLNLNFRKVEGNLTMSLLVKACQTVLAINGYNDYDFSKMPYDKAMLIITKVFDVLGFNTSFLTFDPTLDGKDFERQTAYQLWHLLYSYSGDSSATGNEKLIERLRNLLNMDRDSAAVFVSIPLEPDYGSLSAKAMRRILPHMMDGLEYSVACEYVGYHHSRRSLTKEEIAAKPLVDTIPLLPRNSLRNPVVEKILNQMINVVNAVSDRYGKPDEIRIEMARELKKNVKEREQMTRDIARANAENDKYRKILQEEFGKQNVSRNDIIRYRLYLELEANGFKTLYTQTYIPREKLFSKEFDIEHIIPQARLFDDSFSNKTLEARSANIEKGSTTAYDYVLAKYGEQGDNGSVKYKERIDSLYKEGVISKTKHDKLLMTTAEIPDGFINRDLCETQYIARKAREILESAVRVVVPTTGAVTDRLREDWQLVDVMKELNWDKYDQLGLTETYKDPDGRQIRRIKDWTKRNDHRHHAMDALTIAFTRHSFIQYLNNLNARSDKAGSIYAIEKKELYRDNNNKLRFIPPMPLGEFRAEARRHLEDVLVSIKAKNKVVTRNVNITLGADGKKHHVVQLTPRGQLHNETVYGSRRRYIVKYEKVGGAFNEEKINTVGSPRIREALLQRLEMFGGDAKKAFTSKNSLEKTPIYLDDNHTKQVPQKVKTVTLEEVFTIRKPIDKDLNVEKVVDQRVRKLLQERLAEYGGDAKKAFANLDENPVWLNRERGIAIKRVTIYGVSNATALHDKHDMYGKKMLNSNGISIPADYVSTSNNHHVAVFRDNDGNLQEHLVSFFEATERAQQHLPIIDHGYNKHLGWQFLFTMKRNEYFVFPNEKTGFDPNEIDLLDPKNAVEISKNLFRVQKLATKNYCFRHHLETSSEIPKELSGITYKWQLGLKGIAGIVKVRVNHLGEIVAVGEY

SEQ ID NO: 6796 - protein, 972 aa, synthetic construct
  REGION 1..972: note = Synthetic
  REGION 967..972: note = misc_feature - Xaa can be any naturally occurring amino acid
MKKILGLDLGTTSIGWAMVNQAENNEERSSIIKAGVRVNPLTTDEKDAFEKGKAVTTNTDRRLKRSMRRNLQRYKLRRNELISILKELGWIDDSTILAEHGNKSTFETYMLRSKACTEMISLSELSRVLLMINKKRGYKSNRKLNADEDGHLVDGMAVAKMLYDEDKTPGQYCYELVRKGNNALPEFYASDLVAEFRKVWKTQSSYYPEYLTDEFWQQAEGKSKSSLSKLFFAKYKITTADNKGKDKKVKAYEWRSSAIERQLPMDQVAYVLCEIAGNIGSSSGYLGNISDRSKELYFNKQTVGQFLYSNIQKDPHFSTKKKVFYRQDYLDEFEVIWEKQASFHPEMTADLKKEIKDVVIFFQRRLKSQKGLIGYCELESRKVDVVVNGKTVRKIRGCKVAPVSSPLFQEFRMWQKINNVIVTNKATGEQRPLEQEEKERLAEALHVKDRMSSNDILKLLFKKPKELEMNFNAIEGNETLSKLYSKFLEIISMTDGMDYEYSKMRPEELIHTLKVGFDKNHFNSEVLEYDALLSKEEYERQPLFKLWHLLYSYEGDNSQTGNESLVKKIGELCAMPDDLAKMAASISFKQDYASLSHKAMRNILPYMMDGNEYSVACICAGYNHSKQSLTKEQIDNKILKERLDEIPKNSLRNPVVEKILNQMVNVINAVGDRYGKPDEIHIELARELKSSQEERAKATESIASNNKENERIKTILEDRFHLTYVSRNDILKYKLYEELKNNGYKTLYSNQYVPEEKLFSREIDIEHIIPQAVLFNDSLSNKTLEYRDINLEKGKDTAYDYVKNKYGETGLEDYRLRVQKLFESGGISRTKRDNLLRDASNIPEGFVERDLRDTQYIAKKAREILLEYVRVVVSTTGSITDRLREEWGLVNVMKELNMPKFEAAGLVETITSSDGKDIRKIKDWTKRNDHRHHAMDAITIAFTKLAHIQYLNNLNAKSDKSSSIYGXXXXXX

SEQ ID NO: 6797 - protein, 1445 aa, synthetic construct
  REGION 1..1445: note = Synthetic
MFLKTILGLDLGTTSIGFAKVIEDDNYQNSSVELIGVRVNPLTTDEQTNFEKGKPVSVNAGRTLKRGMRRNLDRYQLRRKNLIEVLRKNRIINNETKLAEDGKGTTHSTYALRAQAVTNEISLEAFTRVLLAINKKRGYKSSRKAKSEDEGQIIDGMAVAKRLYEENLTPGQLADKLIKEGRKHIPDFYRSDLTTELNKIWDFQKQFYPEILTDEFRKHIEGKGQRATSAAFWGKYEFNTADNKGARDEKKLRTYQWRSDAVSKQLSKEEVAYVITEINNDLNKSSGYLGAISDRSKELFFNKQTVGQYLYQLLKQNPHTRLKGQVFYRQDYLDEFEVIWETQAKFHPQLTPNLKEEVRDIIIFYQRKLKSQKGLISFCEFESKELEIEKNGQKTKKRIGLRVAPKSSPLFQEFKIWQVLNNLEFKNKTTKEIFIPDLPAKQQLFDELNIKGNLSANEAIKILGYKTRDWEANYSVLEGNRSHKSLYDAYLKILEIEGCDEDILKLTDSDDIDVSKIERPASEIKKMVLSVLEVLDIDTSILNFDAELEGKDFEQQASYQLWHLLYSAEDDSKKYSQQDILTYGNDNIGLKKNLYKKFGFKPEHAKILARVVFSEDYGNLSTKAMRNIYPYIKELTYDKACLQAGYRHSASSLTKEEIENRPLEKRLELLKKNDLRSPVVEKILNQMVNVVNSLIDEENAKRKMQGLPKDFHFDEIRIELSRELKKNAKERAEMTSNINAAKQQHEKIVKILQPEFGVPNPTRNDIIRFKLYEELKNNGYKDLYTNTYIPRDILFSKQVDIDHIIPQMSLFDDSFSNKTVIFRKDNQDKGNKTAYDYILNKYGDNTAKEFVNRITHLFELGKKNKEEGISKAKFQKLQKRITEIGDGFIERDLRESQYIAKKAKSMLYTICRSVVSTSGEITARLREDWGLINVMQEINMPKFRALGLTEMIEKKDGQQKERITDWSKRNDHRHHAMDALTIAFTRHNHIQYLNYLNARKDETHKMHGNVIAIENKETELVFDDLGNRRRKFKSPIANFREIVKEHLEYVLVSHKAKNKVVTKNKNKIKTAKGEKIKTELTPRGQLHKETVYGKYRYYQHKEEKVGVKFDEATIRMVANPLYKKLLLERFTMNNNDPRKAFGGKNALSKNPIYIDGSKQEMLPEKIKLIWLEDDYSIRKDVTPENLKDVKTIEKVLDDGVKKVLLKRLSDFGDDPKKAFSDLDKNPIWLNESRGISIKRVTISGVKNTEALHFKKDHFGNNILDKEGKRIRSSFVSTGNNHHVAIYRDAEGNIQERAVSFFDAVELVNAKLPVIITNPKKAWDDILEKGIEHRLIDQFPPENWKFLFTMKQNEMFVFPNEKTGFDPKEINLLDPGNRNLVSPNLFRVQKLATRNYFFRHHLETTVEEKKELKGIAYKPQLGLIGIKDIVKVRINHIGQIVSIGEY

SEQ ID NO: 6798 - protein, 1398 aa, synthetic construct
  REGION 1..1398: note = Synthetic
MSKKILGLDLGTTSIGWAFVTEAQNENEHSTIERIGVRVNPLTTDEQTDFEKGKPISVNADRTLKRGARRNLDRYKQRRQNLINTLVNNGIISPDAILAEKDKATTHSTYKFRSLAASEEITKEEFGRVLLMINKKRGYKSSRKAKNEDEGQAIDGMAMAKRLYDEQLTPGQLCLQLLAEGKKYLPDFYRSDLQAEFNKIWEVQKKFHPDVLTEEFKKEIAGKGQRATSAIFWNTYNFNTAENKGTRDEKKLQAYEWRTNALHTQLAKEEVAYVITEINNNLNSASGYLGAISDRSKELYFKKITVGQYLYKQLQDDPHTQMKNQVFYRQDYFDEFETIWEKQTTFHKELTPTLKEEIRDTIIFYQRKLKSQKGLVSVCEFESKEVEINVDGKKIRKTIGYRVAPKSSPLFQEFKIWQNLNNLLAQNKHTKEIVPFSQEAKELIFEELNVKGNLSKEDALKILVDKPKEWDLNFKVLEGNRTNEALYAAFFKMMEKNDHEDLEWKTLPISEIRNGILSFFETEKIDTSLLHFNAELTGKSLEQQSSYKLWHLLYSYEGDNSNTGNEQLYAILLDKFGFKKEYAQILANIKLQTDYCSLSAKAIRNILPFLKAGHPFSKKDKDEKVASATALAGYNHSSSITKEENETRVLKDKLDLLPKNSLRNPVVEKILNQMVNVINAIIADPTLGKPDEIRIELARELKKNAKEREEMTAQINKSTTEHDKIRATLIKEDGIKNPSRNDIIRYKLYEELKTNGYKTLYSNTYISRERLFSKEFDIEHIIPKALLFDDSFSNKTICVRQENLDKANVCAMDFIGPYFGEDKIMDYVDRVEMMHKVKEGGISKAKYKKLLMKVESIGEGFIERDLRDTQYIAKKAKQMLHQLCKTVVSTTGSITDKLREDWDLINVMQELNIDKYRKLGLTEMIEKKDGSFKERITNWTKRNDHRHHAMDALTVAFTKHNHIQYLNNLSARSNKDGIIYAIEQKETFLFGVNGSRKRKFKEPLPNFREEAKKHLENVLISFKAKNKVVTKNKNKTKTATGDKVKVELTPRGPMHKQTVYGKLNQYATKEERISAKFDADTINKVASFPFRVALLKRLQENNNDPKAAFTGKNSPAKNPIYVDLQKTMVVPEKVKLVWLEADYTIRKDVTPDNFKEQKNLDKIVDVGTKKILEKRLAHYNGNAKEAFSNLEKNPIWQNQEKGIAIKRVTISGVKNAEALHSKKDHLGKDILDSNGNKLPVDFVSTGNNHHVAIYKDAEGNLQENVISFYEAVERVNQGLPVIDKTLKQDEGWQFLFTMKQNEYFVFPSEGFEPAEIDLTNSANYKLISKNLFRVQKIATKNYVFNHHFETQAIDGDTLKNKKMLSEITYRFIQTPFKLKNIIKVRINHIGQIVKVGEY

SEQ ID NO: 6799 - protein, 995 aa, synthetic construct
  REGION 1..995: note = Synthetic
MKKILGLDLGTSSIGWAIVNEKENEGEQSSIIKLGVRVNPLTVDEQRNFEAGKPITTNADRTLKRSMRRNLQRYKLRRESLLEILKSNHFITDETMLAENGNRTTFETYRLRAKAAVEEISLEELARVLLMINKKRGYKSSRKVNADDEGKIIDGMDVARKLYDENITPGQYVLDTMRRGKRYIPDFYRSDLIAEFDRIWNFQKQFYPEILTDELREELKNKNKKQTWAICAKSFSLVGIKREPKGNELKKENYQWRVESISKQTDLERLTIILQEINGQISSSSGYLGEISDRSKELYFKRQTIGQYLLERLDTNPNYSLKNKVFYRQDYLDEFEKIWETQAKFHAELTDKLKREIRDVVIFYQRPLKSQKGLISFCEFENRQIEVTVDGKKKLKTIGMRVCPKSSPLFQEFKIWQILNNIQVSGKVIPVQDTDLFGTTSRMEQGKRFLYQDEKETLFYELNIKEKMSKNEVLKLLFKNHKELDLNYKDIEGNRTMAALIKACQTIIDMSGHGEYDFSKMQAKDVMHIIETVFRGLGFNTDILHFDASVEGKAFDKQPAYMLWHLLYSFAGDNSKSGNEKLINKISELYGFDKDYASIIAGINLQQDYGSLSSKAMRKILPHMKEGLEYSVACGYAGYRHSSESLTREELDNKVLKDRLGLLPRNSLRNPVVEKILNQMINVVNSVVEEYGKPDEIRIELARELKKSASEREELTKAINKTTKEHDEYKKILQTEFGIANVSRNDIIRYKLYMELKDNGFKTLYSNTYIPQEKLFSKEFDIEHIIPQAKLFDDSFSNKTIEARAINIEKSNATAYDFVCSKYDSEEIKRYEVRIEELFRKGIISKTKRDKLMMREADIPDGFIERDLRDSQYIAKKAREILCDIAREVVATTGSVTSRLREDWQLVDVMKELNWDKYDRLGLTEIIEDKDGRKIRRITDWTKRNDHRHHAMDALTIAFTKRSYIQYLNNMNARSDKSSSIYAIEKMNFTVITAN

SEQ ID NO: 6800 - protein, 1084 aa, synthetic construct
  REGION 1022..1064: note = misc_feature - Xaa can be any naturally occurring amino acid
  REGION 1..1084: note = Synthetic
  REGION 894..934: note = misc_feature - Xaa can be any naturally occurring amino acid
  SITE 338: note = misc_feature - Xaa can be any naturally occurring amino acid
LFESWQQTYYDEIKQKERKRTIGHRVVPKSSPLFQKFKIWQNINDLRLVPQRDLAMDLFAVDAIGKYKKNQLVELEEDDRKLLFEEANLRGNLTETAVLKLLGLSPKDWKINFKEGINGNTTNQKLFNVYQEIAKRAGYGIGWEKLSAKEIVSELKIVFTELGIDPSILDFDSTLKKNAFPKQAGYQLWHLLYSASDDGIISEEDRLTYGNNDVNLKKKLHQNFGFKPEYATLLANVTFSNDYGNLSSRAIRKILPHLQEGKDYYEACQAVGYNHSNSLTKEELEGRVLKSKMELLEKNSLRNPVVEKILNQMVNLINQVIDEYGKPDEVRIELAREXKKTAKEREEASRYITSATKVNLEIAKQIEQEFGFTPTKNDIVKYKLWEELKPLGHKTIFSNRYIEKKDIFSKKIDVEHILPKALIFDDSFSNKTLCYREVNIKKANRTALDFITQDQNADVEEYIKRVESLYEKGNGTISKGKYYKLLKGAKDIKEGFIERDLRNSQYIAKKARNILLEVFKTVTPTTGMITDKLREDWGVINVLKELNMPKYRALGLIEREERKNNKTIEKIKDWSKRNDHRHHAMDALVVAFTTYDHIQYINNLNARRDENHEMHASISGIEKKITYSEKDKNGRSKRKFLEPLPDFRSEAKKHLQSILVSFKAKNKAVTRNINKTKKKNGFNKKLELTPRGQLHKETVYGKSKFPKPKPTKLNKRFTLDEAKMIIDFQQRNLVLDHLKKHDNSPEMAFSSKILKAEPLLWNQEPLNEVLCFEEVYTIRKDISSDLKLDKVVDQGVRRILEQRKKEFGGNAKEAFSNLDKNPIWLNKAKGISIKRVTITGVSNAEALHYKRDYLGNSIENENGEKIPADFVSLGNNHHVSIYRDEKGNLQEKVXXXXXXXXXXXXXXXXXXXXXXXXXXXXXXXXXXXXXXXXXEAVARKNQNLPIIDKDYNAHIGWKFLFTMKQNEMFIFPAEDFNPKEIDLMDEKYAKLIVPNLFRVQKIATKNYMFRHHYEAEVTNQLXXXXXXXXXXXXXXXXXXXXXXXXXXXXXXXXXXXXXXXXXXXENLVKVRINHIGKIVQVGEY

SEQ ID NO: 6801 - protein, 931 aa, synthetic construct
  REGION 1..931: note = Synthetic
MQFLYQELNWKEKLTANEVIRLLNLKGYQLNFNEIEGNRTNASFIKALNDFFVKEGHDELVLSKMNSAELIDTLKKLFPIYGIDVSLLNFDSNLGGQNIENQAFYNFWHLLYSFEGDNSKSGIDKLKTALETKFGFPFESNTPITNIKLSDDYGNLSVRAMRKILPFLKEGNRYDLACTLAGYNHSHSETKEDLSTKVLLDRLEILPKNELRNPVVEKILNQMINVINTIFETYGKPDEIRIEMARELKKSAKERENATKAIRQITDEHIKLKRELQAEFGLPNVSRNDLIRYKLYLELKDNGFKTLYSNQPIDRSKLFSSEYDIEHIIPQSKLFDDSFSNKTIELRSVNLKKGNDTAFDFINKEYGEEGLKQYEARVKALFGNQLGKKSKYRKLLMSETEIPKDFIERELRDTQYIAKKAKDILSTVVRNVSTTTGSITEKLRDDWQLVDILKELNWNKYDKLGMTETKENRHGQKVNRIVDWTKRNDHRHHAMDAITVAFTKREYVKYFNNLNAKSEKDGEIYKILKTETYFDKDQKRRFNPPMPLTQFRSRAKEHLENTLISFKAKNKVSTKNKNAIKTAKGKITTIQDTPRGQLHLETVYGSSQYYSSKIEKIGANFDLEKINKVANSKYRKLLLKRLEENGNDPKKAFTGANSLSKRPIFLNALETYTLPESVKLVEFDTRYTIRKPITPDIKIDKVIDKGIQLILQERLNQHDGDAKKAFSNLEENPIYLNKEKGLILKRVTIQGVNNAVALHNKKDHFGKEVRDAKGNPIPVDFVNTGNNHHVAIYKDEKGNLQEEVVSLFEAITRKNQGVEIIKKQHELGWEFLFTMKQNEFFVFPNEETGFDPSEIDLLDPSNFAKISPNLFRVQKIGKGDYWFRHHLETELIDRIELNGSSYKRIRNPKSMNISKKISLNHIGRIVNVGEF

SEQ ID NO: 6802 - protein, 1085 aa, synthetic construct
  REGION 1..1085: note = Synthetic
MQTRTPWRLGIDLGTNSLGWAALELNHAKTTPIGIVASGVRIFSDGRNPKDKQSNAAKRREPRSARKNRDRAKRRTERLMRELTEFKLMPTDPSERKKLEGGKHTLLEDTDPWILRYRALNEEISLFQLGRAIFHLHQRRGFKSNRKTDRADSESGKVFEATQRTSVALEENDARTLGELFGHSRYEAACFNKTAPKGERKPQPLARVRKSGSGSKWQYDYYPTRALIMEEFHLIWEAQKKYHPEVLTDEAYARLADTIEWQHPLKAQPVGRCTLLPEEERAAKAYPVYQRARILQEVNALRVSDAGKAEYALSIEQRNKVVNRLITPTSKTGKVTFKQLKKLLGLEADVLFNLESDKRQELQGDETAAKLMQPDRWGLAWLELTADQQHQIVYQLLHEENEEALIKWLCNTWELSPEQAYQVSNCPLPDGHGRLSLKALEKIVPALENDVIVYSEAVERAGLGSHSQFATGEIFDDGLPYYGYILERSVAFGSGDPNDPDEKRYGKVANPTVHVALNQIRAVVNDLMRRFGTPEEIVVELARDLPLSAKRKSELEKLQRENQDANNKRREILDELGVQDSYENRMRLRLYEDLKALDKCCPFSGEPISLTNLFSDRVEVEHILPFSITFDDSYGNKTLATRKANRDKGKKAPYDAFGHSPNGYDWQAIADRATELPYNKRWRFSPDALKRYTEFEGGFLARQLTDTQYISRLTKSYLEALYGGQGYKGAKNRVRVIPGRLTADLRHEWGLNAVLRGHNEPEAEAQRKNRNDHRHHAIDAIVAGCTDQRLVQHIATQAKKNEDNFSEKLMAGIAEPWEGFREDVEQSVRDIIVSHQPDHGIQAAMHNDTAYGIPKGEEGQPDKKGVRTVVTRKPLDSDSFKKQEDLEKIRDPDIREHLMSETAGLTGNSFKEALLAAGNAMSPPVYKIRIEEKLRVIPMKDTKGKEYKSYKGDGNYCYDIWKTNTGKWTGEVISTFQAYQLARKDENWWQKPVGQQGQKLLMRLRKNDYLKIHHENRDIIVQVVKFTDGTLALAEHMEANVDARVRDKDDELKFIFKSPSSLQNANAVLLTVSPSGVSKSHQIRE

SEQ ID NO: 6803 - protein, 1081 aa, synthetic construct
  REGION 1..1081: note = Synthetic
MSKNENRGPWRLGLDLGTNSIGIAALSLRKLPGKDEDEKQEYRVLGLMMLGARIFSDGRNPKDKQSLAAMRRVPRGMRRNRDRTLNRNARFLKELQGFGLLPAASDPPSAAELATRRELAALDPYILRARGLDEELPLHHLGRALFHLKRRGFQSNRKTDSGDQESGKIRDAANRTREKMEGEGGRTLGEWLGRQRMETLAENEALAKGKRKPLPQARTRLHGAGAKAYYDFYPTRAMILDEFDRLWESQRRWHPAALTDEAYQTLRKTLAFQYPLKTPPVGKCTLDPSQERAPRALPSVQRLRIYQELNHLQVMDCPGEPWRAIEKKERDLLAKKALGQEKLTFDGMRKWLKLSAHARFNLETDKRKYLDGDKTAAMLASPKRWGKGWRDLPFDTQEEIVTKLLETEKEEELLPWLMAEHGLSREDALAVSRTTLPAGHGAFCAEVSRGLLAELEQDVITYDEAVKRAGYASHSQLDDGVRVDRLPYYGKILARHVAFGSGEPGDPEEKRYGKLANPTVHVALNQLRRVVNDLIARFGPPTQIVVELARDLPLSAEGKRALEKTQKDNQAANDERRKILREHKQPDNYQNRLRLRLWEELNPDDPLDRRCVFSGEQISITRLFSDEVEIEHLLPFSQTLDDSPANKTISTRRANREKGNRSPYEAFSHSPLGFDWEEIAQRAANLPPNKSWRFSPDAMERYQDEERDFLDRQLTDTQYIARLAGTYLAATGADVWVIPGRLTADLRWALGLDNLLAAPGEGVDAKKNRADHRHHVIDALVVALTERGRLQKVATLAGQRREQGHTRLLQNPEEPWPDFRQEVADCVEKIVVSHKPDHGVQGALHNDTAYGLLDEAPDAKGVRTVVHRVPLESFKKRANIRNIRDDVLREYFIANTEYVPDKEIGKTLVALGERLHPPVRRVRICERLNVIPISDAQGQPFKAYKGDANYCYDIFAGAPGKSGATKWTGRVVSRFDANQQGFEPQARVSTGGEPLIMRLRIDDMLELDDGGGRRIVRVVQLSEGQITLAGDHEAGDLKKRDKDKEDPFKYLRLVPSTLQARNARMVHVSPSGVIRHKGNLS

SEQ ID NO: 6804 - protein, 1078 aa, synthetic construct
  REGION 1..1078: note = Synthetic
MREKENRGKWRLGIDLGTNSIGIAALSLNEPTEAGGKHTVSGLMDMGVRIFSDGRNPKDKQSLAAMRRIPRGMRRNRDRKLNRNARFLRQLRGFGLLPTTSDPPTKEDLARRQELEALDPYILRARGLDGELHLHHLGRALFHLKRRGFKSNRKTDSGDQESGKIREATNRTKEQLEEAGCRTLGEWLGRQRIQTLEKNAAAPKGKRDPLPQARTRLHGGAKAYYDFYPTREMILDEFDRLWESQRRWHPEALTDDAFRTLRETLAFQYPLRPPPVGKCTLDSTQERAPRALPSVQRLRIYQELNHLAVQQPGESSRPIEKKERDLLAEKALSQAKLEFDKMRRWLKLPLDGRFNLESEKRKHLDGDLTAAKLASAKCWGKDWRDLNLDTQEAIVTRLLEQENEDQLVSWLMEEHGLSREKAMAVSRVQFPTGHGAFCAEVSRKLLEQLEADVVTYNEAVELAGYESHSQLDNDAVFDRLPYYGKVLERHVAFGSGEPHDPEEKRYGKVANPTVHVALNQLRRVVNDLMGRFGAPAEIVVELARDLPLSAQEKRKLERTQKDNQAANDKRREILRDYSEKDNYENRLRLRLWEELSQDPLDRRCVFTGEQISFGRLFSDEVEIEHLLPFSRTLDDSPANKTISMRWANRKKANRSPFEAFSDSQPGLDWEEITARAANLPLNKSWRFAPDAMERYENEERDFLARHLTDTQYIARLAVSYLKATGADVRVIPGRLTADLRQVLGLNTLLAESGKSGTKKNRADHRHHAIDALVVALTQRGLLQKVATRAGRAREEGRTRLLQNPGDPWPGFRNDVASCVEEIVVSHKPDHGVQGALHNDTAYGLLKEEPDTKGIRTVVHRVSLDSFKRRADIENIRDDKLREYFLANTEYVPDKEIGKTLVELGERQHPPVRRVRICERLDVIPIRDAQGQPFKAYKGDANYCYDIFTGTPKKSTEGKSTGNKWAGRVISRFAANQPGFQPQARVSTGGEPLIMRLRVNDMLELEESDDRWIMRVVKLSKGQITLARDREAGNLKARDADKADPFKYLTLSPAGLGARSARMVRVGPSGVIRHKGNLS

SEQ ID NO: 6805 - protein, 1053 aa, synthetic construct
  REGION 1..1053: note = Synthetic
MTWRLGLDVGTNSVGWAALGLGPTGPETLIGTGVRIFSDGRNPKDGSSLATKRREPRSARRNRDRYLKRRSEFMERLVAFGLMPKDESKRKELEHLDPWILRCRALDEPLTAHEIGRALFHLQQRRGFKSNRKADRGDSDKGAIAEARERTLDRLANEGARTLGELFGRRRMDAAQNNAVTSKGARQPQPAARVSPYQDGAKLAYDYYPTRELIQQEFDLIWESQVSFQGKDTLTDDARNALADTLLYQRKLKPQPVGKCSLDPTQTRAERALPSIQRLRIYQDANHLHVLVTGEPSRSLTLEERDIVVDRLLGSARVSFSGLRKALKLPADSRFNLESEKRSFLLGDETAAELAKEKRWGKEWRKMLFADQERIVRQLLDVEEEEELRRWLTDEFGLGATEANAVSDASLPEGHAAICSDAAGRLLTALQGAVITYDKAVIEAGFLSHSRLDHHGEILDRLPYYGKVLQRHVAFGSGEPSDKAEKRYGKVANPTVHVALNQIRHVVNDLVRRIGSPEEIVIELARDLPLSAQGKRDLEKRQRENQNANEKRREDLRKLGRSDTYENRMRLRLWEELNPENVLDRKCPFTGEQIGIERLFSDEVEIEHILPKSRTLDDSPANKTLCMRSANREKRERSPYEAFGSSPGSYSWGHIVARAANMPSNKSWRFAPDAMDRFESEERDFLDRQLSSTQYIARLTANYLVWLVGDPGKVHVTPGRLTSDLRHHWGLNSVLRGHNEAEPEAIGQKKNRNDHRHHAIDAIVVALTDRGLLKKIATQAARNQSNSSGQLIDTIDTPWASFRDDVAACLSSIIVSHKADHGVQGALHNDTAYGLASDADKTGKRDVVHRVPVASLDTLKKIEQVRDPLIRDAFMDAAAGLTGKDVVTAVVTAGEAMTPPVRKVRVLERMNVIPINDKDGQTYKAYKGDGNYCYDIYANEKGGWTGEVVSRFDANQPSFEANGSISRSGTPLIMRIRGGDTLLIDQGQGERFMRVVKFSSGMICLAEHFEAGSLKARDTDQHDDFKYLIVAPSRLQNWGAQIVHVSPSGHVFR

SEQ ID NO: 6806 - protein, 1049 aa, synthetic construct
  REGION 1..1049: note = Synthetic
MMWRLGIDVGTNSIGFSVLELDQTQEILKPVKILDLGVRIFTDGRNPKDLQSLAAMRRTPRGMRRNRDRAKNRNARYLGELRRYGLLPDEDRPCILQLDPYILRLKGLDEKLDLHAFGRALWHLKRRGFKSNRKTDGGDQEGGKIRDASDRTRQTLKEENCRTLGEWLGKPRLQTLIDNECHKAGERKPMPQARVRLRGKGAKAFYDFYPTREMILEEFDLLWQVQQKWHPEVLTPEAKESLRETLAFQWPLKPQPVGRCTFDPDQPRAPRALPSVQRLRILQELNHLGIIEPGKSLRSLTLEERDQVLQLLLRTKKQTFDGIRKALRLPQDARFNLESASRQHLDGDQTAARLSSKNLWDKSWRDLSATEQDRIVERLLEEQNETALVEWLQKEYSLAPDRADAISRVTLPAGHGAFCREVTARLTPHLEASVLSFDKAALAAGFHHSDFRDGEVYPDGLPYYGKILQREVAFGSGNPTDPEEKRLGKIANPTVHVALNEIRKVVNDLISIYGTPSQIVVELARDLPLSAQGRRDLEKQQRENREANQSRDKELDRLGIPRSYENRLRLRLWEELNQDNVMDRRCVFTGEQISIERLFSSEVEIEHLLPFSRTLDDSIGNKVLCMRQANRIKTNKTPHEAFGGSPEWADILNRAASLPENKFWRFSPDAMDRYNTGERDFLNRQLNDTRYIARLTKGYLEKTGADTWVNTGRLTSDLRWALGLDSVLPGHNSAASGTGKNRLDHRHHAVDALVVGLCDRSMMKKVSELAAKQETASGVRLLPGLDEPWEDFRDAVVHQLERLVVSHKPDHGVQGPLHNDTAYGILDPQAPAGEAQEVVRRVAVSDIHKASDIERIRDPELRSFFQNVAETATDKNLGDVLSAAGETLHPPVRRVRVVEKLRVIPIGNGRATPFKAYKGDGNYCYDLFEDQKGRWTGIVINRFDANQKDFDPHSGTGPDGHNLVMRIRVNDMLELEHEGSRQVMRIAQISPGKITLAGHTEAGSLKARNADKEDSFRYLTFSPSSLQKLGAVRVTVSPAGRLFRKQPGQ

SEQ ID NO: 6807 - protein, 1048 aa, synthetic construct
  REGION 1..1048: note = Synthetic
MAWRLGLDIGTNSIGWAALSLDREKGSWRPFGIIASGVRIFSDGRNPKDRQSNAVARRLPRQQRRMRDRYLKRRERFMDALVRHGLMPVDIEQRKALEHEDPWTLRVKGLDEQLTLNQLGRALFHLQQRRGFKSNRKTDASGDDDSGKIKSAAAAVTEAMKKSGTRTLGELLAAPRIKDPKSAHSNPVRTRLKGTGAKAHYDYYPTRDLIEQEFNCLWAAQKNFHKGALTDAARDELHDILFFQRDLKSQPVGKCSLDPTQERAPKALPSVQRLRIYQEINHLTVSLPGEAAHPLTLEERDILVGKALATKQLTFDAARKALKLPANARFNLESEKRKHLDGDKTAAILGSTKRWGKGWRDLPVADQEKIIEKLLDEENESTLLDWLKSKYGLAAETAEAVAGSPLPDGHGQLGRTATARVLAELEKDVLSYDKAVVAAGYESHSQLDFDGEVFDALPYYGEVLERHVAFGSGEPADHPEKRYGKIANPTVHVALNQIRRVVNDLIKTHGAPDQIVVELARDLPLSAKGKSDLDKTQRENQNANDDRRKFLAEMGQSDSYDNRMRLRLWEELNPKDILDRRCPYTGEQIGQNRVFSAEVEVEHILPLSRTLDDGIGNKTLSMRRANRFKGQQTPFEAFAASPEGYDWAGISARAINLPNNKSWRFNPDAMDRYDNTERDFLARQLTDTRYMSRLATLYLRRTGADVWVTPGRFTSDLRWAWGLDSVLAGHNQEEGGDPIKNRNDHRHHAIDAVVVALTDRGLLNHVATVAGRAEERFDKRYLADINDPWIDFRDTVRESIEQVVVSHKPDHGVQGALHNDTAYGIVEPADAKGRSQVVHRVPLGSLKPKQLEAIRDPLILEHLKTKTAGLEGKDFTNALIKAGEAMNPPVRKVRIVETLSVIPTVTDKTGNVLKAYKGDANYSYDIYSDSKGKWTGRVVSRFEANQKEFTPDARALPDGAPLIMRIRGNDMIGIGEGEKRRILRVVKFSTGQITLADHCEGGALKSRDADKDDPFKYMTVSPSGLQKLKATLVHTSPAGRVFDPGPSE

SEQ ID NO: 6808 - protein, 1058 aa, synthetic construct
  REGION 1..1058: note = Synthetic
MVWRLGLDVGTNSIGWAAVELMEGRPCGLIDAGVRIFSDGRNPKDGASLAVQRREPRSARRNRDRYLKRRSEFMDRLVEHGLMPREDSERKALENLDPWILRARGLDEKLSLHELGRALFHLQQRRGFKSNRKTDRGDSDKGAIAEATQRTLERLEEQGARTLGQLLGRPRMEWAARNASLPAGQREPQPATRVSPYRSKGKTAYDYYPTRALIRDEFDCLWARQREFHGNALSEDARMALADTLFYQRTLKPQPVGKCTLDPAQERAPKALPSVQRLRIYQEANHLAILRLDAGSEPLSREQRDRVAAKLLSTGKVTFDSLRKTVLKLPGNVRFNLESEKRRHLDGDATAAVLAAGKRWPDWRSLPLSDQDRIVEQLLEVEDEAQLIAWLCDEYGMARETAQALANAPLPDGHSAFCREVTGKLLAELERDVITYDKAVERAGYPSHSRLDHDGEVLDRLPYYGEVLGRHVAFGTGEPADPPEKRFGKIANPTVHVALNQIRKVVNALVARFGAPDEIVVELARDLPLSGQGRRDLERRQKENQDANDKRRTELEALGEPDSYQNRLRLRLWEELNPSDILDRRCPFTGEQISVKRLFTDEVEIEHILPRSRTLDDSPANKTLSMRRANRQKREQSPWEAFGHSPDGYDWDNIAARAANMPPNKAWRFAPDAMERFENEERDFMARQLHSTQYTARLAANYLVWLIGDPGKLCVTPGRLTSDLRHHWGLNSILAGHNLGEARAADIKKNRNDHRHHAIDAVVTALTDRSLLQRIATEAGKAEHAGDARLIHDLDDPWPGFRDRVMEVVSRIVVSHKPDHGVQGALHNDTAYGLVGNVEKSGKRDVVHRVPLATLNRPDKLDAIRDDCLKKAFRAATEGLSGKDFVDAIVAAGEDMSPPVRKVRIVESLSVIPIRDGNGHAYKAYKGDGNYCYDIFAGSNGKWTGEVISRFEANAPDFDPSGRVSRTGEPLVMRIRGNDLLRVDHDAPGQVMRVVKFSKGQIVLANHNEAGRLKARDADKTDPFNYLTVSPSRLKDIGAQQIYVDPSGRAFANPAGSS

SEQ ID NO: 6809 - protein, 1059 aa, synthetic construct
  REGION 1..1059: note = Synthetic
MAWRLGLDLGTNSLGWAALKLDGQGRPTGLIASGVRIFSDGRNPKDKQSLAVMRRLPRQQRRRRDRYLKRRSEFMERLIEHGLMPKDPAERKRLEKFDPWYLRVRGLDEKLSLHELGRALFHLQQRRGFKSNRKTDKGAEDEKGKIKSAAENVKTVMKNAGARTLGEYLAKPRVKNPKDFETRKAARKAAHEAAQEHPVRARLQGSGAKAFYDFYPTRDMIAQEFDTLWKAQKKFHDAALSDAARDALRNTLLFQRKLKSQPVGKCSLDPSEKRAPHALPSVQRIRIYQEVNHLNVRLPGEAERNLTLEERDSLVAWALAHQKLEFQKARKLLKLPDEARFNLESERRKHLDGDKTAAVLANNNRWGPGWRKIPAEAQEEIVKRLLEEENEKTLVDWLMAEHSLSAEAAEKVANAPLPAGHGRLGRTATRRVLAELERAVITYDAAKEAAGYDDLDFDGEVFDALPYYGEVLERHVAFGTGEPADLPEKRVGKIANPTVHVALNQLRRVINTLIKALIKRYGRPTEIVVELARNLPLSAKGKSELERQQRDNQDANDKRRAILEEQKLSDTYENRLRLRLWEELNPANPLTRRCPYTGEQIGIERLFTDEVEIDHILPFSRTLDDGIGNKTVSMRIANRVKGQKTPYEAFASSPEGFDWPAIKARAANLPNNKSWRFGPDAMARYDNEERDFLARQLNETRYLSLLAKTYLLRTGADVWVTPGRLTADLRWTWGLNSVLAGHNLEEAADPAKNRNDHRHHAIDAIVVALTDRGLLQRVATEAARAEENFDRRLLAGLKEPWRNFREDVRTSINRITISHKPDHGVEGALHEETAYGIVRDPLTGEPRLATRKPVTSLTAAEVKRIGDLGIRKTLMERTKGLEKKELQAELERCVKETGTHRVRVHKVEADYKVIRHGKNGEYKAVIPGENYCIDIIETPDGKWRGYGVTRFDANRKDWTPPWKRDHPDARPIMRVRKNDLLRLEKDGREQVMRVIRLAPSANCFYLALHKEGGELEKRHKDSEDSFRWDFANFSKLKDRCARLVHVDPAGRVFDPGPPR

SEQ ID NO: 6810 - protein, 1052 aa, synthetic construct
  REGION 1..1052: note = Synthetic
MNWRLGLGIGTQSIGWAALSLAQEPCRRRPVRLECAGVRIFSDGRDPKDRQSNAVARRLARQDRRMRDRYLKRRGRFMNALIRHGLMPEDSDARKQLERLDPWVLRLRGLDEGLTMHEFGRALFHLQQRRGFRSNRRTARKAVEETGKIKSAATALRQKMDESGARTPGEFLARRRLRNGRADHHAAANHPVRVRLIGTGARAAYNFYPTRELVEEEFHALWNAQRRCHGDLLTDAARDELHDILFFQRKLKPQPVVRCVLNPSEKRAPRALPSMQRLRIYREVNHLRIQMPGRAARKLTRAERDTLVHRALHVRKLNFATAHNLLHMPPGSKFILQGASRKHLDGDQTAAALAARGSWGPGWRRLSASEQEQIVEKLLAEQNESKLRDWLIGQYGLSSDTADAVMAAHLPEGHALLGRNTAARVLKELEPEVVTYDRAVREAGFDERSPLDFDGEVLDKLPYYGEVLQTHVAYGSGDPSDNPEKRHGRLGNPTVHVALNQLRRLVNELIDRFGRPDEIVVELARDLPLSARGKAKLNRMDRQNRAANDRRRDTLRELGVADTYENRLRLRLWEELNPGNPSDRRCPYTGEQISRNRVFSGDVKIGHILPFSRTLDNGVANKTLSLGQAIRFKGRRTPYEAFAASPAGYDWQAIAARAAAMPGSKSWRFAPDAMQRFGDEERDFLDRQLDDPRYLSRIFRRYLMHTGADVRVTPGRLTSDLRRALGLDSVLKRDDRDQAAGAAKNRLDHRRHAVDAVVVGLTDRALLNRVATLAGKAGEPLDDRPLAGLPTPWPRFRASVRECIESIVVSHKPDHGTQGAFHNDTAYGVVHAPDELGRSKVVHRVPLSRLRPGQIDSIRDPVIRDRLSAAATGLTGAAFTRELIDAGETLDPPVRRVRICETMRVIPTVIDADGRVLKAYKGNANYCYDIFREDGGQWGGRVVSRFQANRGEFNPDDRETPDGTPLLMRLRVNDMIATGRGGERRILRIVKLSRGQVTLADHFEAGSLKSRHTDRNDPFRYLLASPGRLQALNARAVHVTASGRLFDPGPPA

SEQ ID NO: 6811 - protein, 1058 aa, synthetic construct
  REGION 1..1058: note = Synthetic
MAYRLGIDMGTNSIGWAVLELENGTVSGLVDAGVRIFSDGRNPKDGASLAAQRRQPRSARRNRDRKLVRKRQLLTALKDYGLLPRDDEQAKSLQHLDPWILRAKGLDAPLTPYELGRALFHLQQRRGFQSNRKTDRGDNEGGAIKEGAARAEQMLLEKGCRTLGELFGKRRLEAQSENAERPEGQRDPQPPARVRPTAKGNKISYDYYPTRALIRVEFEALWQAQAPHHPELLTDKAKEKVADAIFFQRPLKPQVVGKCTLCPDEDRAHKALPSLQRIRIYQDVNHLSYRLPGEKAQTLTLEQRDAVVRKLLSTGKLSFDALRKTVLKLPPGTRFNFEVNRKDLKGDETAANLASKKRWGPDWRNLPLDTQDAVVERLLEDEDEDKLVQDLMSEHGLSEEIARNVCSAPLPITRASLSLKAARTLLPALKSGVISYDKAVNDAFGQSHSQLDHHGEILDRLPYYGKVLHRHTVGGSGRAHDRPEVRFGKLANPTVHVALNQLRRVVNDLTDRFGSPEEIVVELARDLPLSAKGKSELKKQQGDNEKANDKRRELLKELGQDDTYANRLRVRLWEELNPDDPLERRCPFSGEQISKARLFSDAFEIEHILPKSRTLDDSPANKTLSARAANRYKREHSPYEAFGQNREGYDWEDIVQRCAILPPNNAWRFGPDAMDRFENEETDFADRQLVSTQYIARLAASYLVWLVGDPVKVWPIPGRMTSDLRHHWGLNTLLSKPGKAAKNRDDHRHHAIDAIVVGLTDRSLMQALARDAGREREEGDARLIERIAEPWPDFRSTVGEQIGKIIVSHKPDHGIQGSLHNDTAYGLASEADKDGRHDVVRRVPLESLKTFDKLDLVRDDTIRQHLKDATEGLSGTSFTNALIKAGETMTPPVRRIRILERMKVIPISHGRLHPFKAYKGDGNYCYDVWMGPKNKWTGEVISRFDAHQPGFDPQSSFSRSGGRLLMRLRVGDMIEIGNKYGQQEIMRVQKMTAPSGGAPTLTLAEHNEANVDARNRDKGDLFTYRNCTPSALQKHRAVQLRISPSGRVYRDRRYGLTS

SEQ ID NO: 6812 - protein, 1090 aa, synthetic construct
  REGION 1..1090: note = Synthetic
MTWRLGIDLGTNSLGWAALKLEKDGEAWTPVGLMDSGVRIFSDGRNPKDKQSNAAKRREPRGARKNRDRSKRRSARLMRQLVECGLMPKDIEARKKLEMGTRSTLNETDPWILRCRALDEKITPHQLGRAIFHLHQRRGFKSNRKTDSKDSESGKVYDAINRTEKALAEKNARTLGELFGRPRLEAFEFNQTARKGERIPQPLARVRSRGVGAKSQYDYYPTRALIVDEFDRIWKKQREFYPDLTNDAKARMEQARKDLRHTIEWQRLLKSPPVGKCTLIPEEERAPKALPSSQRARIFQEVNALRYGPAGEAQVPLTLEQRDIVVQSLLRPTSKSAKRTFSQIRKLLGFSERDHFNTESEKRKDLVGDETAARLMQKDCWGPEWLELDLATQDEIVEHLINEEEKDRLVAWLCDVHGLDKERAFGVADCPLVAGHGNLSKLALDRILPPLEAEVIVYSDAVKRAGFDSHSQFGTDKVFNEKLPYYGEILERSVALGSGDPKDSDEKRYGKVANPTVHVALNQVRKVVNDLMARFGAPEQIVLELARDLPLSAKGKNDLEKIQRDNQQANDKRRERLAELRQSDSYDNRMRLRLYEDLEALGGRCVFSGEQIGTTKLFSADVEIEHILPFSITFDDSYANKTLAIRQANRDKKNRSPYEAFGHSPTGYDWEQISLRAAELPPNKRWRFAPDAMDRYENFEGGFLARQLTDTQYISRLAKAYLEAIYGGQGLKGSQNHVWVVNGRLTADLRWQWGLDSVLHGHNLEISEAQKKNRNDHRHHAIDAIVVACTDRAMLKRASDKAKENESKFAEGLMKGTPPPWGGEGGQFRTDVENCVRNIIVSHKPDHGIEGAMHNDTAYGIPKGKEGEPDNKGVRKVVTRKPLDSDSFKSPNDLEKIRDHQIKMGLLEETYGLSGREFKEALIAAAEAMTPPVYKVRIEENLRVIPIRDKEGTEYKAYKGDGNYCYDIWRNEKGKWTGEVISTFQAYQLARKDERWWQQPVGRNGQKLIMRLRKNDYLQIEHEEKIIIVQIAKLSPGMIAMAEHMEANVDARTRDKQDELKYIFKSPASLQKSKAKRVTVSPSGVVKIYD

SEQ ID NO: 6813 - protein, 748 aa, synthetic construct
  REGION 1..748: note = Synthetic
MRNLSVMSSRLRQLIKFGLMPEDGTERKALEGGKGISQGDSDPWILRFRALRQKITPYQLGRALFHLHQRRGFKSNRKTDRGDSESGKVYEAITRTKEKLQEQGARTIGELFGKQRAKTFLENSKTEKGNRNPQPLARVRRSGDGAKWGYKYYPTRELVLDEFDQLWAKQLEFHGELLTEKARSELRDTIEWQHELKPQPIGKCTLLPEFERAPKALPSSQRARIFQEVNNLRIMPTGESSYPLSKEERDIIAESLLRPSSKTAKRTFDQLRKLKGLSIYDSFNLESDKRKYLVGDETTARLMQKDRWGESWFKLHLVEQDEVVDRLVNEEKEGVLIDWLCDTHGLDRDQAYSIADCPLPEGHGNLSKQALDKIIPFLECDVTVYSDAVKQAGMEHSQFATGEVHDLALPYYGYVLERSVAFGTGSPDDADEKRYGKIANPTVHVALNQVRAVVNDLIRRFGAPEQIVLELARDLPLSAKGKGELESTQRKNREANEHRAKELEETYGRQPNTYDNRMRLRLYEELDALGKRCVFTGQQIGPHNLFSDEVEIEHILPFSRTFDDSFSNKTLSMRQANRDKGNQTPHQAFGHSPSEYNWEEISKRAAELSPSKRWRFNPDAMERYENFEGGFLARQLTDTQYISRLAKTYLESIYGGQGFIAGTNNVWVINGRLTADLRHYWGLNSVLLGDNLPEAESQKKNRNDHRHHAIDAIVVGCTDRSMLQKAAREAKENEREFSNRLLAGTPPP

SEQ ID NO: 6814 - protein, 1071 aa, synthetic construct
  REGION 1..1071: note = Synthetic
MKDYILNKKPEPASNEMVWAFDLGKGSIGEAVRCGNEFLHKASLLIPAEFAETKTAAGRRRMFRTREAHKARERWLNEVMREAGVEVLHGRNYDAAGNWKPGEPAGKRLEQEFPAPGDDTCYTSCLLRIKLLRGEKLEPWQVFKAFHSAIQRRGYDKDIPWKTRETRKAKDADDDDAGTEQRMHKFEQDLESMAPGKSEFHFPAYFDAYQMGLWNPTKPDDLKLRSDCHAKTTRNQIVPRKLVEAEIRQMVEGAAKHYPALAGKADYLLYGIAQQSYASTKPELREKFKLREGGATDWQGVVGQKIPRFENRIIAKCALIPRLNVCKLREGEKGQPHEKSLVAVEVAFLMKLKNLRVQRPGGNGWLSAKEIRAILENPKRTDWKFTKSAWKKLCVTIGAIPLPGHDEIESPRFSGRSRFCRPALEVLKRLILSGKKPSEFLQEEIARLNGNKDPLKGLVEADLKFIGDMAAKNDTWEGIYIPNQQLDALVELSNNSDEAITRLIGQQNDPIVRHRLGVFYKRLLELEKSTKSRPDQVVLEFVREDFMGKKAKIEYFSFIKRRAEERIKAREEAASVGATEKSAGLKLELLRAQDGCCLYTNEGLVPSKLDEYQIDHIVPRSKGGPDAVVNYVLTTQKANEAKADRTPYDWFHQEMPDKWDAYVNRVRSRATHLRNKKVQLLVALNAAELADKYTALAETAWIAKLAQAIVGLHFGWRNGVDENGNKRVTVISGGLTGRIRRKYALNQVLNPNAKTEEESEKKNRDDDRHHALDAMVISFIPSWVRDAMKEKFFRFPEPIHQNAKGFFEKEIASVVPRNLCFEKAALAETIYGARTDHGKKVIVQRAELVLLGMKPTTPGKSVYDLKYAVKQSQSIRDSIIQERVLEFLTTNPDEVAWRKFCAEFRLKGKDDSSGSRVLFVTVNVGEPTEYKDMSKDGTGAYRKALKGHKGQIVYWDAAGELCVAPIYPHDSLFQKREKINSLGGKSKFYGFFQSDCPVRTKKEIPMESYKLVIRNEAKQKRRIVAEKPLPPCELTLRTIITKDMIGELTLADNTRVVASLDVWVAAGLERI

SEQ ID NO: 6815 - protein, 1372 aa, synthetic construct
  REGION 1..1372: note = Synthetic
MNDYVLNKKPEPAANDMVWAFDLGKGSIGEAVRRGNEFLHKASLLIPAKFAETKTAAGRRRMWRTRQAHKAREQWLEKVMRDAGIEILKGRQVGKVDGKWTETAKGDPRLEREFPAPGDDTCYTSCLLRIKLLRGEKLEPWQIFKAFHSAIQRRGYDKDIPWKTRKSSTVKKDGDDEDVGTEKRMLDFELALGKMAPGKTEFQFPAYFDAWKMGLWNPAKPDELKSRTDCRAESTRNQIVSRNRVEDEIREMMEGAAKHYPALAGKADYLLYGPTGTSYASTKPEVRKKFPMLKLREGAVTDWQGVLGQKIPRFENRILNDCALIPRLHVCRNPSRTEYKELPEEKLLPAQVTFLMKLKNMRVEEKTPQRKQRGLTAAQIKEIFEKYNPARKYSLTPTQWRKWCEEFDVIPITDASEKGKRASDEADDEKKKGEKNIIEAPADSGRSRFSRPALRILKSLILSGQKPSAMHQKLLGRDTSLLAEIGMDILDKPPIKEKKDASSNVVQNYTKQPRPWLLVSDLSFLLAMRKTGANEDTWEDLFIPNQRLDQVVHEITAGGNSDAKAERQRRDKAIQKLIGSQNDPKVRHRLATFWERLQLLEKEHGKPEQIVLEFVREDFMGEKAKKKLEQFQKDRAESRKNARDHGGLKFELYQAQGGLCLYGKQVIKDGKCVYLENGLPMPGTPGWDNLVIDHIVPREAPYNGPDATVNYILTTSDANNAKRKRTPFDWFQQDRLAEWDGYKNFVASKIGALGGKKVQLLTRSDAAELVGKYTSLAETAWIAKLAQTLIRLHFVWPLEHERGQERVTVVPGGLTGRIRRKYLLNTLLDERFKNLPTCQIKPEDEEDAGNDRKDLRHHGLDAMLISFFPDWMRNPHKGDFFRFPQPLDQPFPGKRNKLAVREFFKKQLDEVLPENLFLEKAKLAETAYGRSFQPEETAANGETVKYKTAKLPLVELAYIKDPDGNASFDYTHARRTARGISDEKIRAVVEEFLKCQRAEADWAVFCQKFEAELASQQTPGKAVKIEVRKVEEVRAHRVSVKDMAYEQGNSRQYDVLYATENVNEIVADLPEQKIIKAKLREFFAGTPSEAQWKTFAETLKPIDRCKLRSEFDEGGKKSKARTVKFLVFAHRPIPMKFNLEKAHARIDKICDEYVRQRLRAFINQNPVPDQSAWNAFCDSFAHERKDENGNLLKDAKSNVLYGAAIKKVRVNDGSPDEYKDFSKDGTGTFYKNKKEHKGQFVYVVDDGTPDGAVNVRPVYVFESVQAVKTAVESVPKFKSLTGYFQSGCTIGIKEPVPADSYKLVVWNDEKKKRRIAATIPLAANSKFMLSTIITASQAAEMQTADGTVIVFSSLEPLIKAGLHRVYRKSETE

SEQ ID NO: 6816 - protein, 1065 aa, synthetic construct
  REGION 1..1065: note = Synthetic
MITYELKKVALQNQTDEIVWAFDLGKGSIGEAVRRGNEFLHKASLLIPAEFAETRTARDRRRMFRTREAHKAREKWLCKVMHEAGIEILHGRNYDAAGNWKLGEPAEKRLEQEFPAPGDDTCYTSCLLRIKLLRGEKLEPWQVFKAFHSAIQRRGYDKDIPWKTRESRNPKAKDGDDDDAGTEKRMHDFELALEKMAPGKTAFHFPAYFDAHEMGLWSPDKPDGLKLRSDCHAKTTRNQIVPRKLVEAEIRQMVEGAAKHYPALADKADYLLYGIAQQSYASYKPELRQKFKLREGGATDWQGVVGQKIPRFENRIIAKCALIPRLNVCKLREGEKGQPHEKSLVAVEVAFLMKLKNLRVQRPGGNGWLSAEEIRGILEDPKRKDWKITESVWRKYCVRIGAGWLLGHEEVKSPRFSGRSRFCRPALEVLKRLILSGQKPSKFLQEEIVRLNGNKDPLKGLVEADLKFIGDMAAKNDAWEGIYIPNQQLDALVELSSDSAEAITTLIGRQNDPIVRHRLSVFYKGLRELEQTTKSRPDQVVLEFVREDFMGKKAKIEYFSFIKRRAEERIKAREEAANAGATEKSAGLKLELLRAQDGCCLYTNEGLVPSRLDEYQIDHIVPRSKGGPDAVVNYALTTQKANEAKADRTPYDWFHQEMPDKWDAYVNRVRSRATHLRNKKVQLLVALNAAELADKYTALAETAWIAKLAQAIVGLHFGWRNGVDESGNKRVTVISGGLTGRIRRKYALNQILNPNAKTEEEAEKKNRDDDRHHALDAMVISFIPSWVRDAMKEKFFRFPEPIHQNAKGFFEKEIQSVKPRNIALQKAAFEETIYGQRTIDGHKFIVGRESLASLAIKTTQNSQTIKKVSDIEFGRIVDARIQKDVKEFWESNPAATLESWKKWCADYRLGANGPLVNFVLVKKSKEDAVEEYKNVSKAGVSSERGQYKRGAKHRGYYIYERPAPTRKEPNKMQVEVCPVFVFQSKKAVQENLLKQTGIKMHGYFESGCQVRTQREWEFQGKKYPADEFILGSVWANRNAKFRHPIHQEIGPVGLRILLDAGFERI

SEQ ID NO: 6817 - protein, 1082 aa, synthetic construct
  REGION 1..1082: note = Synthetic
MSSAMEAPQKYVLGLDLGSASLGWALIALNPANEPTSLVRAGVRIFEPGVDGTALDIEQGKDQSKAVERRTARLHRRQLRRRAARQRELFQELQKAGLLPTNAVGTGASSEQRHELLNALDRSLTLKFLKPNDDSFAQKPLYLLRKLALDQALEPFELGRVLFHLSQRRGFKSNRKETKKTAKENEDLGQVKADIHALELAIQDAGARTIGEYFAGLDPHTEKLRRRWTARKMFEQELALIWDAQAKHHASLLRQELRDRVHELLFFQRPISAQKHLVGTCELERGDDKHPPKRRAPWATMAAQRFRMLQKINDLVVIDTKNQTSRKLTEEERSKLYQLLDREGTQSFIAIRKYLDLKGTAFNLEAGGDKDIPGNRTQKSMRKVFGVFWDEFTEGKQNQIIENWRNSESDEVLIQEAIEHLGLDAEAAAVLAKESPQSDYCSLSLAAISKLMPLMMSGRSFKDAETEIYGSRFSGLAVHDTLPPVREALPTLRNPAVERAMTELRKVVNAIVREYGKPYEIRIELARELKKPRQERIKATTANRKREADNKGIAAKILSECGMANPSRADLEKAKLFVECGGICPYTGRSIPFSQLFQDSEFDVEHIIPRSRFPDDSFQNKTLCYLPENREYKRNQTPFEAYSNNPDVWAQILLRVTKWSNPGKLSRFKLQSERELADFSARQMNDTRYTSVLAGRLLAMLYGGRDVQTDNDNRQVIFASSGAVTATLRRSWGFERILQAIVSPEPGDTRGKPRTDHRHHAVDAITIALTRQSVIQAMASASAFEPWQPGTRSWRRVPEPWTTPDFIGNLTEQIVQMVVSHRPEHKISGELHKGSNFSRPYLYNGKSTVHMRCELSQLKPADIAADDIIVDKAILALIRAKFDELGRNPKAFEDPKNLPCFTTANGRTIPIRKVRIRQVKDPKIAAYGDRERFVDSGGIHHVALFVARNEARQEQWLSEVAQVTDVYQRCPRWDKRSGRPKSTASEPAVSRKLKDNPEAEFLFSLMKDDTVELDYNGAREVFRVKKFYAAGPIWFTGVNNAQMDADQKKNKTTWSKNPNGLKTLNPRKVVVDLLGRVHTAND

SEQ ID NO: 6818 - protein, 1076 aa, synthetic construct
  REGION 1..1076: note = Synthetic
MSSAMESPQKYVLGLDLGSASLGWALIALDDADDPTSLIRAGVRIFEPGVDGTSMEIEQGKDQSKAVERRTARLHRRQLRRRAARQRDLFRLLQRHSLLPAPGVLSGSPEEQRHSILNELDQHLTHKWQSAFPDNRFAQLPLYYLRKRALDESLEAPEIGRILFHLIQRRGFLSNRKENKQNPEQKKELGQVKAEIHSLEQDILSAGARTLGEFFAGLDPHAQRVRRRWTARKMFQDEFEKIWEAQAIHRLELLTPELHDKIAHLLFFQRPIAAQTHLVGKCELESGKQRAPWAAMEAQRFRILQKVNDLKLINPGSLISDPLTEDERQRLYDLLDWEGDQTFKAIKKYLSFPAEAQFNLEKGDEKRLRGNRTQAVMRKVFGDRWDGFSAGKQHQIIENWRNSESDEALIREAVEQWLLDAAAASSLSEQIPEPGYCAVSLTAIAKLLPLMQCGKSFKEAETEVYGARFSGGVVFDTLPEVRKQLESLRNPAVERALTELRKVVNAIVREYGKPYEIRVELARELKKPRQERIDATKKNRNRQREREDIAVKILRECGLSNPSRKDIEKALLHEECGGYCPYTGRHIPFSTLFDNSEFDVEHIIPRSRYPDDSFQNKTLCYLPENRDIKKGQTPWEAYGKDEQRWAEIMTRVSSWKNRGKMVRFSIQTEDALGDFSARQLNDTRYVSVLSARFLGALYGGRDVMDGEKVRQVIFASSGSVTATLRSSWGLEAILHELVPTEPGESRGKPRTDHRHHAIDAITIALTRPKVIQSMARAASMEPWQKDARAWRKIELPWKNFVPSIRPRIEEMLVSHRPEHKMSGELHKGTNYSAPSNYKGKPTVHTRCSLSALSASDIADDEVIVDIAVRDAVRMKLVELGGNPKLFDRPENAPCLSARDGRLIPIRKVRIRETKNPLRVGHGARERFVAPGGIHHVALFVVRDERRREKWDSDVAQVTEVYRLCPKNDHRKGRPRSAVKEPPISRQLKADPEAQFLFSLMKDDTIKVTDANGTHILRVKKFSDNKQMWFVPVNDAHDDAQQKKLCITWSRTPNSLKELHPRKVVIDLLGKVHPAND

SEQ ID NO: 6819 - protein, 1085 aa, synthetic construct
  REGION 1..1085: note = Synthetic
MSYTGSPVQDYVLGIDLGSASLGWAAISLDQTGTATGLLRAGVRLFDPAVTGDIEKGQDESNAVARREARLIRRQLRRRAARQSELFEFLQRQGLLPAYEGPKADSSQQRHSILNALDLELAAKWSKPDSFATKAAIELPLYLLRKTALDAALEPFELGRIFYHLSQRRGYKSNRNEQAGKNEAAGKGKKDEDLGQVEGDIQMLEVAMSSFRTLGEYFSSLDPHTQKVRRRWTGRKMYEDEFALIWEKQSAFHPELLTKEVNQEIKRLLFYQRPIKAQSHLIGGCELEPGERRAAWATLEAQQFRVLQKVNDLEIILPGQVTGIALTPEQRKTVLYLLENSREATFDKIRRALKLEKNIGFNLQRGGEKRLKGNLTNTLMAETFAERWGEMSDADKIQVVEDWRTIPQDDSLIRRVMDHWKLDETGAKWLADKPAPSGYCMYSRKAIRNLLPLMKTGMRFKAAEKEVYGNRLTGGEVHERIPPVRDTLKTLRNPAVERALTELRKVVNALVSEYGKPTEVRIELARDLKKSRHERAKAISYNRDREKQRITAKETMLREVGPGFQHPSRADVEKALLWEECQGECPYTGKRFPFSSLFGENPPLQVEHIIPFSRIPDDSFQNKTLCYHEENQYKGNRTPYEAYSDPAQYEAILNRVRSWKKPNPGKQRRFELRTTEELEGFSERQLNDTRYASKLACELVGTLYGGRDIQTEDGSRQVVFASSGTVTATLRKGWGLEAILREAAPSANGQNRGKPRTDHRHHAIDAITIALSRPKLIAALSRDNAQDSHWPQNGRSAPKLQSPWKDFVDSIRPHFEQMLVSHRPEHRLTGALHDETNYGRPRKEGGKDVVHIRKQVVGLSTGDIENIVDPAVREVVRAKATSLGGDLKKWTPKEGDEDWPMLKTKTDKFVPIKRVRIKKSLGVETIGKGNRTRNVALSSNHHVAIFALLDERGKEKRWESVIISLFDAMERKEAIKQQRTSLPLILKSYPEAGDYIFKFSLMGGDTVLLHKDCDHKNDLCNPTVWRLRTIASNGQLALVRINDARLKADIQKAKEWWAPMQDALRGLDAAKVVIDSLGRIQPAGG

SEQ ID NO: 6820 - protein, 1071 aa, synthetic construct
  REGION 1..1071: note = Synthetic
MANTSSETSNYVLGIDLGSASLGWALIGLDHHGSPAKILKLGVRIFEAAVSGDFEKGQDESNAVARRGARLIRRQLRRRAARQAELFRLLQKNSLLPANTGVEADASTVRHSILNELDHQISIKWIHDKDTKSFVELPLYKLRKAGLYQQLEAFELGRVFYHLSQRRGFRSNRTADGEGKKGEDQGAVKTGISELAEAIRAAGAQTIGEYFASLDPHTQKVRRIWTGRSMYEEEFGKIWAIQSSFHPTLLTEELYREIKRLLFYQRPIKAQTSLIGECELEPGERRASWATLEAQRFRLLQKVNDLEIVYPGNVNGVALSQAQKQQVYKLLDSQGDQTFKSIREHLGLDKNIGFNLQRGGEKTIKGNNVQKRMIEAFGARWQVLTEEDKRLVVEEWRTIDSPESLQRRLISKWKLTPEAAQRLALSTPPSGYCMLSRKAIRRILPIMLDGKRFMAARQEIPEYIPKQETPLNRIPPVRDALRNLRNPAVERALTEVRKVVNALVGEYGKPSEVRIELARDLKKPRQERIKATDSNRKRQRERDAVKQRILRECGLDRPSRDDVEKALLWEECGGICPYTGRSISFASMYGEHPQFDVEHIIPFSRLPDNSFQNKTLCYHEENRNVKRNRTPFEAYPDAEDYDAVLTRVRAWKVPNIGKQKRFELRTLEELEGFSTRQLNDTRYSSLLACDLIAKLYGGRVVDTGSGTRQVVFASSGMVTATLRKGLGLEALLREAVGSSNGENRGKPRTDHRHHAIDALTIALTQQSMIQTMSRTASLEPNWASSSRSLRSIPSPWVNFIDSVRPHVQELLVSHRPEHRLTGALHDETNYGKPHNVNGKNLVHIRKPVSGLSKGDIDNIVDPAIREAVRRKAAEFAGDLKRCNPKEGIEDWPQLLTKTGKTVPIKRVRISKSLEVETIAKGNRTRYVATSSNHHVAIFAQLDDQGREKRWEPMIVSLYEAMDRKRKGLPVVRKSHPEAQDYIFKFSLMGGDTVLLHKDCDHDKDICTASVWRLRTIASNGQLSLVRINDARLKVDIQKAKEWWSPATDSLRKLGGAKVVIDSLGRLHGAND

SEQ ID NO: 6821 - protein, 1140 aa, synthetic construct
  REGION 1..1140: note = Synthetic
MLLISTTNKNAPSPGRSTVTGEPIPYDESLLRKSQAIAAHVHCYNSYLVKVLKSIGWNEMGETNTQTGSYILGIDLGSASLGWAAISLDGAGMATGLLRSGVRLFNPAVTGDIEKGQDESNAVARRTARLIRRQLRRRAARQSELFQLLQRYTLLPPYKGAEADASQQRHSILNALDQELTAKWVKPGNAGAQAAIELPLYLLRKTALDAALEPFELGRVFYHLSQRRGYRSNRKDQASDKGTPGKAKKADDLGAVQGGIKELEDAIRSSGTRTLGEYFTSLDPHSQKVRGRWTARRMYEEEFAAIWAKQVTFHPALLTEELHYKIKHLLFYQRPIKAQSHLIGDCELEPGERRAAWATLEAQQFRVLQKVNDLEIILPGNVTGIPLTPEQRQTVLNLLESSSEATFKKIRKALGLGENIGFNLQRGGETKLKGNLTNSHMADVFAERWLEMSEEDKKQVVEDWRTIEREESLIRRATEHWKLDETGAKWLASRPAPSGYCSISRKAIRKLLPLMMEGKRFKEAENEIWGSRFSGGQVYDRIPPVRQALKSLRNPAVERALTELRKVVNALIRELGKPTEVRIELARDLKKPRHERAKAVSQNRDREKQRSAAKVKMLQEIGPGFEHPSRADVEKALLWEECQGECPYTGKRFPLSSLFGENPPLQVEHIIPFSRIPDDSFQNKTLCYHEENQIKGNRTPFEAYKDAEQFETILNRVRNWRTPNPGKQRRFELRTLEELEGFSSRQLNDTRYASKLACELVGTLFGGRDIPTESGSRQVVFASSGMVTATLRKGWGLEAILREAAPSANGQNRGKPRTDHRHHAIDAITIALSAPRMIAALSRNNAQDPYWPRNGRTAPKLQSPWNGFVDSIRPHFEQMLVSHRPEHRLTGALHDETNYGRPHKEGGKDVVHIRKQVVGMSAGDIENIVDPAVRESVREKAASFGGDLKKWTPKEGSEDWPLLRTKTGKEIPIKRVRIKKSLGVETIAKGDRARHVALSSNHHVAIFALLDERGGERRWEPMIVSLFEAMERKRKGQPLIQTRYPVVGEFIFKFSLMGGDTVLLHKDCDHKNNHCNPSVWRLRTIGSNGQLSLVRINDARLKAEIQKAKEWWSPTQDALRKLDAVKVVIDSLGRIHQSGG

SEQ ID NO: 6822 - protein, 1062 aa, synthetic construct
  REGION 1..1062: note = Synthetic
MSAALEQQKYVLGLDLGSASLGWALIALNDADDPVSLIRAGVRIFEPGVDGTSIEIEQGKDQSKAVERRTARLHRRQLRRRAARQRDLFRVLQRHSLLPAPETLVGSPEEQRHSVLNELDQELAQKWQSTYQGKRFAELPLYYLRKMALDERLEAHEIGRILFHLIQRRGFLSNRRENKQNPDQKKELGQVKAEIHSLEQEIQNAGARTLGEFFAGLDPHAQKVRRRWTARKMFQDEFEKIWEAQKAHRPELLTQELHDKIAHLLFFQRPIAAQTHLIGKCELETGKQRAPWAAMEAQRFRILQKVNDLRLINPGSLISDPLTEEGRQRLYHLLDREGDQTFKAIRKYLSFSAEVQFNLEKGDEKRLRGNRTQAAMRKVFGERWDTIGEGKQHQIIENWRNSESDDVLIREAMEQWSLDAAAATLLSEQTPEPGYCAVSLAAISKLLPLMASGKSFKEAETELYGARFSGGTIFETLPEVRKQLESLRNPAVERSLTELRKVVNAIVREYGKPHEIRIELARELKKPRQERIEATKKNRNRQREREDVAVRILRECGLSNPSRRDIEKARLHEECGGYCPYTGRHIPFSTLFDNSEFDVEHIIPRSRYPDDSFQNKTLCYLPENRDVKKGQTPWEAYGKDEQRWAEIMTRVSSWKNRGKMARFAIQTEEALGDFSARQMNDTRYASVLASRFLGALYGGRDLVDAEKVRQVIFASSGAVTATLRSSWGLEAILREIVPTEPGESRGKPRTDHRHHAIDAITIALTRPKVIQSMALAASLEPWQRDSRAWRKIESPWRDFVLSIRPHIEQMLVSHRPEHKMSGELHKGTNYPPPHNYKGKPTVHTRCALSALSAADIADDEVIVDPAVRDAVRAKLEKLGGNPKLFDRPENVPCLESRDGRFIPIRKVRIREAKKPILVGTGVRERYVASGGIHHIGLFVVRDARRREVWESEVVQITDAYERHREHLPVVCRTHDAEEAAFLFSLMKDDTVELEKDGTRGIYRVKKFEATGKITFVPVNNAMLDKMQYTTGAAWSRMPATLKPMSPRKIVIDLLGKVHPAND

SEQ ID NO: 6823 - protein, 1069 aa, synthetic construct
  REGION 1..1069: note = Synthetic
MSEETVVCEYTLGLDLGSASIGWALIGLDSSYSPCKLLDAGVRIFEPGVEGNIEEGKDESKALARRTARLQRRQLRRRAARQRELFRLLQSVGLLPANNSAIDDFSQQRHEILNQLDRELLNGLKARQSASDYSQSEQLLPYVLRKEALERKLEAHELGRVLYHLCQRRGFKSNRREGGGKEKEEELGKVKQDISTLRQEMGGKTLGAYFAGLDPHLRKVRQRWTARDMFETEFEAIWERQSRDWPELLSSPLKAKVARLLYFQRPIAKQEHLIGHCELEKKERRAPWASLDAQRFRLLQKVNDLKIIPAGSFDEVGLAGEQRQLLLEHLEVHGGVTFSDLKKLLSLPPRTHFNLERGGEKSMPGNRTNAHMLAVFGEQWRELAAESKNEIVEMWRWVESEEKLARYGQERWALDEYTAKLFAGKRAEDKYCNLSLAAIRKLRPLMEEGVAFMKARLELYPEQRDKPRDLLPLVREAVPELRNPAVERALTEVRKVVNAILRKYGKPYSIRIEMARELRKPRKEREAAAKRMRQNEKERIAMKARILKDAGLPNPSRDDIERARLWEECGGICPYTGRTIGFSSLFGGESQFDIEHIIPLSICVDDSFANKTLCYHEENRHVKRNQTPWKAYKDTANWDEIILRLKNWKPGNPAKLRRFELKSTEELEGFATRQMNDTRYTTQLAIDLLKTLYGGREVIEADGSKRQAIFATSGGVTAKLRRAWGLEAILREAVPSANGENRGKPRTDHRHHAVDAIAIALSNSKTVQMMNCQAALALPWEFAERVWSRMPAPWPQSGDHLQFVDSIRPRILSMRASHRPEHKMSGALHNDTLYGRPYVRDGKSLVHLRRSVKGIKPDQIENIVDLAVRAAVERRLIEHGGDVGKFNPEIPESLPYLESKRGRIPVKKVRVKETKKGLIELRNNRFVESGDIHHFELFVHRDQNRRESWTHVSVSLMEASQRNAANRRNGHVEAVVSQELKDDPEAEFLFSLMKGDIVEMDHEGARELFRVKKFYAAGPIWFSHVNNAQKDADQKRDKTHWSKVPNGLMQLKARKVTIDLLGKVHPVHD

SEQ ID NO: 6824 - protein, 755 aa, synthetic construct
  REGION 665..666: note = misc_feature - Xaa can be any naturally occurring amino acid
  REGION 1..755: note = Synthetic
MSAALEQQKYVLGLDLGSASLGWALIALNDADDPVSLIRAGVRIFEPGVDGTSIEIEQGKDQSKAVERRTARLHRRQLRRRAARQRDLFRVLQRHSLLPAPETLVGSPEEQRHSVLNELDQELAQKWQSTYQGKRFAELPLYYLRKMALDERLEAHEIGRILFHLIQRRGFLSNRRENKQNPDQKKELGQVKAEIHSLEQEIQNAGARTLGEFFAGLDPHAQKVRRRWTARKMFQDEFEKIWEAQKAHRPELLTQELHDKIAHLLFFQRPIAAQTHLIGKCELETGKQRAPWAAMEAQRFRILQKVNDLRLINPGSLISDPLTEEGRQRLYHLLDREGDQTFKAIRKYLSFSAEVQFNLEKGDEKRLRGNRTQAAMRKVFGERWDTIGEGKQHQIIENWRNSESDDVLIREAMEQWSLDAAAATLLSEQTPEPGYCAVSLAAISKLLPLMASGKSFKEAETELYGARFSGGTIFETLPEVRKQLESLRNPAVERSLTELRKVVNAIVREYGKPHEIRIELARELKKPRQERIEATKKNRNRQREREDVAVRILRECGLSNPSRRDIEKARLHEECGGYCPYTGRHIPFSTLFDNSEFDVEHIIPRSRYPDDSFQNKTLCYLPENRDVKKGQTPWEAYGKDEQRWAEIMTRVSSWKNRGKMARFAXXGSSWRFQRATNERYPLRERSGVTLSRSPLRWSRSCRCRESASSNLRIQWRGYRDTTQFVGIGGDLARNCADGTRRVPRKAAYRSSSSRD

SEQ ID NO: 6825 - protein, 1075 aa, synthetic construct
  SITE 1023: note = misc_feature - Xaa can be any naturally occurring amino acid
  REGION 1..1075: note = Synthetic
MNESGSLAQDYVLGIDLGSVSLGWAVIGLDKTDMPVVLLRAGVRLFDPAVTGDIEKGQDESNAVARRVARLLRRQLRRRAARQSELFRLLQGHALLPPYEGNEADASQQRHAILNALDLEIAAKWAKSGGAGAQAAIDLPLYMLRKTALDEALEPYELGRVFYHLSQRRGYRSNRKEQAEKKEAAIKGKKDDDLGTVESGIKELGEAMRSFRTLGEYYASLDPHTHNVRRRWTSRKMYEDEFAAIWEKQAALHPTLLTEELHRQIKHLLFYQRPIKAQSHLIGGCELEPGEPRAAWAALEAQQFRVLQQVNELEVISPGRVTGIPLTAEQRQTVLDLLENSSEITFKKISKALGLADYIGFNLQRGGDTKLKGNLTNTHMAEVFAERWTEMSEEEKKQVVEDWRTIDQEDSLIRRAIEYWNLDESSAKWLASRPAPNGYCMYSRKSIRKLLPLMATGARFRAAEKEVYGIRLTGGLVYDSIPPVRDTLKTLRNPAVERALTELRKVVNALVREYGKPTEVRIELANDLKKPRHERAEAFKYKRKWEKQRIDTKEKMLRELGPGFEYPSRADVEKALLWEECQGECPYTGKRFPFSSLYGENPPLQVEHIIPFSRIPDDSFQNKILCYHEDNQHKANRTPFEAYTDPAQYETILSRVRNWRTPNPGKQCRFELRTLEELEGFSERQLNDTRYACKLACELVGTLYGGRDEKTDTDSRQVVFASSGMVTATLRKSWGLEAIMRETAPSANGQNHGKPRTDHRHHAIDAITIALSRPKMIATLSRNNAQDSYRPSNGHTAPRIQSPWEDFVDSIRPHFEKMLVSHRPDHRLTGALHDETNYGRPHKEEGKDVVHIRKPVEGLSARDINNIVDPAVREAVRAKAAQLGGDLKKWTPKEGRGDWPQLGTKNGKQIPVKRVRIKKALSVETIGKDERTRHVALSSNHHVAIFAMLDKRGIEKRWKSIIVSLFEAMDRKRKGQPIVQTSYPEAGDYVFKFSLMGGDTVLLHKDCDHNQNPCNPSVWRLRXGQLSLVRINDARPKSEIIKAKEWWSPIEDTLRELDAVKVVIDSLGRIHQAGG

SEQ ID NO: 6826 - protein, 1085 aa, synthetic construct
  REGION 1..1085: note = Synthetic
MEEYRKYVLGLDLGSASLGWALITLDKSDNPTSLVHAGVRIFEPGVDGTAIDIQEGKDQSKAVERRTARLHRRQLRRRAYRQSKLFQLLQQHCLLPRSESQIPLAPSAERDAVLTVLDRRLCQKWQASSVGKAFEELPLYQLRKIALDDKLEPYELGRVLYHFSQRRGFKSNRKEGRKESEKELGAVKASIAELTVKMQEADVRTLGEYFAGLDPWEQRIRGRWTSRKMYEDEFAKIWKKQASYYPGELTENLRREVSYWLFYQRPIAAQSHLIGKCELEGPNHRRAAWATLEAQRFRILQKVNDLKIIFPGNPDAVTLSAEQRRLVYDLLDHEGDQTFANLRKQLKLDKKIQFNLERGDEKRLRGNRTNKTMRSVFGERWNTLSGEEQKQIVEDWRTSESHESLVRRGMEYWGLDEAAAQAWAEAKPEDGHCALSRKAINKLYELMLDGMSFKEAETKVYGDRFSGGVALDKLPSLHVHRNIKGSTKAEKLLADLRLGAVRNPAVERALTELRKVINAAVSEYGKPYEIRVELARELKKPRKERETATKQNRTRQKEREKAKADLLMECGIQNPSRSDIEKVLLFEECGGKCPYTGKSFTLRDLFQNAQFDVEHIVPLSRYPDDSFQNKTLCWHEENRNIKRNKTPFEAYGKDTERWEEMLTRIRAWRPGNPGKLKRFMLRSEDELEEFTARQMNDTRYASVLACRLLESLYGGRDEATATGTRRQVIYASSGAITATLRRAWGLEAILREAAASSNGESKGKPRTDHRHHAIDAIAIALSRPNFIQAMARSASLDPRFELDSRSFRRTPAPWPNFVDTIRPHIEQMIVSHRPEHKMSGALHEETNYGRPYSHDGKTTVNVRKPVTSLSTGDIEKIVDPAVQFAVQQKAAELNGDLTQCETSQNWPVLFASDGRHISIKRVRIRKVMKPTPIASGNRERFVALSNSHHTAIFALMQDEREVEWEGVPVSLYEAMERKRKKLAVIDKKHPDGDQWRFKFSLMGGDTIELHRACHHSDGMCCPDIYRIRTIAGNGQLSMVKITDARLIKDIKGAGEWWSPRADALRKLDCRKVVVDTLGRVHIAND

SEQ ID NO: 6827 - protein, 1085 aa, synthetic construct
  REGION 1..1085: note = Synthetic
MFSAAEESPKYVLGLDLGSASLGWALVALNETNNPTSVICTGVRIFEPGVDGTALEIQEGKDKSKAVERRTARLQRRQLRRRAYRQGKLFQLLQQHGLLPHAESSKPLTPSEDRDAVLTAFDQQIYQKWRTSSPAFDFAQLPLYQLRKIALDHKLEPYELGRTIYHFSQRRGFKSNRKEGRKESDKELGAVKTGIAELEKKMKTVDARTLGEYFAGLDPHQVGQNVRRRWTARKMYEDEFSEIWKNQANYYPELLNQNLRREISHWLFYQRPIAAQSHLIGKCELEGNNHRRAAWATLEAQRFRILQKVNDLKIIYPGNPDAQPLTPEERKLVFDVLDSEGDQTFAKLRTQLKLDKKSEFNLERGDEKRLRGNRTNKTMISVFGEQWNAFSDEEQKQVVEDWRTSESEDSLVRRGIEHWGLDEIAAQKWADSKPEDGHCALSRRAISRLLPLMFDGMSFKESETKIYGNRFSGGVALDKLPPLHVHRKINNSEEVENLLTKLRLGSIRNPAVERGLTELRKVVNSIVREYGKPYEIRVELARELKKPRKERESATKQNRTRQKEREKTKANLLRECGIQNPSRADIEKALLYEECGGICPYTGRSIFLSNLFGEHPQFDVEHIIPLSRYPDDSFQNKTLCWHEENRNIKRNKTPFEAYSKDTARWEEMQVRIKAWKQGNPGKLKRFMLRSEDELEEFTTRQMNDTRYASVLACRLLESLYGGRDEATPIGTRQAIYASSGAVTATLRRMWGLEAILREAIPSNNGQSKGKPRTDHRHHAIDAIAIALTRQRAIQAMARSASLDRRLEQDSRAFRSIPSPWPNFIESIRPHIEHLIVSHRPEHKMSGALHDETNYGRPYKHNGKSTVNVRKPVTGLSASDIEKIVDSAVQSAVRQKAAELNGDLTQCESAQNWPSLPSSDGKVIPIKRVRIRKVMTPTPIASGPRERQVALANNHHAAIFAKLDGHGKEVRWDSIPVSLYEAMERKRKKMTVIQRAYPEFSEYQFKFSLMNGDIVEILEEGVPLLYRLRSIESNGAFFLLSIRDARMVKEIVTTGDRWRPSADALRKLSCRKVNIDTLGRVHPAND

SEQ ID NO: 6828 - protein, 1025 aa, synthetic construct
  REGION 1..1025: note = Synthetic
MGLDLGTNSIGWALLSLDGDGKPAGYLDGGVRIFPRAVEDKTPTPKNAKRRGKRLARRLIERRARRRQRLENFLIKKDLLPEAVRDSAQREKVLNTLGDPYQLRAKALDDDLAKHELGRILLHLAQRRGFQSNRKTLLKELIDDPDAADLIEELDQDEKGDLDAEESAFKHSIAQLAQAIHRANKRTLGEYLASLDGDTCRRNRKHVPEDLRTSRQMYREEFALIRERQAAPFAEVLSDADWDQIEHIIFYQRPLRFRADRLGKCEFEPKYNRAHRARLEFQRFRYLQDINNLQYFEGHVGGYLRLSDEQRSKLINALEHAPELSWAKARKAVGLDRTQKFNLENSEVKKLSGNRTACAIRRVIGEAWDHMPPGQQSLLVDDLITIKNKKTLKNRLVNHWQFPTTDAVRLAVLELEADHGSLSLKAMRRILPHLEAGKIYTDALQAAGYRMRAQKVAQDDIVDYLATPPETRNPVVNKALHELRKLVNAIIRRHGKPAAIRLEMARELKMNRRQLAAYNKQQAANTKANDEAREHFQAIHAGQRAKRDDQIKYRLWKDQDGCCAYSGRPISKTELFSDAVEMDHILPYSQSLDDSYINKVICLAGENRSKGNRTPWQAFSGDAQRWEQIVQRSKSWADKGRALKAKADRMLRQGDLEGLDDFINSQLTDTRYISRVALGYLKPLGTDVSVVKGQITAWLRHIWGLHQILGSADEKNRTDHRHHLIDAAVVALTDRRLYHGMAKLAQRADVHGPDDIHIDPPWASFAQDTDALVKKTIVSHVPAWRLRGALHEDTASGVLVEKDGKVHTVYRKLLDGSIKKKDIDAIIDPTVQQAVRAHLDKHQGDSKAAFTPDNPVLHPNGSRIRRVRVKRASFRNLDALAEEQLPVRDKNERPFRYMVYGNTHHVEVFRDIQSPRIKTRFVTMLEAAQRARQVNGVKQPILDTHLDDKHAYVTALAINDMVKLKDGRVYRIQKLEKDSGRATLRLHSDATTESGDRVVRKSISALLNEMGLEKLAINRMGHIMP

SEQ ID NO: 6829 - protein, 1057 aa, synthetic construct
  REGION 1..1057: note = Synthetic
MEGKMCVGLDLGINNVGWCALRRSDNGVEILGMGTFVFDSPLEDENKPSEGLASRRRGMFRRARRTARRRHQRKMRLYGTLAEYGFLPPKLRDRVTLFCRNLDPDSNRRIDPYTLRSQALVRALTPYELGRVLCHLNQRRGFISPRDLMAQGAFKTREELDAQADEEMRGMKEEIKRTREAMAGFPTIGAFLAARQARREPVRKKKLRGASVSQQKAIDEQRYVRADRHMIQQEFEAIIAAQKHHHPILTDSLVDKIRRQIFDQRILATDHRVRGRCIFFPDEWRIPRASMTAQKFVIAQEVAHLEISDDLHQPYRKLRPEERKVLVDRLLLGQDLTWTEAKSLLGHGVLARFSLEPEPGKKRGKAAGTKDALRGSVTAKKMYEILGPKWDALGDAARRELVGEIVSIRDWLRDMKDGAPPAAIRRRILFLRKAYGPAQVRFTEQEANDLATVDLPDGYLNVSLRAIKKILPGLLEDCVYSEACARANLNHTSPDTPAVSGPILRYPTEQEIGHALVRTSVRSAIRVLRSIVGEWGLPDSICIELPRDLAVGAQQREEISKRQDENEKERMSIAKELLANGYPASPTNIKKVRLWRELGGLGLPYEPDRVVSDLRDLIEGDYEIDHIVPRSHSFDNGMANLTLCTREFNTQVKGNRTPYEALATRDPEAWNRIVAHVRGLKAMPVNKRNRILAKERPEDFTGRHLAATGYISRQVLAIAQRITRRPEDVVVTPGRATSDLRRFWELGHLVPLHPEEEAAIREEREREEQVEKGLLKPEDLPAKRSSGKQRSNYKHHALDALVVALTDRASLQALTRYYQLEETGSPLLAEKAGRKLERAKTLPDPDLQRKATEALERASVVRRPRRRPQGELHKQMPEAGVPVGMAPGRPWSSAVRGKHLVKFDGDGRPAQAYPLGNNHHVVIWESLTPNKKGETERWAEVVPMIEAVRRRNRGEPVIRKHSPDSNARFVMALCKGDTVEMEDGTLAYVASFSPKEQEGGIDLFLWHLFVARLPKNKAVGEPYLVRRMQSTALLKFLAARVVLNPVGEVVYREGGPG

SEQ ID NO: 6830 - protein, 948 aa, synthetic construct
  REGION 1..948: note = Synthetic
MDGRLVYGLDLGINNVGWCALRKQEESVDILAVGTFVFDSPLADEAKPGEGLKSRQRGQFRRARRTTRRRHQRKMTLYRLLAEHGFLPPLMKDRVEHFCKDPDPYALRAAALERKLEPYELGRVLCHLNQRRGFLSPRDLMLWGTAKFEDEEDSAEGATPKDKDEERGQIKKELKRTREEMAGFETVGAYLNARLRNGAPVRKRKVAGATLAQQKAEDERRFRRADRHMIEHEFWTIMGRQAKYHPLLTIDLQAQIHDLLFFQRILAADASTRGNCTFYKNELRMPRAGLTAQKFAIAQDVAHLEVIPGPLQDSRKLKTEERLTLVGKLMTGDDLTWDQVRTELKLPAAIFNIEPAKYKIIGKDGKEKTVTQKSGTKKELRGSQTVARLRRILGDKWDLLGEQAQRELVGEIVSIRDWTRDVKSRTKPAAYRRLDLFKRKAYGPSKVTFTEREANELATVELPEGYLSVSLKAAKKILPYMLKDKVFSEACEAAGFDHANPEGELPTVDRLNFPTEKDITHAVVRASVRGAVRILNALHREYGKPDAIHIELPRDLAMGAEQREEVEKRQRENETERKRIAKDLVEIGVKPSGANIKKVRLWEELGGSALPYEPDVIIHDLRSLVSDDYEVDHIVPRSHALDSGMANLTLCTREFNTQVKGNQTLWEAVGQREPERWRRIEAHVKSIKNMPLHKRQRILAKERPEDFTGRHLAATGYISREVLKLAQRMVENKTDVVVAPGRATSEFRKFWEIEDMVPLHPEEQAIEDAWKAFLAKADAGQATEEDVKNAKPPGKTRSNFKHHALDAIVVALADRKSLKAMTDFFQLVELRDPRLRDKEHRKLERAKTMPDPNLRNKVAAALERAEIVHRPQRMPKGQLHKQQPDENVVRGMRNGEPWGTEVVGKHLVKYDQEGRRPRRTRSGATTTSSSGKQRSRTRKGSTSERRKS

SEQ ID NO: 6831 - protein, 1128 aa, synthetic construct
  REGION 1..1128: note = Synthetic
MSSLQFSFDIGYASIGWSVIKSLTNQDNPEIIAAGTVLFPKDDCLASHRRDYRRLRRNTRSTRQRMERINKLLISVGILPNDIDLEQGHMAPFFLATQVLKKGKILTAEELWQVLKWYGHNRGYDGNSQWSRQDEDNEDAERVKAAKNLMQQYGTDTMAETVCRILQLDISKDQPNFTDQTPAYKTLNIAFPRNVVVEEATQIIKSHINQIPGLSEEIANLLIQSGDLSSEQREFLKTKGIAYLPKRYRGNLLFGQLIPRFDNRIIKRCPLTWAQIYQTAISEGKTEKVAKAQAEKLSKVAQANTKSFYEYRFARLLANIRVKGLPLNATLRRKIFELAKQLGKLTAKDIIETIEKDHEKGVDTNIINMFTLHPDSEEALVLCPATACAKSNQLFKEVYPQLPHFIQKMILKTLNKGSVTTLAKIKQLLEHYSEDTNWLENLVLQKAKSELNKSKKSKKESTPNTLEGITQTLWNKTIKAPTASGRAPYSQTILRQVLDEVLEGYDPNSPAHSEQHPQGETKEKDGVLYPLLDPNSSVRQLQNERDLSDLTNNHLIRHRLLIMERLIKDMVKEFAQDDPNKVTHTIIEVTREVSKFSGMTAEEIATELNARNRDFKKASDYLQKNYTGEITGGLIRKCRIAMDMNWTCPFTGKKYDAIHLPQMEKEHIVPFSKRNTHSLSALVLTYPEVNKMKGARTALEFIKESQNTSVPGKPELSIMTEKLYKDLVNKLDIKGHKDDEKRKKARKRLLLIDKIANKKKSATVEDNEDQDLGFTEGALTQSSHLIKLAIKSLQTLLPSSQYLTIPGAVTSEIKKAWKLTGCLAQACPEILDANTGKPKLKDDIRGITDLHHALDALTIGLTQHYLSAGNNGTAWKAILKRSMKNSIIDPDDHMKKVIYKVRSGNNQLQLLDLPSQVKNTIAKALNEKRIVQHIPSDQSGAKLDETIRRVISTESKNGKVMISLAQKKSRVENGKRIKTLKTDEKKPSMLIGINPTGKSKLKKIKGAIVINENYGIALDPTPTMIPHFQVHQKLMDLKEKNGGKPVRILRKGMQINIKNPKKPEKDGIWVIRSIKDSSRDGLLINLQRKELNMNIENKNIKNWRDVRVSTLLNHFFEILNQPYTGTPS

SEQ ID NO: 6832 - protein, 1181 aa, synthetic construct
  REGION 1..1181: note = Synthetic
MKYRLSLDIGVGSIGSTILSLDEKNRANSIIDCGVCIFEVSEGAENRRLKRSQRKNTYRTKKRIDLLSKELAQAGLWSLDDDIQFELIKLSPYAIRAQGVNGKLNNIMEIGRAILHMAKHRGAGFVEMNKLELEIEKNNEKIEEDSDKKKKKELSEYAKLKKHLEESGAKTIGEYFFMRMHKAYKNNNITDENRRYVRQRKMGDKVKVDYAIPRYLVKEEFNLLWETQSKYYKQLKNNGLKDKIYDILFYENDSRPYATGNCIFIENEKRLTKAHPLSEKRRIYETVNNIRVQEHKIQRKLRKDERDNIINELLMKGQKAGKKSISELLMLDKTFKVVLDDMIKPYLYSMPEYKAIDFLNKLDDEKLAGIVEFMAEPKREDKKDYLYNDEKVIEILKNKFSTDDERQISQLIAMLPKGRGSLGKTATTKILELLKNDVISIREATDKLAATDKQFISEEEIARAMQGEHDTLPYYGEILKTDTQPMADWQKQINKSLNPLEAKYGKIANPAVHRILNQLRRVVNDIIRIYGRPYDINIELAREVGMSSKKKKEYETQKKKNKEKNDKAVEYLTHKDIRLRVTSTNILKWRLAEEQNWKDAFSPQDRIHPRFEGFEIEHLIPESLGGTDAPINRVLIKRSDNLNKGNMYPYEYLQNKHGDKVYGILKEIRANKNMPAGKKWRFESDAKEIFERGEDADNITRYLTDTRYVCKLAARYLKVIVDYKQGDENNTRVLTINGGHTAKLRSIWNLDGIEYDLMGLKEEVPEYLPDKTHFVNLDTGEVLYQEELDVDGNWKKCNDIKSKHWKKKPRIDHRHHIIDAITIGCVSRSDMQKINWFDKRDYELPLMQLPIPLSNGDNDGKARQLEIFRNTIIEKLKNTKAYHKPEHSKNGQLHKETARVAFMDNPEHSEEKITKHNRPVSAILKTRENLKNLLINTNTIKPEWDKDIVQDVQKMIKLKEAIESHFEVAQSQLEQENQQLVQNGNKAKKISEKIVLQRAFKIVRKNKEYKYDTFPEYENKKSFVDVPKHNVVYDSGNNYCMDFYVTEKGDVGREIITQFDINKRAFVPEWKKKGLKPLWSVQQGDMIELDTPPEWKKYTDNNRCFAVIKKFDKGFTYIKYQTDARGENRKEEENISIKQNFIGGGLTFYAASKACKIELTPFGKIARKHKKLWNGKKKTTK

SEQ ID NO: 6833 - protein, 1148 aa, synthetic construct
  REGION 1..1148: note = Synthetic
MGSYLHFIGGKNMGYRIGLDIGITSVGWSVIEDDSNGNPIRIIDLGSRIFDAAEKPKDGSPLAKERRDARGLRRRLRRKKHRIERTKRLLERYDIITKKEIDEMYANQAHVKHLYNVYELRVLGIEQRLTNKELARVLISLVKKRGYKSNSKAEESNGEAGKLLTATRENEILMQSKGYRTVAEMYLKDDKFKAKNKKGEILVDKDGTPLLKIKNSTGDYKNTTLRKLLIEEIKLILNKQKELNSKITDDFITEYLKIFESQRNFDDGPGFPSPYGGNLIENMLGNCTFEKEEKRAPKATYTFEYFKFLQTLNHIKIETINIKDDGTINKEKRELRSEEKEKLKELVFSKVTVTYSDVRKTLQLEPNQRFNMFTYRDLLNYTEETNKEIEKEKKLKEFESYKKIKTALNHIEKNYITKLTTDELDEIGYAVTVYKNDDKRKEYLENHTTNLSKEAIEELLNLSFSKVGNLSLKAMKKIIPELEKGVTYDKAVDKVYEDFRGTVNTQKKRKLRLKDFEQEISNPVVRRGLSQAIKVLNAITLRYNEKFGKPDVVVVELARELGKNFADRRTIEKRQSDNMQTNEKAKESIIALGKNNPTGKDIVKFKLWQDQDCKCIYSGKTIPVEELFTDLVDVDHIIPYSQCFDDSYNNKVLVLASENRQKGNRVPYKYLKESGKNVEEYEIRVNTLIRNNKKKQNLLRQDFTREDAEDWKERNLNDTKYICKYMYNLIRNHLEFSDNPNFVRKVWTVNGKLTAHIRKRLGIEKVRDGDTHHAVDATVIAITTQNMINRLTRYYQYVDGRYMNNKGEYIDIYTGEIINAKEYEEKNGIYFPEPWPKFRKELDIRTNCKTRERMIECLEAEKIYTYEDYDDVEPIFVSRMPRRKVTGTAHLDTIRGIKEKDGELKTITKTELTKLKLKDGEIEGYPDNCKRDDRLLYEALKNRLVEFNGDAAKAFSEPFYKPKSDGTRGPIVNKVKIEANTTMGVTLNDGKAFAANGDCVRLDIFYVENEGYYFIPIYVSDTVKKELPNKACVAGKKYADWKEMKEKDFIFSIYPKDLLYIQGKNKIKLNPVVKDKDPIEVEEILAYYLKIDISTATIEIKSNENKYVKRGLGGKGLKKLEKYEVDILGNYHKVKLPEKRLPFNINKK

SEQ ID NO: 6834 - protein, 1128 aa, synthetic construct
  REGION 1..1128: note = Synthetic
MNYRIGLDLGIASVGWAILEDDNKGNPKRIVKLGSRIFDAAENPKDGSSLALNRREARNTRRRLRRRNHRIKRTKNLLEKYNIITIKEIENMYATYKFQFNPYELRVKGLDEKLTNSELARVLISFVKRRGYKSNSKAEETSNKEMGKLLVATKENEILMKEKNYRTIGEMYLKDEKFKIQMPDGRVLFKVRNTTDEYKNTPLRKLLLDEIKQILEKQKELNSNITDSFIDEYINIFTSQRNFDDGPSQPSIYAGNQIEKMLGKCTFEKEENRSAKATYTFEYFKLLQDINHIKIEEYHLKENGTREVIKRTLTEEERNIIINLAKTKVTLTYDSLRTALKLTTNERFNMINYKRTDIFNDEENKKVEKDRRIKEFESYHKIRVAMDRIEKNYINKLNSDDLDTIGTVLTLYKNDNKRIEKLKEINLPEDIVNELLKLSFSKVGNLSIKAMKKIIPYLEQGYTYDKAVNEVYEDFRGIINTKKKKKIALRDLEQELSNPVVKRAVSQAIKVLNAITTTYGKPDIINIELARELSKKFADRQNIKKKQEQNMQNNDKAREEILKLGKNNPTGQDIVKYKLWQEQDGICVYSGKHISIEDLFTEAVDVDHIIPYSMCFDDTYKNKVLVLASENRQKGNRIPYQYLKEKGRNLEEYEVRVNNIIKNYYKKKRLLRQNFTREDATEWKDRNIQDTQYISRLMYNLIKNHVQFSDNENFDRKVFTVNGQITSHVRKRLGINKIRENGDEHHAVDAAVIAIISQGMIQKITKYYQYIDGRYEKNSGEYIDLETGEILTKEQYEKENGINFPEPWPKFRTELDIRTTCQTKERMEECLVAEKIYYENYDDVKPVFISRMPRRKVTGQAHLDTIRGIRKNEEGIKTLTKTELTKLKLDKNGEIEKYPDSQKQDDKLLYKALVDQLRKFGGNGEEAFKRPFYKPKSDGTPGPLVKKVKLEDKTTLAVELNNGKAIAANGDMIRIDVFKVDGEGYYFVPIYVSDTIKSKLPNKACVAAKQYSEWKDMKDENFIFSLYPRDLIYIKSKNKIKLTSINKENKETKETSEMFAYYIKSGISTAAISIINHNGEYEQNSLGIKTLKEFKKFEVDVLGNYHEVKLPEKRQSFKNLKKKGGSLK

SEQ ID NO: 6835 - protein, 1141 aa, synthetic construct
  REGION 1..1141: note = Synthetic
MEVLTMGYRVGLDIGITSVGWSVIEDDTKGNPIRIIDLGSRIFDAAEKPKDGSPLAKERRDARGLRRRLRRKKHRVERTKRLLERYDIISKKEIEEMYENSAHAKYLFNVYELRVLGLDKKLTSKELARVLISLVKKRGYKSNSKAEETDGETGKLLTATRENEQLMKEKGYRSIAEMYLKDDKFKVKDKDGDILLDKNGEPLIKIKNSTGDYKNTTLRKLLVEEIKMILNKQKELNEKITDEFINEYLNIFEGQRNFDDGPGFPSQYGGNLIENMLGKCTFEKEEKRATKAAYTFEYFKFLQTLNHIKIEKNILKEDGSRIKEKISLTQEEREKIKELVFSKVTVTYSDIRKILKLSEYERFNMFTYKDMINYNDETNKEIEKDKKIKEFESYKKIKTALNRIEKEYISKLNTEELDEIGYALTIYKNDDKRREYLKENTTNLSEEAIEELLKLSFSKVGNLSIKAMKKIIPELEKGLTYDKAVDNVYEDFRGKINTEKKRKLRLKDFEEEISNPVVRRGLSQAIKVLNAITLRYNTKYGKPDVVIVELARELGKNFGDRRDIEKRQNNNMQLNERVKSEIIGLGKNNPTGQDIVKYKLWQEQDCKCIYSGKTIPVEELFTDLVDVDHIIPYSQCFDDSYNNKVLVLASENRQKGNRVPYKYIKESNRNIEEYEIRVNTLIKNNKKKQNLIKQDFTREDANEWKERNLNDTKYICKYMYNLIRNHLEFSDNPNFVRKVWTVNGAITSHIRKRLGIEKVRDGDTHHAVDATVIAVTTQNMINKLTKYYQYTDGRYMNNKGEYIDLYTGEILNAKEYEQQNGIYFPEPWNKFRKELDIRTNCKTRERMIECLEAEKIYTYKDYDDVEPIFVSRMPRRKVTGTAHLETIRGIKEQDGELKTITKTELTKLKLKNGEIEGYPENCKRDDRLLYEALKNKLIEFNGDAEKAFSEQFYKPKADGSKGPIVNKVKIEAVTTLGVKLNNDKSFAANGACVRLDVFYVKNEGYYFIPIYVSDTVKEKLPNKACVAGKPYSDWKEMDDQYFIFSLYPKDLICIQGKNKIKLNPVIQDKDAIEVEEIFAYYIKAGISGANIAIQTNDNKYEQLSLGIKGLKKLEKYEVDILGNYHKVKFPEKRLPFNINKK

SEQ ID NO: 6836 - protein, 1138 aa, synthetic construct
  REGION 1..1138: note = Synthetic
MNSYLHIWEVIMNYRIGLDLGIASVGWAVLEDDYTGKPKRIVKLGARIFDSAENPKDGSSLALNRREARETRRRLRRRNHRIKRTKNLLEKYNIMTTKEIENMYATYKFQFNPYELRVKGLDEKLTNSELSRILISFVKRRGYKSNSKSEETNDKEMGKLLTATKENELLMKEKGYRTVGEMYLKDEKFKMQMPDGRVLLKVRNTTDDYKNTPLRKLLLDETKQILNKQKELNVNITSDFIDEYINIFTSQRNFDDGPGQPSIYAGNQIEKMLGKCTFEKEENRAAKATYTFEYFKLLQDINHIKIEKHIINETGKKEVLKRPLTEDERNIIINLAKAKVTLTYASLRTALNLEGNERFNMIHYKATNVFSDEINKKAEKERKFKEFESYHKMRVAMDKAEKNYILKLSTDELDVIGTVLTLYKNDNKRIEKLAQLNLPENIINEILKLSFSKVGNLSIKAMKKIIPYLEKGYTYDKAVNEVYEDFRGVVNTEKKKKIALRDLEQELSNPVVKRSVSQAIKVLNAITRTYGEPDVINVELARELSKNFADRQNIKKNQENNMQSNEKAKEDILKLGKSNPTGQDIVKYKLWKEQDGICVYSGKRISIEDLFTEAVDVDHIIPYSMCFDDTYKNKVLVLSSENRQKGNRIPYQYMQEKGRDLDEYEIRVNNIIKNYSKKQRLLKQKFTREDANEWKDRNICDTQYISRLMYNLIKNHVQFSNNENFERKVFTVNGQITSHIRKRLGINKIRENGDEHHAIDAAIIATVSQGMIQRITKYYQYIDGRYEKNSGEYIDIETGEIITKEQYEAENGSNFPEPWPKFRKELDIRTTCKTKARMEECLLTEKIFYDDYDDVKPIFISRMPRRKITGQAHLDTIRGLRKSDEGLKTLTKTELTKLKLDKNGEIERYPESQKQDDKLLYNALVEQLRKFGGNGTEAFKKPFYKPKSDGTPGPLVKKVKLEDKTTLAVELNNGKAIAANGDMIRIDVFKVEGEGYYFVPIYVSDTIKNKLPNKASVASKTYAEWKEMQDKDFIFSLYPRDLFYVKSKNKIKLTSINKQDKESLDTNELFAYYVNADISTAAIACINHNGEYERRGLGIKRLQEFKKYEVDVLGNYHEVKLPEKRQDFSNLKKGGSLK

SEQ ID NO: 6837 - protein, 1091 aa, synthetic construct
  REGION 1..1091: note = Synthetic
LKYAVGLDVGIASVGSAVVLLDENDNPFKIEMLGSRIFSAAERGKDGASLAGLRRKHRGSARRTRRRSRRKDRIRGYIVKSGLLSQNELAHLYDGRLSDIYQLRVDALDRLLTRQEMARVLMHISQRRGFKSNALDASDKSGKDMKKAIQANEKKMLEGGYRTVGEMLLKDERFAGSKRNKEANYLNTVTRKMIESEVRLIFARQQEFGNEFATPEFLDTYLDILLAQRSFFEGPGEGSPYCKGDSIIADKIGKCQFETDEQRAPRASYSFERSRLLQSLNNLSLVTEDAEYVPLTEEQRQKIIDMAHADDRVHYTDIRKKLKIPDELTFNLVRYRGDKTLEECEKEIFCKMPAYRKIRAVLGKETEKLLSVEQLDEIARVFTLFRNEQKMRDALADAGFDAALVERLMGGMDSFSGFGNLSIKALRNINPHFEDGLVYSDACAAAGYNHTGHTGTERNMLISLKHLSEAMEYTVSSPVAKRAISQTAKVLNNIIREMGCSPVYINIELAREVAKSRKVRDENDLNMKNNHKENEERKKEIAEFKKHGEPTGKDIVAYKLWKEQGGVCPYSQKYIELDRLFNDEGYAEVDHIVPYSVSFDNTYINKVLVMTAENRQKGNRLPMEYMTGEKRDNFVVWVKNNIKSKDKSYRLLKKNLSQKERNEHKNSHLQDTRVVTSFLHGYISDYLEFAKYSGKRVRHVFALNGQITDMLRKRWGLNKVREDGDLHHALDAAVIACTTQRMIDDVTHYYEYREDRYRNRADIVKDFTAGAGGAFDRFPQPWPYFSKELEARLSSDPRRILSGLAGEGKLPAYDRWALERVEPVFVSRMPNYTVTGPAHEETLYRKRKDGVIVKKVPLKKLKLKDGEIEGYSDPGSDPRLYQMLKNKLIAADGDAKKAFAEPVYKPTNDGSQGNVVKRVLIVQNTESLVDMRNGNAVAPKGDMIRVDVYCVENEGYYMVPVYVDDIHSGTLPNKAVVSTKDYKDWPEMKDEDFIFSLYSGDLIYFEDSRTKVFKKNFKESSLPDELPLQKGFLYFKSGNRNNGSFVVITHDNSYVVQSFGFKTLQKLEKWRVDVLGRKYKVEKEARQGFSG

SEQ ID NO: 6838 - protein, 1105 aa, synthetic construct
  REGION 1..1105: note = Synthetic
MPGHLFSEKSVFVTSDKKTREGIMYYRIGLDIGITSVGWCAVETDASGEPKSILDLGARIFDAAEQPKTGASLAEPRRLARGLRRRLRRRALRLALAKELFAELGVAPEAAPRDVNELRVAGLDNLLEEREFAAVLLLLLKRRGFKSNSKAQNSKEDGELLSATKRNAELMAERGYRTVGEMLAAEYSEKRTRADGSTYTVYNVRNKGGSYAHTVRRADIRQEIEALFAAQAGFGSALASDEVKDRVLEIFDMQRNFDDGPGKGSKYSATYAVGKCEFLEDEERAPRASYSNERFVALQKINHLRIISGGKSRELTAEEREKLIALAEKNKKTTYAAVRKTLGLGDGERFNALTYSTKKENGDEIKESEKATFVTFERSRAISDCLDEEHRTADIIDAAAYVLSHVKSDSRRLKMFADVPETAVLSDAEKEGLLAVNCDKFGHLSVKAIRAIIPYLEEGQRYDEACRSAGFHHSKKQNDGERSLLLKGSAVAEETENITSPVVRRAVAQTLKVLNAIIGRYGSPVAINIELAREMSKSRAERDKATRENEKRRKDNDTLRETIKEMGVVPTYTRLLMMKLYEEQKGQCPYTGETIAINRLFEDNYVQIDHIIPYSRCFNDSFNNKVLVKTRANQDKGNRTPFEWLFTTPEWNDFFDRVNGMYAGNFKKKQMLLKESFDEEEWKSRALNDTRYICRYMRGLLADRLLFEEAGMGTQRVFAVNGGITAELRRQWGIGKVREDGDIHHAVDAAIIACVTPGAVRKLSAGYKKKHEEKRYKEEGYGAEVTEPYAGFADELAARCMEDEGLLRDRLRALGFDENTVLKAKPVFVSRMPKRKGRGPIHKETIQSAKYVEDGISVKKVALTELKLERDKNGEWYIKDYFRPEDDRKTYELLLDKLIAADGNAKVAFAEKVFKPAAEGKIPNEIKKVKLYYPVNSGVMLEDIKGFADNGSMVRVDMFSKNGKYYCVPVYTADIYAGRLSDRAVTRDKRQSEWDVMDDTYKFEFALYPNDLIWIKSKKGICMSKQRDNNNSRMPATLNMREGCVYFRGLNINDGGANIITHNNCYGMKLGLKTIGEIKKCVVDVLGNISFVQEEKRPPAKIKQK

SEQ ID NO: 6839 - protein, 1094 aa, synthetic construct
  REGION 1..1094: note = Synthetic
MSGALRRTKDRLTLKRPGNRLFDKLLPAYSNQEAMSMADLSLPQAHKGLILGIDLGSSSLGTALVNPEGEEIPFLGVRIFPAGVVGDIEEGREESRSAQRRDARLARRQTQRRQRRLYKVFRILQRMGLLPLGPRVEVLYELQRELERRYPETTVVPYFLRARSLDQALTEHELGRALYHLAQRRGFLSNRAGGKKDDAEERSKVKGSIKGLRAAIEAAGKRTLGEYMASLDPRVTSIRNKPEFSDHYTHRSMYLDEFNLIWDAQQPFHSGILSAQFRAKLHHAMFHQRPLKDQSNLVGQCELEPEEKRAPLRLLDAQRFRVLGFVNNLRVGLDDGNTRTLSANERALLLDLCEKSEKLSIPAARRALGFARTSKFTIEEGGEKNVPVNLVAGRLRAVLGDWWDHLTTEAKADLGEDVGVGKRCKTDEELELCAREKWCLAPEIAEELSKVRLPDAYGRYSLKALRELLPALEKGLNVEEAIRSHPQYLESRKVAEPLPLLPPVKDVLGEIRNPAVLRSLTEMRKTVNAIVRRYGKPEFIQVELARDLKRSKKERQLETGRNRDREKLRQLAVEELQRHDSVRYSNPRGTDIEKYLLAMESNWHCPYTDRKYGFVDVFGEHPSVDVEHIIPRSRSLDDSYLNKVLAYRSANMEKGNRTPHEWLHESDVERYDRMIALVNGFDSRFEVGRKLRRFSMELSEPDSLLAEFTQRQLQETRYASKLACRYLGVLYGGEVDAEGNRRVFACAGQVTAKLRKAWDLNQILNPVGKPEKSRDDHRHHAVDALTIALTSSKMVRDLANAAGEADRLFRRKIILPVPWVDFAEAARMSIEAIQVSHRPARKLAGPLHKDTLYSRPRKYAVEIDKKGTPVEKEYVHLRVPVVKLGTRAAAEVIVDVRVREAVMAKAEELGGGGNKFQNNWPVLHTRHGGSVPIKRVRVREVKSVVPIGKQGRERFVSSGSNHHAAIVAEMDTKDSVKRYVFSTVTMLEAFERKRQGLPVVQREHGPGMHFLCTLSDGDMVEGKRPGDAVPRIWKVHTVDKNGRIFLSAAVDARKKDEIKKAHDHWEPTVNSMFGAGGARKVLVTHLGELISAND

SEQ ID NO: 6840 - protein, 1054 aa, synthetic construct
  REGION 1..1054: note = Synthetic
MSTSRSPQGLPSGLVLGIDLGSGSLGTALVNPAAERIEFLGVRIFPAGVEGDLETGREEPRSAKRRQARLARRQTQRRQRRLYKVFHLLQRMALLPTGRRVDVLCQLQRDLERRYPETTVLPWFLRARALDHPLEPCELGRALYHLAQRRGFLSNRVGGKQDEEERSIVKGAIKGLRAAIQDSGKRTLAEYMVSLDPHLTPLRNKPEFSNHYTHRSMFQDEFALIWDEQRPHHPKILTEHWRARLFHALFHQRPLKDQSYLVGPCELEPDEKRAPLRLLAGQRFRILGFVNNLRLRLEDGAERKLSPNERAVLLDLCEKSETLSFAAAKRALGLSKTLKFTVEEGGEKNVPVNLTATRLRAALGSAWDEFSPVQREDLIEDVGDGRRCPTDEDLETCAREKWGLPAELAEALTRVRLPDAYGRYSLKALRELLPALEGGLTVEEAIRQHSRYAATRKPADPLPLLPKVSDVLGEIRNPAVLRSLTELRKTVNAIIRRHGKPDYITIELARDLKKSKKERQRETSRNREREKLRQLAVEDLRKHDPVRFANPRGYDMEKCMLAMEAKWRCPYTGNQYGFTDVFGEHPVVDIEHIIPRSRSLDDSYLNKTLAYRSCNAEKGNRTPREWLFDSDGQRYDQMIQVVKSFDSRFEVGKKLRRFAMELSDPDSLLREFTERQLQETRYASKLACRYLGCLYGGVIDNLGRQRVFACAGQVTAKLRRAWDLDRILSGKPEKSRDDHRHHAVDALTVAVSSPGIIRDLATASGEADRLFRRKVILPVPWAGFGEQTRSAVEGIQVSHRPMRKLSGPLHEETLYSRPRARDVGTGGGPNAKECVHYRVPVTTLSSARDFQNIVDSRVRAAVEEKAANLGGGGNKFLNDWPVLNTRKGGVVPIKRVRIRKVQSVVPIGQGPARRFVIPGSNHHAEIVARLDTANRDARYICHTVTLLEALERKRQHVPVVQRDHGPGCRFVCTLSEGDLLEARRPEDPQTRIWKVRSVRQSGQLDLTPSLDARMKKDLEEDGLVWSPAVGSVFLNRAARKVAVTHLGEVVPAND

SEQ ID NO: 6841 - protein, 1155 aa, synthetic construct
  REGION 1..1155: note = Synthetic
MAVTLPKDDVRYKVGIDVGLNSIGFCAVEVDDDDQPIRLLNSLVFRHDAGVDPSAQKSSLTRKKISGVARRNRRANRETKKRLVALDRLLSEELGWPLPNLEGYPDPHEPWHARAQLLDGFVANDAKRKEMLSIAMRHIARHRGWRNPYMKPASLASLPYPSEFLTKLNEDTSRAIGREFAAEATQGQLVDAFISGSLSLATTPDIQVLEESEKDSGENDLRDIVLGRVRGDKGVIEGKLHQSDNAEEIRRICATQKISQDQIKRLIEAVFKAKNPREVGAAYKLVGHDELPGQEKYIRAERAHPAFQKFNIVATLANLRINEAGSKRRLSPKELQTLTNYLSNVGPKDEVTWFDVAEKLKIDRFDLQGTAHAAYDGQAALNYPPRDLTSVAIKKGKVKALKNWWKQASEDQRGQLIDYLSNSGGSDTPQTDDELDDLTKLIQNFNEKDLEELEKISLPAGRAAYSVNSLTKLTQLMLNEGIDLHEARKRLFNIDDNWKPTPEPINSPVGNPAVNRVLKQVARWIDMTTERWGIPVSVNIEHVRGGLSSDKVAKKIIRENQARREKNDEAAEEIAKRLGESGCARRSHTIKYFALQRQKCQCLYCGTSISFKTAEMDHIVPRTNGGSNNKRSNLAAVCKTCNKSKRNIPFAVWVSSSEAGPKVSWEEVKGRVDSMILEKANLPEDYEDDSLIEFYSKNESKKFRKEVIARLESKKPEEEFDGRSLESVAWMAVELRGRIVGYYESLLKDTGQKVPQVGVYRGDIIAEARRASEFEDRVELLGRKGKTRLDRRHHAMDALVIALMNQSVSQTLSWRRQLRDSQRISEKPETWKRFHGSDRDGNRHWEAWAKAMRIAVELFNNALEKDEVHFSENKRLGISLAKAHDDTIKSLCSYALGGAFSVELIDRAETPALWTALTKQPDFDVKNGLPADPTRHITVNGKHFGPTDKVNFFTSDAPAIKVRGGFAGIGDTIHHARIYRIDGKKTTYAMVRVFQTDLRRMKRRDLFTEPLKPSTISMRTASKTIRKALTDGSATQIGWLVEGDEIRIETDRYPSGQIGGLLKEYPEASSWRVCGFPNPSKVRVKPNLISKEGLDKKYSEPNILEAVKKIVDYPGWIVEINALLGKGMVTVIRRNTLGEERWVSRAHLPVSVNLS

SEQ ID NO: 6842 - protein, 1150 aa, synthetic construct
  REGION 1..1150: note = Synthetic
MAVTLPKDDVRYKVGIDVGLNSIGFCAVEVDDDDCPIRLLNSLVFRHDAGIDPASRKAALTRKNVSGVARRNRRAKRETKKRLVALDRLLSEEFGWPLPNLEDYPDPYEPWHARARLVEGYIADDAKRKEMLSIAMRHIARHRGWRNPYMKPASLASLPYPSEFLTKLNEDTSRAIGRKFAAEATQGQLVDAFILGSLSLAATPELQVLEESEKDNSKNKPRDIVLGRVRGDKGVIEGKLHQSDNAEEIRRICASQEVPQDQVERLIEAVFKAKNPREVGAAYKLVGHDELPGQKKYIRAERAHPAFQKFNIVATLTNLRINEAGSKRRLSSEELQMLTNYLSNVGPKDEVTWFDVAEKLKIDRSDLQGTARASYDGKAALKYPPKDVTSVSIKKNKVKALKDWWKQASEDQRGQLIDYLSNSGGSDTPKTDDELDDLTKLTQSFSEKDLEELENISLPAGRAAYSLNSLTKLTQLMLEEGIDLHEARKRLFNVDDDWKPTPEPINSPVGNPAVDRVLKQVARWINAATERWGIPVSVNVEHVREGLVSEKVVRELIRDNEARHKKNMEVAEEIAKRLGLSGRALRSHTIKYFALRRQNCQCLYCGTKISFGTAEMDHIVPRTNGGSNNKRSNLAAVCRTCNASKSNIPFAVWVSSGKAGPGVSLEGAKERVNSLLLEKADLPEDYDDDSLIEFYSKNESKKFRKEIIARLESKKPDEEFDGRSLESVAWMAVELHGRIVGYYESLLKDTGQKVPQVGVYRGAITAEARKASGFENRVELLGGKGKTRLDRRHHAMDALVIALMNQSVSKLLSWRMQLRDSQRISGMPETWKEFHGFNRDEYRRWNAWANAMRIAVELFNDALEKDEVYFSENKRLGVSLAKAHDDTIRSLCSYALGRDFSVELIDRAETPALWTALTKQPDFDVKNGLPEDSTRCITVNGKQFGPTDEVNFFASGAPAIKVRGGFAGIGDTIHHARIYRIDGKKTTYAMVRVFQTDLRRMEHEDLFTEPLKPSTISMRTASKTIRKALADGTATQIGWLVEGDEIRIETDHYPSDDIGKLLDEYSEASSWRVCGFPDVLKIRLRPNLLSEEGFDDNTAAAVRKIVSGAGWRVSMNTVLSGGLVTVIRRNALGEERWVSRANLPLSVNLS

SEQ ID NO: 6843 - protein, 1155 aa, synthetic construct
  REGION 1..1155: note = Synthetic
MAVTLPKDDVRYKVGIDVGLNSIGFCAVEVDDDDQPIRLLNSLVFRHDAGVDPSAQKSSLTRKKISGVARRNRRANRETKKRLVALDRLLSEELGWPLPNLESYPDPHEPWHARAWLLEGYIADDVKRKEMLSIAMRHIARHRGWRNPYMKPASLASLPYPSEFLTKLNQDVSRVIGKEFAAEATQGQLVDAFILGSSSLATTPALQVLEESEKNSGENNLRDIILGKVRGDKGVIGGKLHQSDNAEEIRRICSAQKISQEQVQRLIEAVFKAKNPREVGAAYKLIGHDELPGQEKYIRAERAHPAFQKFNIVATLANLRIDEAGSKRRLSSKELQTLTNYLSNVGTKDEITWFDVAEKLKIERSDLQGTARASYDGQAALKYPPIDVTSVSIKKSKVKALKDWWKQALEDQRGQLIDYLSNSGGSDTPQTDDELDALTKLIQNFNEKDLEELEKISLPAGRAAYSLNSLTKLTELMLEEGIDLHEARKRLFNIGDDWKPTPEPINSPVGNPAVDRVLKQVARWIDMSTERWGIPVSVNIEHVRGGLTSNKVAKKIIKENQARREKKDKVREKLAKQPGLSGGAKDNLIKKQFAIQRQNSQCLYCGTKLEFEEAEMDHIVPRTNGGSNNRRTNLAAVCKDCNLSKSNTPFAIWVSSDKVGPKVSWEGVKERVNSLLLEKANLPGDYDDDSLIEFYSKNESKKFRKEIIARLESKKPEEEFDGRSLESVAWMAVELHGRVLGYYESLLKNTGREVPRVGVYRGAITAEARKASGFENRVRLLGWEGKTRLDRRHHAMDALFIALMNQSVSKLLSWRMQLRDSQRISGMQETWKEFHGSDRDDNRHWEAWAKAMRIAVELFNNALEKDEVHFSENKRLGISLAKTHDDTIKSLCSYALGGAFSVELIDRAETPALWTVLTKQPDFDVKNGLPADSTRHITVNGKHFGPTDKVNFFTSDAPAIKVRGGFAGIGDTIHHARIYRIDGKKTTYAMVRVFQTDLRRMKHKDLFTEPLKPSTISMRTASKTIRKALADGSATQIGWLVEGDEIRIKTDRYTSFTIGKLLKKYPEASSWRVCGFPTPSKVRLKPNLISKEGLNEKYFDSDTLEAGRKIIDHPGWIVEINTLLEKGMVTVIRRNTLGEERWVSRAHLPVSVNLS

SEQ ID NO: 6844 - protein, 1150 aa, synthetic construct
  REGION 1..1150: note = Synthetic
MAVTLPKDDVRYKVGIDVGLNSIGFCAVEVDDDDRPIRLLNSLVFRHDAGVDPSAQKSSLTRKKISGVARRNRRANRETKKRLVALDRLLSEELGWPLPNLEGYPDPHEPWHARAQLLDGFVADDAKRKEMLSIAMRHIARHRGWRNPYMKPTSLASLPYPSEFLTKLNEDTSRAIGREFAAEATQGQLVDAFILGSLSLATTPVLQVLEESEKDSGKNDLRDIVLGKVRGDKGVIGGKLHQSDNAEEIRRICATQKISQEQVQRLIEAVFKAKNPREVGAAYKLVGHDELPGQEKYIRAERAHPAFQKFNIVATLANLRIDEAGSKRRLSPKELQMLTTYLSNVASKDKVTWFDVAEKLKIDRFDLQGTAHAAYDGQAALNYPPIDVTSASIKQSKVKALKVWWKQASEDQRGQLIDYLSNSGGSDTPQTDDELDDLTKLIQNFNEKDLEELEKISLPAGRAAYSVNSLTRLTNLMLEEGIDLHEVRKRLFNIGNDWKPAPEPINSPVGNPAVNRVLKQVARWIDMATERWGIPVSVNIEHVRGGLTSDKVAKKIIRENQARREKKDEAAEEIAERLRLSGRVHRSHTEKYFALRRQNCQCLYCGTSISFKTAEMDHIVPRTNGGSNNKRSNLAAVCTTCNKSKSNIPFAVWVLSGEAGSKVSLEGAKKRVDSLLLTKTDLPEDYDDDSLIEFYPEKEGEKFRKEIIARLESKKPEEEFDGRSLESVAWMAVELRGRILGYYESLLKDTGQKVPQVGVYRGAITAEARIASGVEKRVGLLGQKGKTRLDRRHHAMDAMVIALMNQSVSKLLSWRMQLRDSQQVSGAPKTWKEFHRSDRDGNRHWEAWAKAMRIAVELFNDALEKDEVHFSENKRLGISLAKAHDDTIKSLCSYALGGAFSVELIDRAETSALWTALTKQPDFDVKNGLPADPTRHITVNGKQFGPTDEIKFFTSGAAAIKVRGGFADIGGTIHHARIYRIDGKKTTYAMVRVFQTDLRRMKHKDLFTEPLKPSTISMRTADEDIRKALTDGTATQIGWLVEGDEIRIKTDRYPSGRIGGLLKEYPEASSWRVCGFPDDARVRLRPNLISEEGFEDDTVEAVREIVSGNGWRVTINKVLNNGLVTVIRRNTLGEERWVSRGHLPVSVDLS

SEQ ID NO: 6845 - protein, 982 aa, synthetic construct
  REGION 1..982: note = Synthetic
MHMSLIFGFDLGIASIGWAAVRMSDPTASTTDASAPDSRPVGEIVGAGVRCFDQAQNAADRRTARGARRRIRHRAQRMREIRDILRQYHLIDIPEPKSDGQNNFYLNRDTDINIWQLRAVDAFTRKLTPRETGRILYHLAKHRGYDDITYPVPAGAKSEKADDAESKEELKAIGAIKDNLAKLQRENPDQTMCQMLYATEHAQMRNGRKSVVKIAKDGTQKTEVQSTYSSSIPRSEIKREAEMILHAQRDFGNDFSDAFEKWWAVACRQRKFNESASPLAKSIAEMRGKCPFTNEPVAPKESPTAQKFVALTKCRQNDFTVAETQTVIDELYKKKTGLKYADVRNLLKWDDDKQFKTLNYSRIYDKENKVWIEPDIKKIECQKFYAFTGWHKLAKYTTDIDTMDKIFDVIATQKTPENIERAVSEILPEHAAAIAQITSSEFIKLSISALQKIIPEMENGKKYNEAVASGLNKDFRAQNVSYINRDDGAPAGHLHQINWTLLGNRITSPVAKRTLVQLRKVYNAMVYRFGAPDRIHLEIGRELKNSPDDIARMNREQERNRQATEEARKEYGKNYFKYKLYMEQGGKCPYCNAVLAAGDWGAYEIDHILPYSRSLDNSQSNRVLVCHECNQRKGSKTPYEFLTSEQFYDMTVRARALHNPAKFKKLTNTDLPKCDAEQNGFIERNANDNATIAKFATEYLEYGIDWPASDDIKKRVLVRTGSLTDYLRHQWGLVKNRDESDKHHAQDAIVIACATQGMVKYLSTLSARFENKYALIQKYGQAWYTALKTSIQEPWNGFRTDVISCLNDIIVSRPPRCNATGAAHDETIYADPKSYRSKRGLNKNRDKGSLEIRHGRAVRGDMFRFDIWRNAHGKYVCVPIFVTDTKGKDDDVFKVPDGEFVCSLHKDDYVRLTAADGVYEGYITKMDHGTNFILYRQDNNRTQVVKKSVGKCTNIEKFAVSLLGTPKPIKLPEQRTPVVKRK

SEQ ID NO: 6846 - protein, 996 aa, synthetic construct
  REGION 1..996: note = Synthetic
  REGION 64..72: note = misc_feature - Xaa can be any naturally occurring amino acid
MRMSLIFGFDLGIASIGWAAVKISDPTASATDAAAPDKRPAGEILGAGVRCFDQAQNAADRRMXXXXXXXXXRMVRGARRRIRHRAQRMREIRAILRKYNLIDIPEPKSNGKNNFYLNRDTDINIWQLRAVDAFTRKLTPRETGRILYHLAKHRGYDDITYPVSADTKSEKADNADAKEELKAIGEIKRNLAKLHNENPNQTMCQMLYAINHSQHIKMRNGRKSGTKIAKDGTQKTELQSPYSNSIPRSQIKREAEMILRAQRDFGNDFSNVFTKWFDVAFRQRKFNESASPLAKSIEEMRGKCPFTNEPVAPKESPTAQMFVALTKCRQNDFTVEETKKIIDELYKKKTGLKYADVRELLKWDDDRRFKTLNYSRTYDKENKILIEPDIKKIEDRKFYAFTGWHKLAKYTTDIATMDKIFDIIATQKTPENIERAVSEILPEHAAAIAQITSSEFIKLSISALQKIIPEMEKGKKYNEAVAAGLNQDFRAQNVSYINRDDGASAGYLHQINWCLLGNRITSPVAKRTLGQLRKVYNAMVYRFGSPDRIHLEIGRELKNSPDDIARMKREQERNRQATADARKEYGKNYFKYKLYMEQGGKCPYCNATLVAGDWAAYEIDHILPYSRSLDNSQSNKVLVCHECNQRKGSKTPYEFLTSEQFFDMTVRARALHNPAKFKKLTNTDLPQSNDDQNGFIERNANDNATIAKFAAEYLEYGIDWSASDDIKKRVLVRTGSLTDYLRHQWGLVKNRDESDRHHAQDAIVIACATQGMVKYLSTLSARFENKYALIQKNGQAWYNALKTSIQEPWDGFRTDVISCLGNVIVSRPPRCNATGAAHDETIYADPKSYRSKRGMNKNRDKGSLEIRHGRAVRGNMFRFDIWRNARGKYVCVPIFVTDTKGKDDDAFKIPDGEFVCSLHKDDYVRLTTADGMYEGYITQMDHGRNFILYRQDNSKNIVVTKAVGKCTNIEKFAVSLLGTPKPIKLPEQRTPVVKRK

SEQ ID NO: 6847 - protein, 1015 aa, synthetic construct
  REGION 1..1015: note = Synthetic
MPDYSKGQVFCFLWQRVVISDYYAYIHNKGTKQRGTRMSLIFGFDLGIASIGWAAVKMSDPTASDTDAAAPDNRPVGEILGAGVRCFDQAQNAVDRRVARGARRRIRHRAQRMRDIRKILRQYNLIDIPEPKFNGQNNFYLNRDTDINIWQLRAVDAFTRKLTPRETGRILYHLAKHRGYDDITYPVLTGAVPEKADDAEAKEELKAIGAIKDNFAKLHNENPDQTMCQMLYATEHGQMRNGRKSVIKITKDGTQRTEEQSSYSNSIPRSEIKREAEMILHAQCGFGNDFSDVFKKWCVVAFHQLKFNESKSPLAKSIEKMRGKCPFTNKPVAPKESPTAQMFVALTKCRQNGFTVAETNAIIDALYKKKTGLKYADVRKLLKWDDDSQFKTLNYSRTYDKENKKWIEPDVKKIENSKFYAFTGWHKLAKYTTDVATMDKIFDIIVTQKTPENIERAVSGILPEHAAAIAQITSSEFIKLSISALQKIIPEMAAGKKYNEAVADGLGKDFRVQNVSYIDRDNGVSAGCLHQINWNALGNRITSPVAKRTLGQLRKVYNAMVYRFGAPDRIHLEIGRELKNSPDDIARMNREQERNRQATEEARKEYGKNYFKYKLYMEQGGKCPYCGATLVAGDWAAYEIDHILPYSRSLDNSQSNKVLVCHECNQRKGNKTPYEFLTTEQFHDMAVRARALHNPAKFKKLTNTELPQSSDEQNGFIERNANDNATIARFATEYLEYGIDWPESDNIKKRVLVRTGSLTDYLRHQWGLVKNRDESDKHHAQDAIVIACATQGMVKYLSTLSARFENKYTLIEKYGQAWYNVLKTSVQEPWAGFRTAVFSLLDNIIVSRPPRCNATGAAHKETIYANPKSYRSKRGLNKNRDKGSMKIRHGRVERGDMFRFDIWRDARGKYMCVPIFVADTKGKDDNNFKVPDSEFICSLHKDDYVRLTTADAVYEGYITQMDHGTNFILYRQDNSQIQVVKKSVGKCTNIEKFAMSLLGTPKPIKLPEQRTPVVK

SEQ ID NO: 6848 - protein, 1157 aa, synthetic construct
  REGION 1..1157: note = Synthetic
MQSNKKIEEANQDLEIAFDVGHSSIGWAILQDTNHSDPGDDGFATPKLLGCGVVTFGADDCLAKKRRDYRRQRRHIRATRQRIARLKELLKHMGVLTQQQLDKPGCAWPWLLAARVLKGGPLLTWPEMWDVLRWYAHNRGYNANRLWSRQDDADAEDSEKVQNALHLFEQYKTNTMAETICAICGLDPLGNKKSCHLTADRRPKGLNAAFPRENIENEIKRILQQHIGHLPQINELLIKALLEDWRALPCPVIKLPPRYRGGLLLGQLVPRFDNRIIKSCPITYEREYQRCLNNSEDSEKAAQQAAKASKVPTAKCPEFLCFRWAMLLANVKISQAGNGHLRSLTIKERAEVHCQMEQKGYLTKEEFKGAVRQLTNNMPDNLDQMLMHPDSEGALVLDPVKKVLSQEPWATLWSQMSPRLQKRAIGRLRRGKSISLSELAGAAPDLKEECDRLRQVLQEYVDGQNTKKKRGKEISIDQVWQQSFEAKLPKGRAPYTRQVMREVWQDVMEKGIHPKEKEGCLYRDEAIREAQIQRSIDQQTNNHLVRHRLKILERLHKDILKTYATDNPARVKRITIEVNRELREYSGMTRKEQEQDLGQRLAHFKSAVKKLENDLKEADIQKYNIRITAGLIRKTRIAMDLDWTCPYTGERYDVLTLARKGVDKDHIIPRSQRASDSLDSLVITFPEVNRMKGKRTALRFIEEFQGRTVEGRPNLTIRTVQQYKAWVEKLDTRLGHLEDQRRKKRRKEMLLLSEYVDKDFTPRDLTQTSQLVRLGAALLQRPYLHLEKKPVITSLPGSVTAFVRRAWNLLGCLSLANPQVLNEEGHVKTKDEIRGITHLHHALDACTLALAGHYLPRDGHIWSLLVKRRLNPMEQRQLVQATHGLCQITADGEVTLRDLPTSFKEQLRQRLAERRVVQHVPKDMSGLPAEETVYRVFDPADQHPSARRLRRWFDAQKVKIPGPDDDTVLIVCRKRKTSADSQTGTILHETDTWRWVYKEVEKSKLIGLNPEPNSKGKLKKLKAVKIISDNFGIALDPEPTIIRFHKVWHQLQALRHQNHDKPIRVLRKGQIIQIHNGTRAGIWRVFSVKDTEAYGVAVDLSLLDNPGLNRGNAPVEKLLIDGLSIINCPLVGIDSSKIQMAPVKKRLRKSKKNTANE

SEQ ID NO: 6849 - protein, 1147 aa, synthetic construct
  REGION 1..1147: note = Synthetic
MTTANKKSAADLQLAFDVGHSSIGWAVLKAPAGQSPSLLGCGSVIFPTDDCLASERRGFRRQRRHIRATRLRIARLKRLLAHLGVLTQEQLDEPGCAWPWLLAARVLRGGKKLTWSELWDVLRWYAHNRGYDGNKGWSRHDAANAEDTEKEQRANELLADFKKKHGRDGTMAEVFCDVLKIDPLGELKSSMIRVRNLGAAFPREGVETEVERILRAHLDGVLPKLDDLVIQAVMRDHTALSGPDYRLPSRYGQRLADGSLSPGGLLFGQLVPRFDNRIIARCPITFERVYQQALADEKDEAEAKHEAEKQAKVPGIDCVEFHRFRWAMQLANVQVATGDARKTRRLSVAERAAVNAEMEKEGSLTPGDFKKAVRALTGGAKDNLEQLLSHPDADRALVLDPVRRYVHGNALASSLFPALSERWKKRLMGQLRRGKQITVGELLSECPEIEPQVVSILDGQNTKKRKKDEPLTREALLKTPLHVQPPNGRAPHTRDVMNAVVKFVFANDGHPMEEDGPLFRSEAIRNAQLQRALDEQTNNHLVRHRLKLLERLHGDLIKEYAKGDRALIARITIEVNRDVKEMSGKTAQEQAKITGQQLAHFKGVAKKLEAAYEGKGVHVGPGLIRKGRIAEDLNWTCPYTGHPYDAIQLLHRAVDKDHVIPRSERASDSLDSLVITFAEINKWKGKRTAVRFVEEEQGKPVPGLPQLTIKTLTRFTKDVEALETFKGHDDDQRRKKNRKRLLLLRDYVEKEFTPGDLTKTSQIVRLGAQALQRHYLGAEEQPVITSLPGSVTGAVRKSWNLIGCLSTANAQVLDPEGKVKTKTEIRGITHLHHALDACVLAFTSLFLPRDGGAWELLVKRRLNADEQKRAREIFRNMIEITQDGEMRLADIAPQLKIQICERLKERRVVQHLPSDLSGLRCKETVWRVFDPTDIHPNALRISRWLTKQGIPIPLKDDETLLIVARKRRDKGAEKPKKLLRETPTWWWFYDSPLKSKLIGLEPTVGTTGKLRAIKAVKVLGDNFGIALAGGDGVVVRPLKIWPQLAALKASNGGKRPQVIRKGSLLSVPRGNYEGVWMVVECKDDKTKGTLVTLHVPDLASAEKAGERQRIRDVRVRTLVKDGMMLLSPRLCGIPSTQVEKAKQDSKE

SEQ ID NO: 6850 - protein, 1162 aa, synthetic construct
  REGION 1..1162: note = Synthetic
MNAKGKMSSATAADLELDDLELDFDVGHSSIGWAVLKTHTGQTPTLLGCGSVIFPADDCLASARRGFRRQRRHIRATRLRIARMRRLLAHLGVLTTEQLETPGCAWPWLLAARVLRGGDRLSWTELWDVLRWYAHNRGYDGNKGWSKHDTASDEDSDKEKRAGELLTSFEKKHGRAGTMAEVFCDVLKVDPLGAVKSSMQRVRNLAAAFPREGVECEVERILRAHVGLLTNLDDRLINALMRDHTALPGPDLRLPARYGQRLNDGSLSPGGLLFGQLVPRFDNRIIAHCPITFERVYQAVKADTGNDEQAKHEAEKQAKVPGVGCVEFHRFRWATELAKIKIATSDGRPPRNLTAAERQAVNVEMEKRGFLTPKQLRDAVRAQTGGAPDNLEQILTHPDAERALVLDPVRRYLHSDQLVSTLWQVLPEHLQKRLRGQWRRGHAITVAELLDASGDFRAAAETLCQRHLDAQNTKKRKKDEPLTREALLHTKLHVQPPNGRAPHTRKVMREVVEFVFATDRHPAEEGGPLYRSEAIRQAQLQRALDEQTNNHLVRHRLKLLERLHADLLKTYAGDDCARIARITIEVNRDVRELSGKTAQEQAKLQGQQLAHFKGVAKKLAEAYEGLGVHVGPGLIRKGRIAEDLGWTCPYTGKAYDALDLLHRRVDKDHIIPRTDRASDSLDSLVITFSEINNMKGKRTAARFVEEFQGQPVQGLPQVMIKPLSAYLKDVAALETFKGHDDDQRRKKNRKRWLLMRDYVEKEFTPRDLTQTSQLVRLGAQALQKHYVGVDKQPVITSLPGSVTGAVRKSWNLTGCLAAANPLVLNPDDLDEGGRPKVRTKTEIRGITHLHHALDACVLAFASHFLPRDGGAWELLVKRRLNADEQRRARTLFGSHIEITQDGELRLADLSPALKAQICERLKERRVVQHLPADLSGLRCKETVWRVFDPADPHPNSKRMARWLAQKKVALPAPDAKTALIICRKRRAAGVAGEESAGGKVFRETKTWRWVYDIKDKSALLGLAPEGDAAAAKLKRIKAVKVLGDNFGLALDPEPTLIRPHKVWHQLDALRKANGGKPARVVRKGSLIRVLRAKSAKVDYHGVWMVRGTTLNQRAGFLLDLSPADQILYRGQPECFQNVSVATLMKCGLEVVRSPLCGVTPSQ

SEQ ID NO: 6851 - protein, 1147 aa, synthetic construct
  REGION 1..1147: note = Synthetic
MNTATKKSTADLQLAFDVGHSSIGWAVLEAHSGQAPALLSCGSVIFPADDCLASERRGFRRQRRHIRATRLRIARLRRLLTHLGVLTAEEVAANGCAWPWLLAARVLRGGKKLTWSELWDVLRWYAHNRGYDGNKGWSRHDAASAEDTEKEQRANELLDGFQKKHGRAGTMAEVFCDVLGIDPLGAVKSSMVRVRNLGAAFPREGVEAEVERILRAHLGTLPHADKRLIEAIMRDHTALPGPDYRLPSRYGQRLADGSLSPGGLLFGQLVPRFDNRIIARCPITFERVYQHELAEGTEEQDAKHEAERQAKVPGVDCVEFHRFRWAMQLANVQVATGEARKTRRLTALERSTVHAEMEKHGSLTPGDFKKAVRALTNKAPDNLDQLLSHPDADRALVLDPVRRYIHTHALVSALWPTLTERWQKRLAGQWRRGKAITVGELLAQCPEIEPHVARYLDAANTKHREKDKPLTREALLRTPLHVPLPNGRAPHTREVMREVVDFVFKTDRHPAEGTEGALDNGPLFRGEAIRNAQLQRALDEQTNNHLVRHRLKLLERLHTDLIADPKFGAGDRSRIGRITIEVNRDVKEMSGKTAQEQAKITGQQLAHFKGVAKKLEAAYEGLDVHVGPGLIRKGRIAEDLAWTCPYTGASYDALDLLHRRVDKDHIIPRSERASDSLDSLIITFAEVNKMKGKRTAVRFIEEFQGKPVDGRPNITIKTLARYLADVKALKTFGGHDDDKRRKERRKRLLALPDYVEKEFTPGDLTKTSQLVRLGAQALQKHYLGAEKQPVITSLPGSVTGAVRKSWNLIGCLATANPQVLDPDGKVRTKTEIRGITHLHHALDACVLAFAALFLPRDGGAWELLVKRRLNADEQRRARELFGMQIEITQDGELHLADLPNVLKTQICERLKERRVVQHLPADLSGLRCKETVWRVFDPVDPHRNSRRLARWLAQAKVPVPAPDAKTALIICRKRKNADAASEESVGGKVFHDDGKTWRWVYDIKDKSALLGLAPEGDVAQAKLKRIKAVKVFGDNFGLALDPEPLILRAHKVWHRLNALRRSNGGKKPRVLRNGMLIHVPRGIYIGTWRLFSVKNNASGLAVDMARPDVVVLKNKTEGHKINVLLSTLIKNDLEVLKTPLCGIAPAP

SEQ ID NO: 6852 - protein, 1168 aa, synthetic construct
  REGION 1..1168: note = Synthetic
MSAKQNISSPHPDLHLAFDVGHSSIGWAVLQTPAAPSPEPAAELLGCGAVVFAPDDCLASTRRGFRRQRRHIRATRQRIARMRRLLAHLGVLTPAQLAAPGGAWPWLLAARVLGGGAPLTWPELWDVLRWYAHNRGYDANRAWSRQEKPDTEDSEKAQRAHELLREFKRRHGRPGTMAEVFCDHLGVDPRGPVKSSRQRVRHLGAAFPREGVEAEVERILQAHKGILPGVDDPLIHALLCDHTARPVPGLRLPARYGQRQPDGTLRPGGLLFGQLLPRFDNRIIARCPIAYERVYQQVLAETGDREKARREAEKRAKVPAAHDADFHRFRWAMVLAQINIAVPGAPQPRNLSAPERNSLHAVMEQKGGLTKSELTQAVRQLTGRAPDNLDRLLALPDAERALVLDPVRLYCHRDPLLSVLWPALPARLQRRLRGQWRRGRALTVADVLAACGDARPAAEAALAQYLEAEAAKKKRAPDAPRIPDTPAGRVLRVERARGRAPHTREIMREAVAFVLATDRHPAEEGGPLYRSDAIREAQLRRALDEQTNNHLIRHRLKLLAGDDAAGPRALNGLFRDLANTYAGGDLGRLGRITIEVNRDLRELSGKTAQEQAQLIGQQLANFKSVEKKLTEAYAGLGVRVDPGLIRKGRIAEDLGWTCPYTGQPYDALDLLHRRVDKDHIIPRSERASDSLDSLVITFAEVNKWKGQRTARRFIEEEQGKPVPGLPQLSLRTPAAYQQAVEKLECFKGHENDQRRKRNRKRLLLLRHYVEKEFTPADLTQTSQLVRLCAQALQRLCLGRARPPVVTALPGAVTAAVRKAWNLTGCLALANPLALNPDDPDDHGRPLPHKKTELRKITHLHHALDACVLALAAHLLPRDGEAWRLLLKRRLAPDEQRRARQLLGRVAAITPQGELRLNDLPPALKEQVSRRLRERRVVQHIPADLSGLRCEETVWRVFDPADPHPNARRLARWLANKNIPIPAPDAPTVLIISRKRNGADAAPAAGKVFHQTPTWRWVYEIKDKTALLGLAPEGDPAAAKLKRLKAVKVLGDNFGLALDPEPALIRPHKIWHQLAALRARNGGKPPRVLRKGTLIRVNQKSARSDYRGTWRVRGVQLNQRAGYLVDLSPPDQIHYVRQRGSFRNVSVATLLKCGLEILKTPLSGVAAPP

SEQ ID NO: 6853 - protein, 1164 aa, synthetic construct
  REGION 1..1164: note = Synthetic
MSVHVAIVSLQLIIKGVEYGRGADPTMGGSEVGTVPVTWRLGVDVGERSIGLAAVSYEEDKPKEILAAVSWIHDGGVGDERSGASRLALRGMARRARRLRRFRRARLRDLDMLLSELGWTPLPDKNVSPVDAWLARKRLAEEYVVDETERRRLLGYAVSHMARHRGWRNPWTTIKDLKNLPQPSDSWERTRESLEARYSVSLEPGTVGQWAGYLLQRAPGIRLNPTQQSAGRRAELSNATAFETRLRQEDVLWELRCIADVQGLPEDVVSNVIDAVFCQKRPSVPAERIGRDPLDPSQLRASRACLEFQEYRIVAAVANLRIRDGSGSRPLSLEERNAVIEALLAQTERSLTWSDIALEILKLPNESDLTSVPEEDGPSSLAYSQFAPFDETSARIAEFIAKNRRKIPTFAQWWQEQDRTSRSDLVAALADNSIAGEEEQELLVHLPDAELEALEGLALPSGRVAYSRLTLSGLTRVMRDDGVDVHNARKTCFGVDDNWRPPLPALHEATGHPVVDRNLAILRKFLSSATMRWGPPQSIVVELARGASESRERQAEEEAARRAHRKANDRIRAELRASGLSDPSPADLVRARLLELYDCHCMYCGAPISWENSELDHIVPRTDGGSNRHENLAITCGACNKEKGRRPFASWAETSNRVQLRDVIDRVQKLKYSGNMYWTRDEFSRYKKSVVARLKRRTSDPEVIQSIESTGYAAVALRDRLLSYGEKNGVAQVAVFRGGVTAEARRWLDISIERLFSRVAIFAQSTSTKRLDRRHHAVDAVVLTTLTPGVAKTLADARSRRVSAEFWRRPSDVNRHSTEEPQSPAYRQWKESCSGLGDLLISTAARDSIAVAAPLRLRPTGALHEETLRAFSEHTVGAAWKGAELRRIVEPEVYAAFLALTDPGGRFLKVSPSEDVLPADENRHIVLSDRVLGPRDRVKLFPDDRGSIRVRGGAAYIASFHHARVFRWGSSHSPSFALLRVSLADLAVAGLLRDGVDVFTAELPPWTPAWRYASIALVKAVESGDAKQVGWLVPGDELDFGPEGVTTAAGDLSMFLKYFPERHWVVTGFEDDKRINLKPAFLSAEQAEVLRTERSDRPDTLTEAGEILAQFFPRCWRATVAKVLCHPGLTVIRRTALGQPRWRRGHLPYSWRPWSADPWSGGTP

SEQ ID NO: 6854 - protein, 1083 aa, synthetic construct
  REGION 1..1083: note = Synthetic
METALELRFAFDLGTNSIGWAVYQLGERTNSLGQKETDVPVQLVDLGANLFSDGRAPNTGESLAALRRVPRGARRRRDRYLQRRKHVLNLLQQHQFLPTDENELARILRADPYPIRATAAEREVSLYELGRALFHLSQRRGFKSNRKAPAGDEETSGKIATAAQNLQERLHKNGYLTLGQFLAARQSNPNARLRQTTRVRLSGAGVQSNYEFYPLREMVEAEFNVLWNTQSAFHAALTDEVQDVLRHAIFFQRPLAPVEPGRCTFFPDELRLSDATEAAQEFRIYQMVNNLRIIYQRSERCLSLEERDRIADVLVAGETLTWTKVRKLLGIDSSHLLNLQEGGEKELKGNRVANLMQGTKKKPGPFRDEWHTLSEIERREVIACLKEADNDEEVVAWAQTHLCCDEDKARLLAAVRLPDDYRRLSEKAVDMILDRLKTEVITYAEAVEQCGLHHSDLGGGEHYQRLPPYNKIPSLQRFLGRSTGDPDDPPDLRFGRIANPTVHIGLNQLRRTCNALIDRYGTPSQIVVELARELKQSEKQKKVTQNRIKENREKNDERRERLVELKQIEPDQKRIGETLLRLQLWDELGDLPRLCPYTGQPISITSLFSSNIEIEHILPFSRTLDNSPANKTVAFRKANRLKANLSPSEAATRHPDVIDRKAMQDRVRLSGMPANKRWRFEDDAMERYENEEQFLARQLNETQYLSRLARAFLSTLFASKDETGHGRQNVWVVPGRMTSLLRNRYAVNLGTSNRKSRDDHRHHAIDAAVIGVLDRSLIQRIASISAKREADGVDRLLADLEPPYPAFREQILNRVNTIHVSNRARHLNESPDSHHTSGKLHEETYYGIVKDLPENEEALSLGNVVRRKSVVSLTVPEISQIRDGKLRGELQKVAEIDPETRKTELTKKAVEQKLVVWSEQRGIYRIRVMKKKSTVIPIASRKTGEPYKAVVPDENAYFDIYKDNAGKWYGIAVNSFHANQKGVDSELTEGVFIMRVYKGDYLQLRDLETGFNAIKRVTQIKAASNLLVLVGANEAGNIQQRHDDDDDELRKDFANIAKLKSRAARRVRFTNAGRMKTVPHGKI

SEQ ID NO: 6855 - protein, 1012 aa, synthetic construct
  REGION 1..1012: note = Synthetic
MGKIVGIDAGTNSLGWVVFDEPSNPNADRKILAAGVRIFPSVIDPKKKTPLNAERRTFRGQRRNIYRRGQRLRNLKKLLEKELGASPDPALNPYQLRKDAIERQLDSVELATALFHLGHRRGFQSNRKTLQQKYKIKSNEVEDPEAVLAEQTEDKEEGKKLAKKLKELREKSAGKLLGQYFHSIFGRERIRGSVKHRDDLRKEFEQIWIAQRLTNGKFKQCLEDLLFGQRPLKSQRGLIGKCAFEPDQTRSPKCMPLFQEFNIWKTVNNLRATQNYRDVPIMPEQRQKLAEELMTKPSLSWAAVRKLLGHPKDTTYNLEKPNKNDLPGNKTAVEMIKIMGEKRWNDLSFLQRNQLVHKIRSTNNKRKLEKSLRFHWKFPQEIAGKLALHIFPDGYGNLSRKAMEKMLPHLQHGLNEHDAAQAAGYKRRDQIIIDAQARLPMPPDLRNPTLNKALVETRKLVNAIIREHGKPDLIRIEFARELKLGRKALKAIDDSIKKNEDANKEADKFYAELGHPIVSRTDRIKYRLWKECGEKCPYTLRQINASDLTNGNVHIEHIIPFGRSWDDSFNNKTLAFAEVNQLKGDRTPFEAFGGTNKWNDLIENMRQNQKFGMKKHKVNLFCRETFDEEQFQNRQLSDTGYIAVAVREYLEQLGVEVQTVSGKATAWLRHKWGLNTILNPEGKDEKTREDHRHHMIDAAVVALTTPAITKRISDIAKLEMEKVESINKLNVPQWPSLRSSLERLVENCIVSHAPKRDISGGLHDPNPYAKKQYGAEEKYSIRKPISAMSKGEIEALADGMLKKKLIQAISNQAGIDWAKLEGDAYKKALKSLLGEDETFRYRDKIGQRELTARRARILKSEGEETFIKMGRKKDDSPRWYPIGDYHHVEILECLNDCTVDGKKYKKGQRRGAFVSTWEAVHRVRRDKKALVQRDHGPNWRFIMSLCKGDLIEMEGDKAGLYKVAVLERTNHRICLKVHSDGSLKRPFNISINQLKASKVTIDPLGRKYPAND

SEQ ID NO: 6856 - protein, 1027 aa, synthetic construct
  REGION 1..1027: note = Synthetic
MSLPMFIRKPEGYYVLGIDLGVASVGLALIETRFGEICHSSVRIFSEGMTGSEKDWENGKEVSNATVRREARGQRRQTERRKRRIKKVFHLLRSYDWLPDVSGPNIQDALNALDLELANRYGQHHNLPYFLRARGLDEKLSLTELGRAIYHLAQRRGFLSNRKLAPKKDDDMGKVYAGIDSLREEVSSSGKRTLGEYFASLDPEEQKIRGRYTYRDMYVQEFQHLWAAQQNHHPEELTAVRQATLFRALFFQRPLKDQSHLIGHCDLEEKEQRAPMYLLSVQRYRFLTALNNLRLAGPGAVSREISADERQAIIEKLGQCAKLSFTEIRKMLGVPKTFKFSIEEGGETKIPGNLTASLIYGVCPALWTGLDQASRDRLVDVLKRLESVESLDDRALALRNHWDVSDDEIDKLLSLKLPSEYASISLRAINRLLPLLEEGLTFAAAKHQLYPETDNCQVESFLPQVKDVFREIRNPAVLRSLSEMRKCVNAYIRHFGKPDEIHIELARDLRRSKGDRAAMTKEIRQNELARKKAYAALIENGIPNPSRWEVEKFLLWEECRRECPYSGKAISFHSLFVEQQFEVEHIIPYSRCLDDSRANRTLAHVEYNRIKGNRTPVEAFCGREDWPEMKGRFARFARTAKLRRFLMTETDAAELLKDFTERQLNDTKYASKLAAKYLARLYGGKSDETGMRVLSCAGKVTSALRRVWDMNRVLNVVPEKSRDDHRHHAVDAVAIALCSSKWIKALSDASAKTLHRRPLRSALLADPWPGFRDDLNQKIHEQTPVSHRPKRKLSAALHGDTIYSRPQIHNGKAVFHLRKPVFNLESEADIGKIVDPVIRECVREKFLEVGRDAKRLEHDVPRMRSGVPIRTVRVRQTSVSAVALGTGAAKRYVNLGGNHHMEMIAILDDDCKETGYEASVVSYLEANQRKRRAEPIVKRDHGLNRRFLFSLSAGDIVQYGRNGQTLGFWLVRGVTTDQKGRLDLCRLTDARIKSEQERERPTAAAFLKAKGRKVNIAPIGTWTYAND

SEQ ID NO: 6857 - protein, 1137 aa, synthetic construct
  REGION 1..1137: note = Synthetic
LTDYVLGLDIGTTSCSAVAVAVDEDMNPVGILGDRTRIFSPPYTHEKSGFISKTATRRQHKKQRRQIDRRAYRKLSLVKWLEANNITTSTDMAAVCCTPKLRAMAAEEKISLPELGVVLLRIAKHRGYKGTLSNADGVVSKQNQALQTHLDDLEISNPTIGQLLYHFNKQGCSTLLVKHGLAALREQYEDEVRQIMAVQCRHYPQLNGLTKPLVKHLFFQNPLQPTEQLVGQCGIDALHQRALVASSEYQAYRICKTARDLRWVFGKNKVKLSAIQRDAIIQLLQTPEALSESGKITYAEIRQHLDQRGLSEGFSGYHFSHERSKTSACIGDTTLKALDKLGLLTQWQHLSQNNMNRVLRLLSDDTFHQLADDATNVRDYLSKTKPYAKLAYKDHSEWQGLLDFVLQLIAVIPNPTLRNCGLESGRGSYCTKVLSSLTNYLLMYPDEPERHAEAYLKYQLFECSEGVEQQEIEEHWQELKAIKQQDHNDLLRYVEELIEQSKTKWSTWKDYPLPVRTGNPVVDRALRQTGYVVRSMLAQFGQPKRIIIETVRELSFSLKQRDAWEQRQQANERLNNAASRALIERNEQASPRNIKRFKLWQEQRFNCPYCPRPISFEEALNGSQTNFEHIQSKRETGIGLQMHELALAHRDCNQLKGDRWPMTAFASDAQRMKALHDMIEHFRANTGSWYSKHKADLLAFEPLGDLVRPEVHDDSVTWAKAQMQATGWIARALNQWLRPSKIQLFFTKGSLTNKLRNAWGLGDVIPKVRISEGRAVWKVITDKSGNNVNALITNDEFEEHLKAKQRLRSSKLFNHDGNESKILRIDKRVDHRHHAIDALVVALSSPSLYQAYRKATLFKKAFKPGLPYSSFLADAEELVIGCNLHHTPDKNPPKEFFKEEPCAVVGDYLAHRKPVRFFADAKNIQDLEKKLEIIVSERTRELFYQHIASRCRQLKYPLDAETRLPVGLTKAQISSLFTVEGTAENSQYGVVDTSYGNQNLIKHAQCYRMTGAYKAKAASAYIIQTKQNDQWHKHAWQVDKNACLLFDRDNINQSKVLTCIEYHSMKTPPHDRCVFIGDTVTFDGRDMLVHQLSAFDNNMLVVDTVEASCMEELNRCKGTRSAPVKVGKTRFKDLVRK

SEQ ID NO: 6858 - protein, 1063 aa, synthetic construct
  REGION 1..1063: note = Synthetic
MDVKRVLGLDLGEGSVGWALLEIGEDGWPVAIQAGARIFSPVINPKNKTPLNRERRAKRGARRNRERRRRRLAKLHNTLVGAGLLPADPKERMRVLGGAEASADARWLDPYALRAKALDEPLEPFELGRVLAHLAQRRGFLSNKKTRLVELMEADGNRNILAEEENVQEEQDEAATAEERKETSETLQAISDLQAAIAANGCRTLGEYLHGAKESGEKVRCRRTSRSMYVEELDAIWSAQRPFHEGALTNELYDAVYKAVFHQRPLRGARSKQPRKQWPRGEEARKMYRRLRGNCPHYPDRPVARQGHWVSQRFRILQDLRNLELLDNSTGEVRRLTDEEVATIAQKAQEREKMTWAGVRKEIGYGGSKGKFVNFEGREGAKKELKGNSTERFLKQVLGDKWDSSLVLDPDVERRQLDLMHDIETAPNKLTLVKNLQKPKPSNPIYPLSREQAIAIAGKNFGDRTVAFSVRAMRRMYKLMLSEGRDYFAARKEAFAHGEESDAQVVRETLDVPPDVPNPRIQRALFETRKVVNAIIEQFGKPDEIIVELAREMRESEADRKKRLKAIKRNEGENDAAREFYKRHGIEHPNREQIRRYKLWKEQNETCPYTGRSISVAELLSEATEVDHLLPLPLSADDSFSNLVLTHRDTNRDKDNRLLCEWLNEEQYAEAIRRIEASGNRARAKRARMKEIPEGFAEGQIVTTAYLSRLAGEYLKTLGVPVQVTNGRATSILRRWMGLNGLLPLRETKKKLPESEKNRLDHRHHAVDAVVVALTDRSRYIQALRDFRKIASLDEAERAPEALRHMVQGVVDSMIASHDVDKGIRGALHEETYFGRVEYKGEEHYVKRAFIRDLVSKGSLEDTLKQVQKIVDDDLRQRVEKHFRAFGNRVADAIAEDGTITVEDGAGNDMRIESVRIRERRTTKLHDFKDGRYAVYGNNHHIEIVRRKDGTLGARAVTMLEAARYARPPNRRSPYGLTVRDGEELVMCLAENEMVRLADGRVYRVAGTSSTSGFEITLRDPNDARTGSEKGRDRITSPRRLTEIQGVVRVSVLGHIQDGTPDR

SEQ ID NO: 6859 - protein, 1153 aa, synthetic construct
  REGION 1..1153: note = Synthetic
MHLTTLGLDIGSNSVGSAWIDLKNKRIKLGGSVFPAGVEDSDTKRGAPKNQARRGYRSQARITKRRAERKHQMRRFLLERGWMPSEKEQEAKWLEKSDPWILRKEGLERELTEHEFGRVLLHMSQRRGAYGFDIDEENEDAGKVKDAINQTQKTMEQYKVRTFGELMAIKLKERRTEVGRKHKKIAAPIRNRTKASGEGTYEFCADRSMIWEEFHKLWEMQKSFTGELAKQLTDEDRKALDDSEGDATWRCKGILFGQRKTYWDVGTMARCDLEPTDMKCPKADMYAQDFLVLETVNNIRITPRGELKRPLEEEERKEVIAVLEKQKTASEGTVRKALGIDRGVKKTMYTLSLEKDPKRGLNTNWFKREIVTAIGREEWAKFDAKKQQSINKAILKFDPQLKKDQQRLREGCFRWWEFKDEQTEKFIEAWRERPKVDTRINYSRKAIINLLPYMREGFTVNEARNRFAEDAENGASDAQRQRYSFGARAGNRRVRHYMQKHPELLPPAPENISNPVVRRAIHEVRRHIQAYIHEFGCKPKRVVVELAREARQSEYVRNRQLSENRKREEKRKEIIEKFDLAGETKTQQAKAVKRVLLSREQKYWCAYCDNNRDTISEELAASGEGVELDHIVPESRGGNSYLSNLVLCHSECNRGKGNRTPKEWLTVEEFVRLEQRLKHLERDNKVKWDNLHEEVPDLDGFVESQLTDTAYAARQVVAWLERTLYGDKNDGKRRVFTTKGRYTAILRRDWGLLPDKTGGGDKEGKNRADHRHHAIDAVIIALSGPERLSQLAKAAEAVEKEEVARREPIVVPWGNFDSFRADVMKEWKKLVVSHRPERRKIAGSLHKDTQFGPVVDKNGRLTGEFTIRKFAMSLKPSHLRVPKGWEELRAKLDRCTTKRQRRKIRARMLALPDVSGGKSGLIRDRWFREELRNALRREGLNPDSFTDTQMKMLVKNKGLILDSGVPIRRVTLVRRPTIVEIKRKRWNPSTGKMEYVENVRSRRYYEPQNNHHVEIRENNKGRWIGQPVTNFDASKRVRPSKISGNKTQSAVNRGDTKDGKFIMSLSIGEMVYMKHPETGIADYFVVFKIDGNGYIHFTPHTDAGRAKETDKFPAREDIRLLAAQLQTLDAQEGKGPQKVWIGPLGDQKILARD

SEQ ID NO: 6860 - protein, 1172 aa, synthetic construct
  REGION 1..1172: note = Synthetic
MKLLGLDIGSNSVGSAWVDTDKKLLEMGVGVFPAGVEESETKRGAPKNQARRGHRSQRRSIERRADRKHKMRMFLAERVWIDPDEKKWMGLNPWILRRDGLNRKLSPYEFGRILLHLAQRRGAWWFDDAPEETAKDVEENEEEKAAEAKDKEAKKIKGAIEQTKKEIGKSGARTFGELMAIKFEEQRKIVGRENKQIGLPIRNRTTASGEGTYEFCADREMIWEEFDKLWNKQKSFGGDLAVQLTDECRKKLDDPSEDAAWRYKGILFGQRKTYWDIGTMGRCDLEPTDQKCSKADMYAQEFLVLETLNNIMITPPGELKRHLNDDERKKVLSLLKTEENVTESKVRKALGLHKGENKTLYTLSLEKDPKRGLNTWWFYREIIAGAIGEAVWERISAEQKESINKAILKFDPIEEKDKETLAEGCRKWWGFNEKQTERFLEAWNKRPKVDDRVEYSRRAIKNLLPYMREGFTVNKARKRFCEDADNNATLEQRERYSFYGGRANHRTRQYLEKHPDLLPPAPEDISNPVVRKAIHEVRSHIQEWIRKFGCKPDRVVVELVREARQSAIVRNKQLAENRQREKDRKKIIEDYNLSQLTRTQQNRAVDRVRLCREQRNMCAYSEQTITESMAAKGDGLEIDHIIPESRGGNSYLSNLLLCFDGTNRGKVNKTPKEWLIDEDFRRLEQRLGHLKKENKVKWDNLHSDAPDIDKFTDSQLTDTAYASRQVAEWLRAVLYDGEKDRVRKVFTTKGRYTNWLRRDWQLFPDGTNAWTIEKDRGDHRHHALDALVVALSLEHLQPLAWALEKCEQAKAEGKAIPRREPLPPPWGPVESFRKQVMERYEKMIVSHRAARRRLAGELHKDEHFGPISGDTEHFTKRIFAVELTPNHLRVPKGWEELREKLEQTTSKAEKRYILSQMLSIEDAKPEKSGIVRDRWFREELRDCLRRNGFDPDSFGEDKESKKRFKELVKSKGLLLKSGVPVRRIMLLRTLGEPVEIKRKRFNVLTGKMEEDVDPQSERQRLRVYDSQNNHHIEIRENKKGRWIGDVITNWKAALRVRPPKSSGEQPQLAVDRSNNEKGRFVMSLSIGEMVYMKHPETCKPDYFVVFKIDGTDTIHFTGHRDAGRDKATEKCTKREDIHLSPAQLQKLGVPPANQPQKVWVGPLGDVKVLNRD

SEQ ID NO: 6861 - protein, 1246 aa, synthetic construct
  REGION 1..1246: note = Synthetic
VLRRSPEGRCLRIFHLVVKNTQAWISYNIDTDSLLPYVCQHNFPRKSTKLKIQEVMMSGITLGLDIGTNSVGSAWIDTQHRIIQLGASVFPAGIEESDQKRGAPKNQARRGFRQRRRNVDRKADRKHHLRKFLMSKGWIPKDIIELQRGTELNPWILRRDGLERELSPYEFGRILLHMIQRRGAFGFIDEQDFCDTEQDNDTQTEKEDNSNDKEQKIKGAIDQTKKEMRKLGIETFGHFIAVKYEERKHKINKGSARETEIRFPVRNRTTATGEGTYEYCADRDMIWNEFDKLWKKQKSFQSTLSEQLTTEVRKELDDPSSDATWRYKGLLFGQRKTYWDMGTLGRCSLEPTDMRCPKADMYAQEFLALETVNNIRIIPLNEPARRLNSDERALVLKALRLQKTASEGTIRKALKIHTAEKKRLFSLSLDQDAQRDLNTDWFYREIISGAIGETAWKGLIPEKKESINQAILKHDPKEEKDKVRFTQGCKTWWDLDDEQTQRLIAAWQKRPNIDKRVNFSRRAILNLLPYLREGWTVNEARKLFAEDADNGASDEQRKRYGFKESITNRAMRRYIQKHPDLLPPAPQEISNPVVRKAIHEVRRHINEYIRKFGKKPDRVIVELAREARQSAKVCNQMLAKNRKQEKIKKEIIETYDSYIREHYKKKYGVDNLTHNQQENAIRRVLLCREQKGVCPYSDTARNITERMAAIGEGLEIDHIIPRSRGGNSTLNNLVLCFDGTNRGKGNKTPQEWLTKEDFAKLEQRMAHLKKENPTKWENLHKEVTDIQGFVNSQLTDTAYASRQVANWLKDVLYDGERDGVRRVFTTKGVYTSIIRKDWQLFLNGSDEPKFQKDRSDHRHHALDALAVAFCGPEMIQKVACVAQKREMAKSEGNYLGKRIPFDPPWGDHDSFRQQVMAEVDKLIVAHRPESRKITGALHNDTQYGPVVEDGKRLSHCTIRKSVAQLSPNHLRVPDGWEHLRIEMENAPTKAFAKAVRSEMLKLPDVTPGKSGIIRDRWFREELREYLRCNNLDPDNFTAKQIQELVKNKGVFLRSGVPVRRITLLRSPTVREIQRKRWNDATGMMEYYPEEEKNALRLYEPQNNHHIEIRENEKGKWVGNVVTNFEAAKRVRPPKSSGLAPQPAVNRDDMEHGKFVMSLSIGEMVYMKHPKTGKPGYFSVFKIDSTNTVHFTPHWDAGRSKATDSCTAREDIALSLNNFSKMGVEADMRPQKVWVSPLGEVKFLVRD

SEQ ID NO: 6862 - protein, 1156 aa, synthetic construct
  REGION 1..1156: note = Synthetic
MKLLGLDIGSNSVGSVWVDTDKKLIQMGDSVFPAGIEESDTKRGAPKNQARRGKRSQRRSIERRAERTHQIRAFLLKRGWMPSDGEREKKWLEESNPWVLRKEGLYRELTQYEFGRVILHLVQRRGSYGFGVDEEEEDAGKIKDAISNTRKAMKDAGAETFGEFMAMKFEERKREIGIRGKMVRGAIRNRTKATGDGTYEFCADRDLIWEEFDNLWKKQKSFGGELSKQLSDECRRELDNPESDATWRYKGILFGQRKTYWDVGTMARCDLEPTDMKCPKADMHAQEFLVLETVNNIRITAKGELKRALTREEQEKVIGALEKQKTASEATIRKAMGIDKGEKKGDYTLNLEKDPKRGLNTNWFCREIIGAIVVETWESMDDRKRESINKAILKFDPQEKNDVKQLTEGCRKWWAFDEGQIERFIEGWKKRPKVDDRVNYSRKAIRNLLPYMREGFTVNEARQRFAEDATNGASDAQRERYSFGARAGNRRVRRYMEKHADLLPPAPKDISNPVVRKAIHEVRRHIQAYIRKFGCKPERVVVELAREARQSAVVRNRQLAENRSREAKRRDVVEEIRKYVNWEELSKTQQEKAVKRVLLCKVQKYHCAYCDNDNDTITDGLAAKGEGVELDHIVPESRGGDNGLNNLVICHTKCNRGKGNRTPREWFTEEQFSRLEHRLGHLKQENETKWDNLHKEVPDLNGFVESQLTDTAYAARQVVGWLEKTLYADRNDGKRHVFTTKGRYTAILRRDWGLFPGDKGEEATDKNRADHRHHAIDAVVIALSGPERLSQLARAAEAVEIERVGKREPITPPWGDFDSFRGDVVKEWKNLIVAHRPESRKVTGSLHNDTQYGLVVDEKGKSTGEFTVRKFAVALTPNHLRVPKGWEELRVKLEICHSKREQRRICKEMLALPDVAGGKSGLIRDRWFREELRECLRKENLDPDNFSSKQIKDLIKTKGLFLKSGVPVRRVTLIRKPTVIEIKRKRWNPNTGKMEHDPYPRSGRYYEPQNNHHIEIRENKKGKWIGEVITTFEAAQRVRPSNSSMRRPQSAVNHEDTKDGRFVMSLSIGEMVYMKHPETGKADYFVVFKIDGTGAVHFAPHWDAGRAEAKEKYPAREDVNGGLTAGQLQELGAEQGKGPQKVWVGPLGDVKVLHRD

SEQ ID NO: 6863 - protein, 1220 aa, synthetic construct
  REGION 1..1220: note = Synthetic
MRLLGLDIGTNSVGSAWVDTDARTITTGVSIFPAGVEESEDKRGAPKNQARRGHRSQRRSIERRADRKHRMRGFLLEKGWMPADPQEQKEWLERLNPWILRAEVLQRELEPHEFGRVLLHMAQHRGAYGLDNEENNPRSEKEKGNGAKGQESDEKKAKEQKQMTEAIDRTRQRMSECNAETFGELVAIEFHNRRVQVEKNDKDGKKLEIRSAVRNRTKASGEGTYDLCADRSMIWEEFDRLWKVQQSFGGTLAIQLTPDCRKELDDPHGDPHWEHNATWRYRGILFGQRKTYWDMRTLGRCDLEPTDRQCPRADMYAQEFLVLETVNNIRITPPGELRRPLTKAEREAVIKKLEAQKTASMATVREALGIHRGLKKTQYTLSLEADPERGLNTNWFQREIVNGAIGEEKWQAMPPSTKESVNRAILKFEPESPKDRETLHRGCRTWRGWELDEQKVSRLILAWTKRPKADSRVNYSRRAIQNLLPYMRDGLTVNEARKALVEDATNGATNEQRERYGFKNSKANRAMRRYQDKHPDLLPPAPPMLSNPVVRKAIYEVRDHIQAYMRKSGCKPNRIVIELARDAYLPAVVRNKQLHENREREKKRKAIVEQHNLSQLSRTQQEKAVKRVLLCREQKDQCAYCGNGNNTVSEKAAAEGNGVEVDHIIPESRGGDSGLNNLVLCHTDCNRGKGNKTPREWLTQDEFGKVEQRLRHLKNENPVKWDNLHKEVKDLEGFVASQLTDTAYAAKQVAEWLRAVLYDGEKDGVRHVFTTKGRYTAWLRRDWGLFPDRKAEIPERNDASKESALPRHESESKTKNRSDHRQHAIDAVAIALTSPERLKELAMAIKRWELAKADGRAAPEREPLDPPWADFDSFRAQVMAEWDRIIVSHRPQRRRIAGQLHKDEHFGAIAGDEKHFTKRIFAAELKANHLRVPKGWEELRLLLEKAPARAQQRTIRNKMLALEDVPPTKSGIVRDRWFREELRECLRRNGFDPDDLSKDNQSAKKYKDWVKQKGLVLENGVPVRRIKLLCTLSKPVEIERQRFNLVTGKMEKDVDPRSEKDSRFERRRLRVYESRNNHHIEIRENQKGKWVGEVIPNWQAARRVRPSKESAEEPRPAVDRSDNKQGRFVMSLSIGEIIHMLHPNTKRPGYFVVFKIDATKTVHFTRHFDAGRDKATDKAPAREDIPVTPADLQRLGIPPESHPQKVWVGPLGDLKVLVRD

SEQ ID NO: 6864 - protein, 1226 aa, synthetic construct
  REGION 1..1226: note = Synthetic
MQKELGIDLGTNSLGWGIVESNTVKDCGVLVFEQGIPQEKGREAALSPAAERTAFRAARRLKFRRRLRKYHTLKILIEQGMCPLALEELNRWIRQGVFPRGNENFIHWLNSTKERNPYYFRAHAATEKIPLPDLGRAFFHIALRRGFKSSKKDQEKEDSPEMQSSEMKGKIRELKLKLESSGITLGQYLYERFQCEKKIRKEIRCGRKEHYEPEFERICDVQEIDPEVRKALHTAIFMQRPLRSQKHRVGKCPLEKRHSRCLISHPLFERYRMLSFINSIKVKNVGDKEFRFLTDAERRLAETVFMVSAPSFKVERILHKLFPEIGKKNYEGPRSEINYRPDHTVASASVTHQLSKILKCNDLFAWRHSYVTRHGKEAVMDVQALFDGLYYFSHIYDEDDDDKAALKFASERVGLSEDAAAALIKIKIPDGYARYSLCAIRKIMPFLEMGYVERHAVFLAKLPDIMGECFENRKEELLHDFQQCVNDYVWEKENLSRREHVQGRLLSLTERLRNMLEEKWKIMPPEFEKLYSYQENSNYQDCSKEGILPRIELGMIYNPVVHRSLTVLRHLVNHLRRCGKIDADTEIHVELTREVNDKNHRLAYLDWQKKNEGERAQAVKAFEEYGISNPTETQILRWCLWEEQGHRCLYTGRKIEAGEIFSPTADSVDIEHTIPRSRGGDNSRENLTLCDSQFNRHEKVGKLPSECDNYHQPNGILENLKSCIQPKLEEAEVAYSKASAAARKATGIQRANARKKMLYLRFALDYWRTKVKTFNLAADEINEDFTLRQLSATGVMTRHALQFLKSVYSRVFANSGKITKFARESWGVQNQDEAKDRSDHIHHAVDAIVVAALNRKTLARISAAYHECEELMQGRGALKIAYPWESFPEDVRNAVNQILVRHIVQRNEMKQTKRNGVFLTSPVKLPDGRVIRRVPAAGDTVRGALHNQTWYGCIRQNGAEKFVVRKPFDSNEFKQLKDLEKIVDPGVKNALLEQIRNSGMDFKTAMQQEFRMKTKTGKFDGPVIRRVRIFCSMQEPLKIKEQTYCSEKTYKNYYYAETAKGSNFMVALYRKPEIPGTEKTYEYRLISLWNWAKEHRQSGFVPYERREKNLDFIGFIAPGTMALFYEKSPEELHALPKSELQKRLYKITEFEKDGERLRLHLRWHREAREKGKATEAMEIMQMKSSVVSYDIPAFLLRISQKSYQNHLLFDGIDFEFTADGEIIFRE

SEQ ID NO: 6865 - protein, 1230 aa, synthetic construct
  REGION 1..1230: note = Synthetic
MQKVLGLDLGTNSLGWGIIENNTVRDCGVLAFEQGIPQEKERKAALSPAAERTAFRAARRLKFRRRLRKYHTLKILIEQGMCPLALDELNRWIRQGIFPRGNKNFIHWLNSTKERNPYYFRAHAATEKIPLPDLGRAFFHIALRRGFKSSKKNQEKEESSELQSSEIKGKIRELKLKLESSGITLGQYLYECFQSEKKIRKEIRCGRKEHYEPEFERICDVQGIDPEVRKALHNAIFMQRPLRSQKHLVGKCPLEKYYSRCLISHPLFERYRMLSFINSIKIKTVEDQEFRFLTDTERKRVESVFMVSAPSFKFEKILHKLFPETGKKNYTGPCPEMNYRSDQTVASASITHQLCKILNCDDLFVWRHSYVTRHGKAAEMDIQTLFDGLHYFTSIYDEDDDDKAFRKFALDRVGLSEDAAVALIKLKIPDGYAKYSLCAIRKIMPFLEMGYVERHAVFLAKLPELMGTCFESRKEELLQDFQQCLNNYTWEKENLSRREQVQGRLLSLTERLRNMLEEKWKIMPAEFEKLYNYQENSNYQDCSGEGILPRIELGMVYNPVVQRSLPVLRHLVNHLRRCGKIDAETEIHVELAREVNDKNHRLAYMEWQKMNEEERAQAVKAFGEYGISNPTENQILRWRLWKEQACRCLYTGRKIEAEEIFSQTSDSVDIEHTIPRSRGGDNSRENQTLCDSWFNRHEKIGKLPSECDNYRQPDGILDNLRSSGFLERLEEAETAYNKASAAVRKSVGVHRAAARQKMLRLRFALDYWRTKVKTFMLAADEVNEEFALRQLSATGVMTRHALQFLKSVYPRVFANSGKITSFARESWGLQNQDEAKDRSDHIHHAVDAIVVAALNRKTLARISAAYHECEELMQGRNALKIAYPWESFPEDVHSAVNQILVRHLVRHNEMKQTKQNRVFLVNPVRLPDGRVIRRVPASGDTVRGALHNQTWYGCIRQNDVEKFVVRKPFDLSNFKKLEDLEKIVDPGVKNALLEQIRNSGVEFKTAMQQEFRMKTRTGKFDGPVIRRVRISCSMQEPLKIKEQTYCSEKAYKNYYYAETAKGSNFMVALYRKPDIPRTEKTYEYRLISLWNWAKEHRQPGFVPYEQREKNLDFIGFIAPGTMVLFYEKSPEELHGMPKSELQKRLYKITRFEKGQNNRLLLHLRWHREAREKGKVESTMKEMYGSETKSVVSYDKPYLLLRLSPVNYQNHLLLDGIDFEFTVDGEIIFKE

SEQ ID NO: 6866 - protein, 1119 aa, synthetic construct
  REGION 1..1119: note = Synthetic
MQNITFSFDVGYASIGWAVVQAPAQPEQDPGIVACGTVLFPSDDCQAFQRRNYRRLRRNIRSRRVRIERIGKLLVQAGILTPEEKATPGHPAPFFLAAQAWQGIRQLSPLEVWHILRWYAHNRGYDNNAAWATVSTKEDTEKVNNARHLMQKFGAETMCATLCHAMELDMDVPDAAMTVSTPAYRTLNSAFPRDVVQREVLDILRHSASHIKELTPEIIRLIAQQEDLSTEQRSELAAKGIRLARRYRGSLLFGQLLPRFDNRIIRRCPIIWAHTFEQAKTSGMSEKEAQALADKVAKVPTADCPEFYAYRFARILNNLRANGLPLPVEVRCELMQAARAEGKLTAAKIKKEIMRLMGDVESNIDHYFHLHPDSEEALILDPAMECLHRTGLYDALSSVVRRVALTRLRRGKICTPAYLRDMMLRHGEDTQALDLAIAKQQGRKAPRPRKNDTDASADASIAWQDKPLAPKTASGRAPYARPVLRQAVDEIMNGEDPTRPALDEQHPDGEDKPSHGCLYGLLDPASKENEYLNKLPLDALTNNHLVRHRMLILDRLTQDLVREFADGDPSRVERFCIEVGRELSAFSGMTSKQIQSELNERMKHFKSAVAYLAKHAPDMATSAGLIRKCRIAMDMNWQCPFTGQTYMPYDLPKLEREHIVPYANRKTDALSALVLTWLAVNKMKGKRTAYQFIKECEGQSVPGRNQNIVSVKQYETFVEKLDTKGHADDAKRKKTRKKLMMVDRLSSQGTNGESELDFTEGMMTQSSHLMKIAARGVRKNFPHATVDMIPGAITGTVRKAWKVAGCLAGICPEAVDPVTHRIQDKETLRRLTHLHHALDACVLGLIPHLIPEHRSGLLRKALAARRLPENVRQEVESAVSKRYYTITKESKLELRDLPTTLKNSIAAKLSEGRVVQHIPADMSGAKLEETIWGIAPGQHIDDNSEVVIRQKSLSIGKDGNRIRTRKTDKQGNPITEKASKLVGIKPTGTSKLQPIRGVIIIKDNFAIALDPVPTMIPHHNVYKRLEELRKLNHGRHVRLLKKGMLIRLSHQKSGDKNGMWKVRSIQDQGSSGLKVNLQRPYYAGKIEDTRTENWKNVSIKALLSQGMEILPTTYCGTTP

SEQ ID NO: 6867 - protein, 1113 aa, synthetic construct
  REGION 1..1113: note = Synthetic
MSRSLTFSFDIGYASIGWAVIESASHDDADPSVCGCGAVVFPKDDCQAFKRREYRRLRRNIRSRRVRIERIGRLLVQAQIITQEMKETPGHPAPFYLASEALKGHRNLAPIELWHVLRWYAHNRGYDNNVSWSGGFSEDGGNKEDTERVQHAKDLMDKHGTATMAETICRELKLEEGKADAPMNVSTPAYKNLNTAFPRLTVEKEVRRILELSAPLIPGLTSEIMELIAQHHPLTTEQRGVLIHYGIKLARRYRGSLLFGQLIPRFDNRIISRCPVTWAQVYEAELKKGNSEQSARERAEKLSKVPTANCPEFYEYRMARILCNIRADGEPLSAEIRRELMNQARQEGKLTKASLEKAISSRLGKETETNVSNYFTLHPDSEEALYLNPAVEVLKRSGIGQILSPSVYRIAANRLRRGKSVTPNYLLNLLKSRGESVEALEKKIEKERHQQANRKKAKKTDPDYAATPLKPRYATGRAPYARPVLKKVVEETLDGEDPTRPARGEAHPDGELKAHDGCLYCLLDADSSVNQYQKERRLDTMTNNHLVRHRMLILDRLLKDLIQDFAGGQKDRISRICVEVGKELTAFSGMDSKKIQTELNLRQKSHTEAVNRLKRELPGKALSANLIRKCRIAMDMNWTCPFTGERYGAHELENMEMEHIVPYSFRQSNALSSLVLTRKEVNKMKGQRTGYDFVEQEQGKPVTGRTNLHICSLNNYREFVEKLDDKKWHEDDRKRKKKRKALLMVRGLSHKHQSQNHEAMKEIGMTEGMMTQSSHLMKLACKSIKTSLPDAHIDMIPGAVTAEVRKAWDVFGVFKELCPEAADPVNGRIIKEDLRSLTHLHHALDACVLGLISEIIPADRKNVLRRAIIKRRLDQKMKQDFLELRKKRYYKLREKDGQTGASLVDLPSGIKENIREKLMEQRVIQHVPADMGGALLKETIQRVLSVDGSGEDAMVSLSKKKDGKKEKNQVKASKLVGVFPEGPSKLKALKAAIEIDGNYGVALDPKPVVIRHIKVFKRIMALKEQNGGKPVRILKKGMLIHLTSSKDPKRTGVWRIASIKDNERGIAIDLQIPHSAVPGAKTHEFNWINVKLDTLLTKYRLEIYPTSYTGTPR

SEQ ID NO: 6868 - protein, 1107 aa, synthetic construct
  REGION 1..1107: note = Synthetic
MISQSLTFSFDIGYASIGWAVLEANPDGSQDADPVVQGCGTVLFQADDCQAFKRRSYRRLRRNIRSRRIRIERIGRLLVQTQIITQNMKDAPGHPAPFYLASEALQEHRVLSPLELWQVLRWYAHNRGYDNNASWSNSSSAVENKEDTEKLRNGHELMKKHGTCSMAETICRELKLEEGKQDAPMSFSTPAYKTLNTAFPRSHVQKEVRQILELSAPQIPGLTPEIIELIVQQELFTTEQRERLLQFGIKLARRYQGGLLFGQLIPRFDNRIIRRCPITWAQIYEAELSLGSSEKQAREKAEKLSKVPSADCQEFYEYRMARILCNLRADDQPLPASLRRQLMKEALKEGKLTKSSLKKIISSQALTENTNIDNYFNLHPDSEEALYLDPAVEVLQRTGIHDVLSPSVKRMALTRLRRGKTCTPRYLLKLMRSHGEPVDQLEAKIEKRRIQQGERKKGKEHVPAGKDWAEEPLLPKCATGRAPYARPVLRKVVEEVLAGEDPSRPARDENHPDGEVKTHHGCLYCLLDPKSKVNEYQRNRSIDSLTNNHLVRHRMMIVERLLKDLIQDFAAGRKERVEKVCIEVARELSSFSGMDSKKIQAELNLRQKSHAMAVERLEKDLPGLALSANLIRKCRIAEDMNWTCPFTLQKYGPHDLDRLELEHIVPYAFRQSNALSSLVLTWKEVNKMKNRRTGYDFVEQCEGSPVPGSNLSICSINNYKTFVNGLDERKWHADDQKRKKKRKALLMVRGLSSKNQAQANIGMTEGMMTQSSHLMKLAARVVSRILPDVSIDMIPGAVTAAVRKSWDVSGCFKELCPELSGKINKQDLRSCTHLHHALDACVLGLIPYIVPAHRNGLLRRVLAMRRLPEELMREVRQIADKRHYILNDDGRIMLKDLPNSVKENIREKLMEQRVIKHIPANMSGASLKETMQRVISIEGNGEDAMVCLRKSSFMVGEDGKRTTVKANKLVGIFPEGSSKLKPLKAAIEIDGNYGVALDPSPVVIRHVRVFKQILALKKKNGGKPVRILKNGMLIRLTSPQDTKREGIWRIASIKDNKVGIALDLQRPHYAGSGSKKHESNWINIRLVTLRTKYHLEIHPTSYTGNPR

SEQ ID NO: 6869 - protein, 668 aa, synthetic construct
  REGION 1..668: note = Synthetic
LARRWKRKQANRKKAKKTDPDYAATPLKPRYATGRAPYARPVLKKVVEEILDGEDPTRPARGEAHPDGELKAHDGCLYCLLDTDSSVNQYQKERRLDTMTNNHLVRHRMLILDRLLKDLIQDFAGGQKDRISRICVEVGKELTAFPGMDSKKIQTELNLRQKSHTEAVNRLKRDLPGKALSANLIRKCRIAMDMNWTCPFTGERYGAHELESMEMEHIVPYSFRQSNALSSLVLTRKEVNKMKGQRTGYDFVEQEQGKPVTGRTNLHICSFNNYREFVEKLDDKKWHEDDRKRKKKRKALLMVRGLSHRHQLQNHDAMKEIGMTEGMMTQSSHLMKLACKSIKTSLPDAHIDMIPGAVTAEVRKAWDVFWVFKELCPEAADPDSGKILKENLRSLTHLHHALDACVLGLIPYIIPAHHNGLLRRVLAMRRIPEKLIPQVRPVANQRHYVLNDDGRMMLRDLSASLKENIREQLMEQRVIQHVPADMGGALLKETMQRVLSVDGSGEDAMVSLSKKKDGKKEKNQVKASKLVGVFPEGPSKLKALKAAIEIDGNYGVALDPKPVVIRHIKVFKRIMALKEQNGGKPVRILKKGMLIHLTSSKDPKHAGVWRIESIQDSKGGVKLDLQRAHCAVPKNKTHECNWREVDLISLLKKYQMKRYPTSYTGTPR

SEQ ID NO: 6870 - protein, 671 aa, synthetic construct
  REGION 1..671: note = Synthetic
LARRWKRKQANRKKAKKTDPDYAATPLKPRYATGRAPYARPVLKKVVEEILDGEDPTRPARGEAHPDGELKAHDGCLYCLLDTDSSVNQHQKERRLDTMTNNHLVRHRMLILDRLLKDLIQDFAGGQKDRISRVCVEVGKELTTFSAMDSKKIQRELTLRQKSHTDAVNRLKRELPGKALSANLIRKCRIAMDMNWTCPFTGATYGTHELENLELEHIVPHSFRQSNALSSLVLTWPGVNRMKGQRTGYDFVEQEQENPVPDKPNLHIRSLNKYRELVEKLDDKKGHEDDRRRKKKRKALLMVRGLSHKHQSQNHEAMKEIGMTEGMMTQSSHLMKLACKSIKTSLPDAHIDMIPGAVTAEVRKAWDVFGVFKELCPEAADPVNGRIIKEDLRSLTHLHHALDACVLGLISEIIPADRKNVLRRAIIKRRLDQKMKQDFLELRKKRYYKLREKAGQTGASLVDLPSGIKENIREKLMEQRVIQHVPADMGGALLKETIQRVLSVDGSGEDAMVSLSKKKDGKKEKNQVKASKLVGVFPEGPSKLKALKAAIEIDGNYGVALDPKPVVIRHIKVFKRIMALKEQNGGKPVRILKKGMLIHLTSSKDPKRTGVWRIASIKDNERGIAIDLQIPHSAVPGAKTHEFNWINVKLDTLLTKYRLEIYPTSYTGTPR

SEQ ID NO: 6871 - protein, 880 aa, synthetic construct
  REGION 1..880: note = Synthetic
VTTKQRGVLLQYGIKLARRYRGSLLFGQLIPRFDNRIISRCPVTWAQVYEAELKKGNSEQSARERAEKLSKVPTANCPEFYEYRMARILCNIRADGEPLSAEIRRELMNQARQEGKLTKASLEKAISSRLGKETETNVSNYFTLHPDSEEALYLNPAVEVLQRSGIGQILSPSVYRIAANRLRRGKSVTPNYLLNLLKSRGESGEALEKKIEKERHQQANRKKAKKTDLDYAATPLKPKYATGRAPYARTVLKKVVEEILDGEDPTRPARREAHPDGELKAHDGCLYCLLDTDSSVNQHQKERRLDTMTNNHLVRHRMLILDRLLKDLIQDFAGGQKDRISRVCVEVGKELTTFSAMDSKKIQRELTLRQKSHTDAVNRLKRELPGKALSANLIRKCRIAMDMNWTCPFTGATYGTHELENLELEHIVPHSFRQSNALSSLVLTWPGVNRMKGQRTGYDFVEQEQENPVPDKPNLHIRSLNKYRELVEKLDDKKGHEDDRRRKKKRKALLMVRGLSHKHQSQNHEAMKEIGMTEGMMTQSSHLMKLACKSIKTSLPDAHIDMIPGAVTAEVRKAWDVFGVFKELCPEAADPVNGRIIKEDLRSLTHLHHALDACVLGLISEIIPADRKNVLRRAIIKRRLDQKMKQDFLELRKKRYYKLREKDGQTGASLVDLPSGIKENIREKLMEQRVIQHVPADMGGALLKETIQRVLSVDGSGEDAMVSLSKKKDGKKEKNQVKASKLVGVFPEGPSKLKALKAAIEIDGNYGVALDPKPVVIRHIKVFKRIMALKEQNGGKPVRILKKGMLIHLTSSKDPKRTGVWRIASIKDNERGIAIDLQIPHSAVPGAKTHEFNWINVKLDTLLTKYRLEIYPTSYTGTPR

SEQ ID NO: 6872 - protein, 888 aa, synthetic construct
  REGION 1..888: note = Synthetic
MSRSLTFSFDIGYASIGWAVIASASHDDADPSVCGCGTVLFPKDDCQAFKRREYRRLRRNIRSRRVRIDRIGRLLVQAQIITPEMKETSGHPAPFYLASEALKGHRTLAPIELWHVLRWYAHNRGYDNNASWSNSLSEDGGNGEDTERVKHAQDLMDKHGTATMAETICRELKLEEGKADAPMNVSTPAYKNLNTAFPRLIVEKEVRRILELSAPLIPGLTSEIMELIAQHHPLTTKQRGVLIHYGIKLARCYRGSLLFGQLIPRFDNRIISRCPVSWAQVYEAELKKGNSEQNARERAEKLSKVPTANCPEFYEYRMARILCNIRADGEPLSAEIRRELMNQARQEGKLTKASLEKAISSRLGETETNVANYFTLHPDSEEALYLDPAVEVLKRSGIGETLSPSVYRLAANRLRRGKSVTPNYLLNLLKSRGESVEALEKKIEKERHQQANRKKAKKTDPDYAATPLKPRYATGRAPYARPVLKKVVEETLDGEDPTRPARGEAHPDGELKAHDGCLYCLLDADSSVNQYQKERRLDTMTNNHLVRHRMLILDRLLKDLIQDFADGQKDRISRICVEVGKELTTFSGMGSKKIQTELNLRQKSHTEAVNKLKRDLPGKALSANLIRKCRIAMDMNWTCPFTGERYGTHELENMEMEHIVPYSFRQSNALSSLVLTRKEVNKMKGQRTGYDFVEQEQGKPVTGRTNLHICSFNNYREFVEKLDDKKWHEDDRKRKKKRKALLMVRGLSHRHQLQNHDAMKEIGMTEGMMTQSSHLMKLACKSIKTSLPDAHIDMIPGAVTAEVRKAWDVFGVFKELCPEAADPDSGKILKENLRSLTHLHHALDACVLGLIPYIIPAHHNGLLRRAPNSGKTDTSSQACCESASLCPE

SEQ ID NO: 6873 - protein, 848 aa, synthetic construct
  REGION 1..848: note = Synthetic
LFGQLIPRFDNRIISCCPVTWAQVYEAELKKGNSEQSARERAEKLSKVPTANCPEFYEYRMARILCNIRADGEPLSAEIRRELMNQARQEGKLTKASLEKAISSRLGKETETNVSNYFTLHPDSEEALYLNPAVEVLQRSGIGQILSPSVYRIAANRLRRGKSVTPNYLLNLLKSRGESGEALEKKIEKESKKKAKKKEADYADTPLKPKYATGRAPYARTVLKKVVEEILDGEDPTRPARGEAHPDGELKAHDGCLYCLLDTDSSVNQYQKERRLDTMTNNHLVRHRMLILDRLLKDLIQDFADGQKDRISRICVEVGKELTTFSAMDSKKIQRELTLRQKSHTDAVNRLKRDLPGKALSANLIRKCRIAMDMNWACPFTGATYGTHELENLELEHIVPHSFRQSNALSSLVLTWPGVNRMKGQRTGYDFVEQEQENPVPDKPNLHICSLNNYRELVEKLDDKKGHEDDRRRKKKRKALLMVRGLSHKHQSQNHEAMKEIGMTEGMMTQSSHLMKLACKSIKTSLPDAHIDMIPGAVTAEVRKAWDVFGVFKELCPEAADPDSGKILKENLRSLTHLHHALDACVLGLIPDIIPAHHNGLLRRVLAMRRIPEKLIPQVRPVANQRHYVLNDDGRMMLRDLSASLKENIREQLMEQRVIQHVPADMGGALLKETMQRVLSVDGSGEDAMVSLSKKKDGKKEKNQVKASKLVGVFPEGPSKLKALKAAIEIDGNYGVALDPKPVVIRHIKVFKRIMALKEQNGGKPVRILKKGMLIHLTSSKDPKHAGVWRIESIQDSKGGVKLDLQRAHCAVPKNKTHECNWREVDLISLLKKYQMKRYPTSYTGTPR

SEQ ID NO: 6874 - protein, 741 aa, synthetic construct
  REGION 1..741: note = Synthetic
MSRSLTFSFDIGYASIGWAVIASVSHDDADPSVCGCGTVLFPKDDCQAFKRREYRRLRRNIRSRRVRIERIGRLLVQAQIITPEMKETSGHPAPFYLASEALKGHRTLAPIELWHVLRWYAHNRGYDNNASWSNSLSEDGGNGEDTERVKHAQDLMDKHGTATMAETICRELKLEEGKADAPMEVSTPAYKNLNTAFPRLIVEKEVRRILELSAPLIPGLTAEIIELIAQHHPLTTEQRGVLLQYGIKLARRYRGSLLFGQLIPRFDNRIISCCPVTWAQVYEAELKKGNSEQSARERAEKLSKVPTANCPEFYEYRMARILCNIRADGEPLSAEIRRELMNQARQEGKLTKASLEKAISSRLGKETETNVSNYFTLHPDSEEALYLNPAVEVLQRSGIGQILSPSVYRIAANRLRRGKSVTPNYLLNLLKSRGESGEALEKKIEKESKKKAKKKEADYADTPLKPKYATGRAPYARTVLKKVVEEILDGEDPTRPARGEAHPDGELKAHDGCLYCLLDTDSSVNQYQKERRLDTMTNNHLVRHRMLILDRLLKDLIQDFADGQKDRISRICVEVGKELTTFSAMDSKKIQRELTLRQKSHTDAVNRLKRDLPGKALSANLIRKCRIAMDMNWACPFTGATYGTHELENLELEHIVPHSFRQSNALSSLVLTWPGVNRMKGQRTGYDFVEQEQENPVPDKPNLHICSLNNYRELVEKLDDKKGHEDDRRRKKKRKALLMVS

SEQ ID NO: 6875 - protein, 1068 aa, synthetic construct
  REGION 1..1068: note = Synthetic
MKYILGIDLGESSLGWAVIRIEKDAPRELVDAGVRVFPAGAEIEAKKIDLKTKNAERRTSRGSRRVKERRARRKTKVLHLLQRMNLLPKDEAELRQVFNLDPYLCRARALDEKLAPFELGRAFYHLAQRRGFKSNRKSEKEKKDSGDIAKAIGALTADMATAKSRTVGEYFSLRAREPFLLATAQVPRIRKQHTCRSMYEEEFASIWERQAKFHADLLTPERQEDLRQAIFFQRPFEVTEERRQALPPRANALRAPQLADCSLIPGEKRCAVGSWIAQQFRLLKEVNNLRLNNNRGESRALTVEEREKILHQLSRQKEMKFTKMRKMLGVPDGWTFNLEAAKRLAMKGNLVDAALIKAFSEDHWQALREEDRELLRRIIVEEEDPGKLADCLRAFPLEPEKIADLQGFSAPDGYLRFSAKAMEILLPYLEAGLIETDAIDEAKKDGKLQTTENDQVHDLLPKPPTGITNPLVRRCLTETRRVVNALIREYGKPERIVVELARQLKMNRDDRDHAVTLNRDNEARNKIAEDWYKDHGRANPKNEDKLRFRLWQDQHWQCPYTGKAIGAADLLSIANVVEVDHILPFSRSLDNGYENKVLAFTEANREKGNRTPFEWKNGPDGEAFQEMIVRISEMSFSHGKKKRFSQAELDADEAIDRRLVDTQYASRELADYLNLLYPKELRVGQRAVLTTPGRVTAILRRRWGLNLVLGYDDGEKNREDHRHHAVDAVVIGCTSRKAIKALSDAVRRDDDPHQVPLLPPWEGFRENVVEVICRRERVWQIGEREIKTTGLLVSHVANTSISGLFHKLTNYGPTSDSKEIAYRVKVNELTGAMVEEIPNDNIKKIILDHIRRNGGDPNQKGLFPKKIWETCPQLPISEKKRLKNPALPESIPIRKVRIHQSISSEDMVYPLKKNIKDSRKDLLHEPVTKPYRVVKPGNNHEMSFFEKQTKNGKAVWTFRVTTTMEAARRKLNNEPIGSPIQENDGKLVMSLQINEMIVVEHENEQLLLRVQKICQDGRIDFRHHVFAGTPSESHKPPIHFQVKSEALRKRNAVKVMVDPLGRLLPFND

SEQ ID NO: 6876 - protein, 1284 aa, synthetic construct
  REGION 1..1284: note = Synthetic
MYKLGIDIGTNSIGWAIVEIEKQNDKIIPLNLIDFGVRIFNNGLTQDTKPKSLASIRNEAKGARVNQDRYLVRRKKLFESLINYNLMPKDKTEQKSLELLNPYKCRAECVKIDLYNSELVKNLNNPLYILGRALFHINQHRGFQSLSEDDTSKLEKSHGKLIEEIKNNNCNTLGEYQWEMIKKGKKVRFRGLMDDKGKLKNGVSFPSRDIYRQEIEFIFKNQRQYFPELSKDMEKEITDIILEQRNLTKQKPAKCIFDNNNNTQLAQLLFQRFRIISEVNNLEIIYPENKKLSDEEKRKLIDALYNCNKDLKSKDNVVPYLSIKEFLELDSETLFNFEATKKHKYKGKTEDGKSEYEEIYKPLTREGIKCSETNKILLEEIRNWSSFSENDKFNIIEILTDYSKFAKDRVNILKEQYGIELDNIKANEILNKLPKGYSKLSREILETIIPLMENNNLKYYEALEKIGVNHSLKDYQKEGWKPLEFLPPYQEKFKEYLGTNGRITNPTVHIALNQIRIVVNEIISLYGNPEFIGVEVARDMAQGEKLKAKISQKQFENKSINDEARRAIISCGQNPSDYNIEKYKVWRNLCPNDENKRVDIYDMSELAHPISLSELFSPNYEIEHILPFSKSGDDSYANKIITHRDFNGNKSDRTPSEWKVNEPEDLKILQKRAGLIDFYRKNKKGDKPVLKENNKKRREYKLSDTWWRFLPNAMDIYNKLTGGLNARDINDTRYITKLTNQYLRYISNNWNNSTVNTGITTDLYRNAWELLKAVPRDFDLWIPQKWQQDFLSDKLKDVILLLHKEYNSKDKEIQKNFNEKVKEIIDDLINGNPSKYNNLVDEFDTFIMNQSNEINDIELLNENEKDVKTPIIKRNAFDTHRFQFVKVETESLSSDEIKENCYQLFYNLSSKQKDRAIHYHHAIDAIVCACLDTSLAQYPNKSEFRKELDKQYYEKLKKDDNLDKERFRKSLQQALISSKLRDENKILPYKNFDMKDLKERFRNMLISYKEEANKVKYLIQGIKEGKNKSNQSFLTIMKDTAYSIENNKLTKDDKIILKKLNRSKGKVETETTNISSMIPVFRNKKQKKIYLELFDKYFIAKQQYVDKKITEEEFNNIKNAFENSFTKDKAYKWYASDGNYEAQIYMVDDKWQMEIINRFRVFEHLEDKDGYALWNKIYPKAKKMMTLRINDIVKANIKRNDTCESFGELKKFIADKFKNCSNLDNMDFYFKVKKMTNGRITLLPIHIAQADGEHKIWTGSITALQKYNIQKVYLNALGKEINKN

SEQ ID NO: 6877 - protein, 1225 aa, synthetic construct
  REGION 1..1225: note = Synthetic
LIFLWIQIAFRKNKSTFLLIQNKKKGPANRSHRWKSPSAYSLVVIRQPYLIIKKSYFKSFLKERGWILSKILGIDVGTNSLGWAILDPLEKRFTDAGVIVFQQEIPDEKGTEAELSPAADRRNFRAMRRLKFRRRLRKYHALKILIENHMCPLSMPELQNWIRKGVFPIGNRDFIAWLGSTKEANPYYFRAKAAERKLPPMELGRAFYHLAIRRGFKSSRKDADDSGDKDLSEFKKGISSLTETLRNRQCTLGQYFYELFRSNQKIRKVNRCGRVEHYEPEFETICRVQELPADFVSGMRKALFFQRPLRSQKHLAGHCSLEKKHVRCLIGHPLFERYRMLSFLNSIRKKDGRALTAEERKKAESAFYGSKPSFEFKKLLQKVYPKEYRSLAEEFNYPPDKSIASSPVTAKLQKVLGTDDLFAWRHEYAGRDGKTRVMDYQTLFDALTFFDDNDLLKKFAVERAGLTPEQAEEFIRIRIPSGYANFSLCAIRKIMPFLEAGQIQTRALFLAKLPELLGKEVFRQNSGKIIAELERIEEEWRSDQREALAAGRPGAFLSQTERMKRYLEDEFSLTPDRFEQLYRYNSRSDYPDNSASGILPPVNLGMIYNPMVYRSLTVLRRLVNHLRRSGKIDASTEIHVELARSVNNRNTRLAIAAEQKEQEKRRQEARGQIEANGGHPSDEMILRWFLWKEQKEHCLYTGKAIGIADLLSPANLVEIEHTVPRSRGGDSSMENLTLCFTDYNRYIKKNSLPTACPNYESPWKDCNSIQENLKAAGWEEERSALISRVEKLRTAARGNPQKRPELIQAQKQLDYWDAKLAAFQITDEELKEKGFSKRQLVDTGIVARHAVFLLKSVYRNTYSRNGKVTEWARKAWGVQEFYKPKDRSDHKHHAVDAMCVAALTEGFFQRISTAYRSDELSAALLEKEDSDESASSDASSDSVKSLPEAYPWPTFPQDVYEKTDEILIFHAARHNETKQSRKQVHLVIPYRTPDGQLHRVVTSGGDSVRGQLHKESYYGRIKDPSSGTQRSVIRQEFVIKNFPSEASFEDIVDPAVREMLLEQIHAREDQGRTFKEAMDEGDFRMKTKDKVFNGPPIRSVRCFARLHDPLKIRKQTYSSSAEYKNYLYAGNAKGGNFRAALFRSPEGKLTYRLQSLWEWATQRKDPDYVPPEKESGKGEFLGFIFPGTMVLAYENSPEELKTLSPRELRKRLYKIIEIQKAASLP

SEQ ID NO: 6878 - protein, 1212 aa, synthetic construct
  REGION 1..1212: note = Synthetic
MSRILGLDVGTNSLGWAILDPFQKMFIDTGVVVFQQGIPEEKGREAECSPAAERRKFRAARRLKYRRRLRKYHTLKVLIENQMCPLTIPELQNWIRNGKFPIENREFIAWLSSTKEDNPYYFRAKAAERKLPPLELGRAFYHLAIRRGFRSSRKETSGSNEKELTSFKQEINRLTEILQRKQCTLGQYFYELFQKSEKIRKVNRCGRKEHYEPEFDKICEVQELPEPFVSEMRKAIFLQRPLRSQKYLAGHCSLEKKRVRCLIGHPLFERYRMLSFINSIRKNGVPLNERERQKAQAAFLVSKPSFEFEKLVRKLYPGYPKNEWSEWNYPPDKSIASSPVTNQLQKILGTEDLFAWHHEYIGRDNKPKSMDYQTLFDALTFFDDDGMLKNFAIERAGLTVDQAEKFVKIRIPTGYANFSLYAIRKILPFLEAGHIQTRAVFLAKLPDVLGKDVFQKNGEKIIADMEQLEADWRMERESASESGERAAFLSLTERIKHYLEDEFHVTPGRFELLYRYNSRSDYQDHTRSGILPEVNLGMIYNPMVYRSLNVLRRLVNHLRKTGKINADTEIHVELARSVNDKNTRMAVANDQKKQENLRKQYKEAIEAEGFEATEERILRYVLWMEQNKHCLYTGKAIGLADLMSENDLVELEHTVPRSRGGDSSRENLTLCFTDYNRYTKKNGLPTACPNYDVKWKEYNSIRENIKVAGWEEKRENLRSRLEKLRSAARGNPQKRVEMLECRREFEYWCAKLAAFEITDEELRRKGFSRRQLADTGIIARHAVFLLKSVYGNTYSRNGRVTEWVRKAWGVQGIYEKKDRCDHRHHAIDAMCIAALTEDFFQKISAAYRADEEKAMAYARYNSTLPDAYPWRSFPEDVFEKSEEILVTHFIRHNETKQAKKQVHLVTPYKTADGGLRRVVTAGGDTVRGQLHKESYFGRIRDPESGEKKSVLRKELNSQNFKTESALAAIVDPAIREAVSAQLRLRMSSGKSFKEAMDEGGFRMRSGDDVFQGPPIRKVRSFVRTAEPLKIRRHAYASEAEYKNYIYADTAKGGNFKAALFRAPRGKLCYCLQSLWNWANAHKRPDYVPPEKQPGVGEFLGFIAPGTMVLAYENTPDELKKLSRRELNKRLYKIIVIEKDIQRLSLRYHCEARAKSEVQEEMKKTLGVEEASTISFQEPAKLLKITSGEFSNHLIFEGIDFAMSIDGEIRFLK

SEQ ID NO: 6879 - protein, 1212 aa, synthetic construct
  REGION 1..1212: note = Synthetic
MSRILGLDVGTNSLGWAILDPFQKRFTDAGVVVFQQGIPDEKGREAERSPAAERRAFRAARRLKFRRRLRKYHTLKVLIANQMCPLTMAELQNWIRNGKFPIENRNFISWLGSTKENNPYYFRAKAAERKLPPPELGRAFYHLAIRRGFRSSRKESSSSNEKELTNFKKEINQLTEILQKKQCTLGQYFYELFQRSEKIRKVNRCGRKEHYEPEFEKICEVQNLPEPFVAEMRKAIFLQRPLRSQKHLAGHCSLEKKRVRCLIGHPLFERYRMLSFINSIRKNGVPLNEEERQKAQAAFLVGKPSFEFEKLVRKLYPKYPKNEWSEWNYPPDKSIASSPVTNQLQKILGTEDLFTWHHEYIGRDNKPKSMDYQTLFDALTFFDDDDMLKNFAIERAGLTVDQAEKFIKIRIPSGYANFSLYAIRKILPFLDAGHIQTRAVFLAKLPDVIGKEVFQKNGEKIIADMEQLEADWRMERESASESGERAEFLSLTERIKHYLEDEFHVTPDRFELLYRYNSRSDYQDHTRSGILPEVNLGMIYNPMVYRSLNVLRRLVNHLRKTGKIDADTEIHVELARSVNDKNTRMAVANYQKKQENLRKQYREAIEALGYEATEEQILRYVLWMEQNKRCLYTGKPIGLAELMSGDNVVEIEHTVPRSRGGDSNMENLTLCFTDYNRYTKKNGLPTACPNYDVKWNGHNSIRENIRVVGWEEKRENLRLCLEKLRSAARGNPQKRVEMLECRREFEYWCAKLAAFEITDEELRRKGFSRRQLVDTGIIARHAVFLLKSVYRNTYSRNGRVTEWARKAWGVQGFYEKKERSDHRHHAIDAMCIAALTEDFFQKISAAYRADREEAMAYARYSSTLPDAYPWHSFPEDVFEKSEEILVAHFTRHNETKQTRKRVHLVTPYKTADGELRRVVTAGGDTVRGQLHKESYFGRIIDPESGQEKSVLRKELNSQNFKGESALSAIVDPAIREAVSAQLRFRMSSGKNFKNAIDEGGFHMKSKDGTFQGPPICKVRCFVRLAEPLKIRKHAYASEVEYKNYIYADNAKGGNFKAALFRSPRGKLCYCLQSLWDWANEHKRSDYVPPEKQPGLGEFLGFIAPGTMALAYETTPDELKELAPRELSKRLYKIIVIEKDMQRLSLRYHCEARAKSEAQAAMKKTMGVEEASSISFQEPARLLKISSDTFSSHLIFEGIDFVISIDGEIRFLK

SEQ ID NO: 6880 - protein, 1122 aa, synthetic construct
  SITE 927: note = misc_feature - Xaa can be any naturally occurring amino acid
  REGION 1..1122: note = Synthetic
MFFLERGKFMGKILGLDVGTNSLGWAILDPVQQKFSNAGVIVFQQGIPEEKGVEAECSPAAERRIIRAGRRLKFRRRLRKYHTLKLLIENKMCPLTMPELQNWIRNGKFPIENKEFIQWLGSTKEANPYFFRAKAAETKLPPLELGRAFYHLAIRRGFKSSRKDASSSNEKELTSFKQEICNLTRILQEKQCTLGQYFYELFQKSEKIRKVNRCGRKEHYEPEFETICAVQNLPVSFVEAMRKALFLQRPLRSQKHLAGYCSLEKKHVRCRIGHPLFERYRMLAFLNSIRKYGLPLTREERRKAESAFLLKKASFEFEKLVRKLDPKNWRKILPEFNYAPDKSIATSPVTCQMQKVLGTEDLFAWRHEYIGGDGKTRTMDYQTLFDALIFFDDNDLLKKFAIERAGLTGEQAAEFVEIRIPDGYANFSLCAIRKILPFLEVGHIQTRAVFLAKLPDVLGREIFQKNSERIIADLGRIEEDWRSERERAPSDGPRAPFLSQTERVRQYLEDEFHVTPDRFEQLYRYNSRSDYPDNTGTGILPEVNLGMIYNPMVYRSLNEVRHLVNHLRRTGKIDAETEIHVELARTVNDKSTRKAVADYQKNQENLRKKYAEEIEALGWEATDERILRYTLWMEQNQRCLYTGKQIGAADLLSPQNVVEIEHTIPRSRGGESIMENLTICFTHYNRYTKKNNLPTMCPNYDKPWNDCSSILDNIRSAGWFEKRESLRAQAEKLKSAARGNPQKRVDKIKCEKELEYWDKKLAAFEITDEQLRKQGFSKRQLADTGVIARHTVFLLRSVYRNTYSRNGKVTEWVRKAWGVQGFYERKKRTDHKHHAVDAMCLAALTESSYQKISTAYRIDSEKAAAHIQDEQNTLPTGYPWPEFPEDVFRKTEEILVYHSTRHNETKQTRKKVHLVTPYRRADGKLIXPGCENRRRHRPRSAPQGQLFRTDSGSGIRRGTLRHPQRTEPEQFCRGSQTFRNCRSENPGERSGTDPLPHQGGEILQGRHERRQFPHVDQRRLFQRPPDPQCPLLCQQHRTAENPETRLFLRQGLQKIHLCGNSQRRQFQSRALPLPRRETQLPPAVPLGVGNHAQEAGLHPSGKTDREWRIHRFHFAGHHGSLL

SEQ ID NO: 6881 - protein, 803 aa, synthetic construct
  REGION 1..803: note = Synthetic
MSRILGLDVGTNSLGWAILDPFQKRFTDAGVVVFQQGIPDEKGREAERSPAAERRAFRAARRLKFRRRLRKYHTLKVLIANQMCPLTMAELQNWIQNGKFPIENRNFIAWLGSTKEDNPYYFRAKAAERKLPPQELGRAFYHLAIRRGFKSSRKESSSSNEKELTNFKKEINQLTEILQRKQCTLGQYFYELFRRSEKIRKVNRCGRKEHYEPEFEKICKVQNLPEPFVAEMRKAIFLQRPLRSQKHLAGHCSLEKKRVRCLIGHPLFERYRMLSFINSIRKNGVPLNEEERQKAQAAFLVGKPSFEFEKLVRKIYPKYPKNEWSEWNYPPDKSIASSPVTNQLQKILGTEDLFSWRHEYIGRDDKRKTMDYQTLFDALTFFDDDDMLKNFAMERAGLTADQAEKFVKIRIPTGYANFSLYAIRKILPFLEAGHIQTRAVFLAKLPDVLGKDVFQKNGEKIIADMEQLEADWRMEREAASESSQRAEFLSLTERIKHYLEDEFHVTPDRFELLYRYNSRSDYQDHSRTGILPEVNLGMIYNPMVYRSLNVLRRLVNHLRKTGKIDADTEIHVELARSVNDKNTRMAVANYQKNQENLRKQYREAIEAEGVEATDEQILRYALWMEQNKRCLYTGKPIGLADLMSGDNVVEIEHTVPRSRGGDSSMENLTLCFTDYNRYIKKNGLPTACPNYDVKWKEYNSIRENIRVVGWEEKRENLRSRLEKLRSAARGNPQKRVEFLECKREFNYLCAKLAAFELTDDELHLAGLVQNLGVGDVRYRITHMLLFLICTRNGHGMRPRGRAW

SEQ ID NO: 6882 - protein, 1073 aa, synthetic construct
  REGION 1..1073: note = Synthetic
MDKQRQINKGGFLMNSSALERYSLGLDIGITSVGWAVLDLTRGKIADLGVRLFDRAEEPKTGASLAAPRREARSTRRRLRRKRQRMSDIRSLIVSHGILSQTDMDNLFNSPHPCTPWELRAEGLDRLLTCEEWSRVLIHMAKHRGFKSNRTVAESDIKNSEDGRALSGIKENSELLKAGNNGAGYRTVGELIQNDPKFSGHKRNKGGEYSHTILRKDIEREIDALFEEQRKFGSTYASMEFENEYKDIFGRQLPFAFDGAIEKLIGHCSLEPSEKRAPKASWTAERFILLSKIANLRVRSDGKKVPLSIDERRTIDNLAYKNTKVTYKQIRKALNWQDNLVFDSLPFTKKDKDPEDSVFVELKGWHAFRKCLSEKLGKDYWETISVNPRLLDDLAYALTFKKTDEDITRYLEERNIDKKIIDAVLPLNFSGVVNLSAAAMGKLIPFMEKDGCRYDEACVKAGYLHYKPAEKERSLKLPVPDWEEIRNPVVIRAIAETRKVVNAVVRKYGPPESVQVELARDLSRSKEERDKIIKEQEENRSQKEKLAKEFQDKFHYSPNGRQLEKFRLWKEQNGFCLYTGQYLAPGDVFNGSDDSFAEIDHIIPYSISFDDGRINKVLVTSGANREKGNRLPYDYFGGDGEKWDEFTARVNANIQNRKKAARLKIKSLDDSDISEMKERNLSDTRYITKYVAKWLEENLLFAEKKAENNVTRINGRATATLRWQWGINALKDREGSDLHHALDACVVAAATPGIIKRISDYSRDRELQKLKVNAEDNKKRRCPEPWEHFRKEVEARLSENPAEKIREFGLAGYSESELNELKPIFVSRRPDRGATGAAHKDTIYSAKYLNDNPPRIVVKKALTSLKKSDLENMVGKERDRALYEALAKRLEEYGDKPEKAFKDGFKKPASNGKPGPVVRSVKIFDPRVAGLPVNGGIALNDGMVRVDLYQKNGKYFLIPYYVSDIAKKIVKNKAIAQGKREDEWITIDGTYDFIFSLFKNDLVRIIDSKGKEIFGYYNSCDRTNGAIEIKKHDGSVSWRGIGVRTAKLIEKYQVDVLGSYHKVKREKPSHELA

SEQ ID NO: 6883 - protein, 1060 aa, synthetic construct
  REGION 1..1060: note = Synthetic
LKYSLGLDIGITSVGWAVLDMEQKFIEDLGVRLFPGAENPKDGSSLAAPRREARSSRRRIRRKRQRLSDIRQLILSSKLLSEAELTKLFDIPNEHTPWQLRAEGLDRKLSHSEWARVLIHIAKHRGFKSNRTISTEGKDAKASEEGKAKEGMRSNSLLLSSGNNGKGYRTVGEMVEKDPKFEFHKRNKAGDYSNTIIRTDLESEIKTLFSLQREFGNKFSSADLEEEYIKLFNRQLPFASGEIIEKMTGNCTFEPDQKRAPKASWTAERFILLGKILNLRVRVDGKKMELGTEKMRVVNDLAYKNAKVTYKQIRKALDEGENWHFENLPPVKSSGDKKSDPEDAVFVELKAFHSFRKSISDKLGKEYWENLISTSPKILDTLAYALTFRKTDEEIISYLKSHNIDDDLIRAVLPLNFNGVVNLSIKAMSKIIPHMENGNRFDEACQLAGYSHYDPHSRSDRSLILPVPNFEEIRNPVVFRAITQTRKVVNAIIRKHGSPERVQIELARDLSRSIDDRRKIEKEQLENKSQKEKLSLEFEKLYSYKPNGAQLEKYRLWKEQEGFCPYTGEYIHPDRAFMSEDGNYAEIDHIVPYSRSFDDSLTNKVLVMGSANRNKKNRTPYEYFGSDSEKWRIFVANVDAHIKNRRRAERLKMKDIDESDEEAMKERSLGDTRYITKYVAGWIENSIIFSDSSIKRPVTRVNGRATATLRWQWGINALKDRQKSDLHHALDACVIAAATPSIIKSISDYSRKKELSLLRSEEQEKKKTRLPEPWPNFRKEVEARLSDDPVSMINEFGLKNYPEDKLESVKPIFVSRKPERKVSGAAHEETIRSAKHIEDLQKTAVRTSILSVNLSRLENMVGKERDKALYEALKNRLKEFANDPKKAFKDGFRKPTKNGEPGPLVRTIKLFDSGTSGVEVCEGIASNGSMVRLDVFTKNSKYYLVPYYVDDIAKRKVKNKAIVANKNEHLWEPVDSSFDFLFSIYKNDLIYVIDSKGKELFGYYSGCNRSTGAIDILHNTGECIWQSVGIRTVKKFEKYCVDVLGNYYKVKKEAPPYELA

SEQ ID NO: 6884 - protein, 870 aa, synthetic construct
  REGION 1..870: note = Synthetic
MDKQRQINKGGFLMNSSALERYSLGLDIGITSVGWAVLDLTRGKIADLGVRLFDRAEEPKTGASLAAPRREARSTRRRLRRKRQRMSDIRSLIVSHGILSQTDMDNLFNSPHPCTPWELRAEGLDRLLTCEEWSRVLIHMAKHRGFKSNRTVAESDIKNSEDGRALSGIKENSELLKAGNNGAGYRTVGELIQNDPKFSGHKRNKGGEYSHTILRKDIEREIDALFEEQRKFGSTYASMEFENEYKDIFGRQLPFAFDGAIEKLIGHCSLEPSEKRAPKASWTAERFIFLSKIANLRVRSDGKKVPLSIDERRTIDNLAYKNTKVTYKQIRKALNWQDNLVFDSLPFTKKDKDPEDSVFVELKGWHAFRKCLSEKLGKDYWETISVNPRLLDDLAYALTFKKTDEDITRYLEERNIDKKIIDAVLPLNFSGVVNLSAAAMGKLIPFMEKDGCRYDEACVKAGYLHYKPAEKERSLKLPVPDWEEIRNPVVIRAIAETRKVVNAVVRKYGPPESVQVELARDLSRSKEERDKIIKEQEENRSQKEKLAKEFQDKFHYSPNGRQLEKFRLWKEQNGFCLYTGQYLAPGDVFNGSDDSFAEIDHIIPYSISFDDGRINKVLVTSGANREKGNRLPYDYFGGDGEKWDEFTARVNANIQNRKKAARLKIKSLDDSDISEMKERNLSDTRYITKYVAKWLEENLLFAEKKAENNVTRINGRATATLRWQWGINALKDREGSDLHHALDACVVAAATPGIIKRISDYSRDRELQKLKVNAEDNKKRRCPEPWEHFRKEVEARLSENPAEKIREFGLAGYSESELNELKPIFVSRRPDRGATGAAHKDTIYSAKYLNDNPPRIVVKKSADISEKKRP

SEQ ID NO: 6885 - protein, 1063 aa, synthetic construct
  REGION 1..1063: note = Synthetic
LGLDIGITSVGWAILDLENKYIEDLGVRIFERAENPKDGSSLAAPRREARGSRRRLRRKRQRLADVRDLIVSNNLLSSNELEALFETPSEYTPWQLRADALDRKLTQKEWARVLIHIAKHRGFKSNRTASPDEKDAKAQEDGKAKEAMKANELLLSTGNDGKGYRTVGEMMQLDPKFEEHKRNKGGDYSNTVLRSELESEIKILFSEQRRHGNLYASESFEEKYIEIFNRQLPFASGEIIEKMTGYCTFEHDQKRAPKASWTAERFILLGKILNLRVRVDGKKRELSLEKMRTIEELAYKHNKVTYKQIRKALDAGDSWYFENMPPVKSSKGKETDPESATFIELKAFHEFRKAISKSLGKEYWETLISTSPTTLDILAYALTFRKTDDEIKSYLKERNVDDKLIKAILPLNFSQVVNLSIKAMSNIIPHMEKGYRYDEACKLAGYTHYNPHGSAERSLFLTLPEFEEIRNPVVFRAIAQTRKVVNAIIRKYGSPERVQVELARDLSRSLKERNRVTKEQQENRSQREKYAEDFENTFSFRPNGSQLEKYRLWKEQGGYCPYTGEYIRPDMAFTSSDGSYAEIDHIIPYSRSFDDSFINKVLVMGSANRNKRNMTPYEYFGSDEEKWEKFIVNVDTHIKNRRRAQRLKIKDFGETEEGAMKERSLGDTRYITKFVAGWIENQLIFSDPSIKRPVTRLNGRATATLRWQWGINALKDREKSDLHHALDACVIAAATPSIIKSISDHSRKKELSLLRSEEGHNKKTRLPEPWPRFRKEIEARLSENPAELIKEFGLTNYSEGKLENIKPIFISRKPERKATGAAHEETIRSSKYIETLQKTAVKTSILSVNLSKLEDMVGKERDKALYEALRKRLKESGNDPKKAFKDGFRKPQNNGEPGPIVRSIKIFDSGTSGVKVRGGIASNSNGGMVRVDVFEKDSKYYLIPYYVDDIAKRRVKNKAIVAGKKEDFWITVDSSFKFLFSVFKNDLIHVVRSSGQEIFGYFISCNRNDGTIDVRHCTGEHVWSSVGTRTVKKFKKYTVDVLGNYYKVKREKSPYELANCDSS

SEQ ID NO: 6886 - protein, 1045 aa, synthetic construct
  REGION 1..1045: note = Synthetic
MKPRNLNYILGLDLGIASVGWSVVEIDENEYPIRLIDVGVRTFERAEVPKTGESLALARRLARSTRRLIRRRAFRLLKAKRLLKHHQIVNAEELTQLPNQCWELRVKGLDSLLSNTEWAAVLLHLLKHRGYLSQRKNEAQNADKELGKLREGMDNNSKLLLENNYRTPADIAVKKFAVEEGHMRNQRGAYTHTFNRLDILAEMQLLFKTQRELGSTYANGELEQAFCELLLWQKQALNRSQMLSLVGKCTFEKEEKRAAKASYSAERFVAIQKLQNLRILENGEERGLFDSEFSLLLENAYNLKSGLTYKQVRKILSLSENAIFKGLPYLSDDLEKPEKTQFLAFKFYHQLADILKNNGFSDEWQKLSQEPTLLDKLGTELSLCKEENEFIAQFNGELPEAMLSTLFNHTNFDKFIHISLKALNNILPLMEQGNDYTKAWRKVYPEPTKKDEKTLPPIPADEIRNPVVLRSLSQARKVINAVIRLYGSPARIHIETARELGKSYDDRQKIKKQQDKNSDERDQAVKKFLEECPNFANKVKGKDILKIRLYINQDGKCLYSGKPLDPHRLLEIGYVEIDHALPFSRTWDDSQNNKVLVLANENQNKGNQTPFEWLGKDEHQWALFVARVNGCRFPYAKKQRILTKKLDEQGFLKRNLNDTRYVSAYLMKHIKENLHLVGKGSDKVFASNGQVTNFLRRCWGLEKKREEGDRHHALDAIVVACSTASMRQKITLFKKYQRWNLKTGKHIDQETGEIIPLHFPAPWDFFRQEVMIRIFSEMPQEDLIMQLPDRPQANHEFVQPLFVSRAPSRKMSGQGHEAKLRSARMLEATGKSIKKEFLTDLTIKNLEHMVNKEREPELYQALVEHFKKYGDKPKEKFFKKGGVEVKSIRISKTQNKSVNLGNKTIADNGDIVRTDLFLKNKKYYFVNIYAWQVSKGILPKETTTGNILDNSYEFQFSLFKNDLLEIPHPKNENDSILAYFIRPDDERRWILKFHDNAKIPDIYGKKDETSIRLSIQGQKFIKKYQVDELGKNIRPCRPTKRQGVR

SEQ ID NO: 6887 - protein, 697 aa, synthetic construct
  REGION 1..697: note = Synthetic
MAAFKPNPINYILGLDIGIASVGWAMVEINEEENPIRLIDLGVRVFERAEVPKTGDSLAAARRLARSVRRLTRRRAHRLLRARRLLKREGVLQAADFDENGLIKSLPNTPWQLRAAALDRKLTPLEWSAVLLHLIKHRGYLSQRKNEGETADKELGALLKGVADNAHALQTGNFRTPAELALNKFEKESGHIRNQRGDYSHTFNRKDLQAELNLLFEKQKEFGNPHVSDGLKEGIETLLMAQRPALSGDAVQKMLGYCTFEPTEPKAAKNTYTAGRFIWLTKLNNLRILEQGSERPLTTTERATLMDEPYRKSKLTYAQARKLLGLEDTAFFKGLRYGKDNAEASTLMEMKAYHAISRALEKEGLKDKKSPLNLSPELQDEIGTAFSLFKTDEDITGRLKDRVQPEILEALLKHISFDKFVQISLKALRRIVPLMEQGKRYDEACAEIYGDHYGKKNAEEKIYLPPIPADEIRNPVVLRALSQARKVINAVVRRYGSPARIHIETAREVGKSFKDRKEIEKRQEENRKDREKAAAKFREYFPNFVGEPKSKDILKLRLYEQQHGKCLYSGKEINLGRLNEKGYIEIDHALPFSRTWDDSFNNKVLVLGSENQNKGNQTPYEYFNGKDNSREWQEFKARVETSRFPRSKKQRILLQKFDEDGIYRIGVKTALSFPKYQIDELGKEIRPCRLKKRPPVR

SEQ ID NO: 6888 - protein, 641 aa, synthetic construct
  REGION 1..641: note = Synthetic
MKPRNLNYILGLDLGIASVGWSVVEIDENEYPIRLIDVGVRTFERAEVPKTGESLALARRLARSTRRLIRRRAFRLLKAKRLLKHHQIVNAEELTQLPNQCWELRVKGLDSLLSNTEWAAVLLHLLKHRGYLSQRKNEAQNADKELGKLREGMDNNSKLLLENNYRTPADIAVKKFAVEEGHMRNQRGAYTHTFNRLDILAEMQLLFKTQRELGSTYANGELEQAFCELLLWQKQALNRSQMLSLVGKCTFEKEEKRAAKASYSAERFVAIQKLQNLRILENGEERGLFDSEFSLLLENAYNLKSGLTYKQVRKILSLSENAIFKGLPYLSDDLEKPEKTQFLAFKFYHQLADILKNNGFSDEWQKLSQEPTLLDKLGTELSLCKEENEFIAQFNGELPEAMLSTLFNHTNFDKFIHISLKALNNILPLMEQGNDYTKAWRKVYPEPTKKDEKTLPPIPADEIRNPVVLRSLSQARKVINAVIRLYGSPARIHIETARELGKSYDDRQKIKKQQDKNSDERDQAVKKFLEECPNFANKVKGKDILKIRLYINQDGKCLYSGKPLDPHRLLEIGYVEIDHALPFSRTWDDSQNNKVLVLANENQNKGNQTPFEWLGKDEHQWALFVARVNGCRFPYAKNSGF

SEQ ID NO: 6889 - protein, 608 aa, synthetic construct
  REGION 1..608: note = Synthetic
MLKPLNYILGLDLGIGSVGWAVVEIDEQGNPLRLIDVGVRTFERAEVAKTGESLALARRLARSSRRLVKRRAARIKKAKRLLKAENILLSVDEILPNDVWQLRVKGLDHKLERQEWAAVLLHLLKRRGYLSQRKNESKSENKELGALLSGVVTNHQILQTDEYRTPAEIAVHKFQAEDGHIRNQRGDYTHTFSRLDLLAEMELLFQRQTELGNLHTSSKLLENLTALLMWQKPALAGEAILKMLGKCTFEPTEYKAAKNSYSAERFVWLTKLNNLRILEQGAERALTDSERFVLLDQPYEKAKLTYAQVRTLLKLSDEAIFKGVRYQGEDKKTVESKTTLMEMKAYHQIRKALDGADLKDEWNTLKNDSALLDEIGTAFSLYKTDDDISHYLGGKLSEKVLNVLLENLNFDKFIQLSLKALQKILPLMLQGQRYDEAVSAVYGDHYGKKSAESCRLLPAIPANEIHNPVVLRTLTQARKVINAVVRLYGSPARIHIETGRKVGKSYQDRKKLEKQQEENREQRESAVKKFKEYFPNFVGEPKGKDILKLRLYELQQSKCLYSGKSFDPNRLLEKGYVEVDHALPFSRTWDDSFNNKVCLPMKTRIKAI

SEQ ID NO: 6890 - protein, 587 aa, synthetic construct
  REGION 1..587: note = Synthetic
MATSRSRIRSQTDAFGVVGSLVAFNQTSRLFVAKKNEGETADKELGALLKGVADNAHALQTGNFRTPAELALNKFEKESGHIRNQRGDYSHTFNRKDLQAELNLLFEKQKEFGNPHVSDGLKEGIETLLMAQRPALSGDAVQKMLGYCTFEPTEPKAAKNTYTAGRFIWLTKLNNLRILEQGSERPLTTTERATLMDEPYRKSKLTYAQARKLLGLEDTAFFKGLRYGKDNAEASTLMEMKAYHAISRALEKEGLKDKKSPLNLSPELQDEIGTAFSLFKTDEDITGRLKDRVQPEILEALLKHISFDKFVQISLKALRRIVPLMEQGKRYDEACAEIYGDHYGKKNAEEKIYLPPIPADEIRNPVVLRALSQARKVINAVVRRYGSPARIHIETAREVGKSFKDRKEIEKRQEENRKDREKAAAKFREYFPNFVGEPKSKDILKLRLYEQQHGKCLYSGKEINLGRLNEKGYIEIDHALPFSRTWDDSFNNKVLVLGSENQNKGNQTPYEYFNGKDNSREWQEFKARVETSRFPRSKKQRILLQKFDEDGIYRIGVKTALSFPKYQIDELGKEIRPCRLKKRPPVR

SEQ ID NO: 6891 - protein, 553 aa, synthetic construct
  REGION 1..553: note = Synthetic
MAAFKPNSINYILGLDIGIASVGWAMVEIDEEENPIRLIDLGVRVFERAEVPKTGDSLAMARHLARSVRRLTRRRAHRLLRARRLLKREGVLQAADFDENGLIKSLPNTPWQLRAAALDRKLTPLEWSAVLLHLIKHRGYLSQRKNEGETADKELGALLKGVADNAHALQTGDFRTPAELALNKFEKECGHIRNQRGDYSHTFSRKDLQAELNLLFEKQKEFGNPHVSGGLKEGIETLLMTQRPALSGDAVQKMLGHCTFEPAEPKAAKNTYTAERFIWLTKLNNLRILEQGSERPLTDTERATLMDEPYRKSKLTYAQARKLLSLEDTAFFKGLRYGKDNAEASTLMEMKAYHTISRALEKEGLKDKKSPLNLSPELQDEIGTAFSLFKTDEDITGRLKDRIQPEILEALLKHISFDKFVQISLKALRRIVPLMEQGKRYDEACAEIYGDHYGKKNTEEKIYLPPIPADEIRNPVVLRALSQARKVINGVVRRYGSPARIHIETAREVGKSFKDRKEIEKRQEENRKDREKPPPNSESISPILSENPNPKIF

SEQ ID NO: 6892 - protein, 1038 aa, synthetic construct
  REGION 1..1038: note = Synthetic
MKLTPLNYILGLDLGIASVGWAVVEIDESGNIIRLIDLGVRTFDAAETGKGESLNLVRRSTRATRLLIYRKAQRVRELRYLLKNEGMIDDAIASYKLPNNVWELRVEGLDRKLNKEEWAAVLLHFVKHRGFKSSRKHQPKDGGKQGQLIKGINDNKILLASGVYRSPAELAIKKFYVEDGYIRNQRQYQHTFGREELAAECALLFETQRKLGNPFSSKEFESKWADIFNKQKKALTRKQMLAMVGICTFENTKYGLTEQKRAAKNTYSTERFVAIQRLQNLRIVENGEEKGLTDNEFQKILSLGYELEKGVSYARVRKELNLSEKAFFKGLQYSKYTKKTEDSLFLNFKFYHTLHNTLLSNNLENEWNEISKNDKLMDKIGTELSLCKNQDEFLESLSDELPKNVLNVLFENIHFDKFIHISLVALYKLLPLMEQGYNYAQAHTEIYGYSQIEDKKFLSAIPLADIHNPVVLRSLTQARKVINGIIRLYGSPTRIHIELSRDLGKSKVDRDAISKQNAKNRASNDELAKQIREEFQFEPKAKDILKYRLYIQQNCHCIYSNKKIDCKRLFEDNYVELDHALPLSRSWDDSFNNKVLVLKYENQNKRNLTPYEWLDGKNDSLQWRTFVARVNSFSEISKEKKQKLLSHNINEDEFKSRHLNDTRYIARYLKNHIEEHLMITGKGKNVLATNGRITSLLRKVWGLNKDRDLGDRHHALDAVVVACTQSKLIQQITEDIQHNRICRFTGEPKKKIFIPWEHFTADVNIRVFSDNPKLELENRLPDYPQYNHEFVQSLFVSRMPTRKMVGLGHEATLRSARILDTTGKSIKKEFLTDLTLKNLENMMNKEREPELYQSLVEHFKKYGDKPKEKFFKKGGTEVKSIRICKTQNKFVDLGNKTIADNGDIVRTDLFLKGKKYYFVNIYAWQVAEGILPNETTMGNLLDDSYIFQFSLFKNDILEIPHPEDKNKSVFAYFIRPDDDRRWILKFHDNAKIPEIYSKKDDTSIRLSVQGQKFIRKYQVDELGKNIRPCRPTKRQHVR

SEQ ID NO: 6893 - protein, 1071 aa, synthetic construct
  REGION 1..1071: note = Synthetic
MKQQPQRYILGLDLGIASVGWGLILVDEEENPIGLLDCGVRTFERAEVPKTGDSLALARRQARSVRRLIRRRAHRLLRLRRLLKREGVLSAADFNSDGLPNLPIHTWQLRVAGLDRKLTNHEWAAVLLHLVKHRGYLSQRKSETQTENKELGRLLAGVAENSKLLSESANQYRTPAELAVKLFAEQSGHLRNKGGDYTHTFNRLDLQKELHLLFEQQRTFGNPFASAELQSKVDGLLMIQRSALQGEAVLKMLGKCTFEPSEYKAAKHTYSAERFIWLTKLNNLRILENGTERALNEAERKLLLDEPYKKAKLTYSQARKLLDIPHDATFKGLRYGKDSDGLKAETGALMEMKAYHKIRTVLDKAGLKGEWENRIRNPEVLDKIGTAFSLYKTDEDIQAALADLKLPENVLDALLAGLNFDKFIQLSLKTLGNILPLMERGIRYDEACKEVYGDHRALAESKNQMLLPPIPANEIRNPVVLRTLTIEKPNAAATHSCQRNPQSCRVTYTHTSTQSDRDYPPLRLSSAGAYRNRTRVGQSVRSKRNRKTSGRKPQRTRTCGGTFRIVPTFCRGTQRRRYSETAPVTATRMPLFRHTDRLRPSERKRLCRNRPRPAFLSHLGQLQQSAGTGQRKSKKTPNTLRISRSEQQPTLARISGAATRLSFSLCEKTAYSDGQVGWQNQTGLFGTQPERYPLYCPLFMRLYRKPASARRRQTARVCIERPNHRLAARFMGLEKGTGRQRPPSCARCHRSRLLHRFHAAENHQSHAAANFGNCGHRNRRNQNPYSAAVGFLPPRSDDTGIQRLSARAGREIKWPASIAFCIPFICFTRPQPQDDGTRASNRQIRQTPVKHQRGEKAVDSVKIEGHKHRRLSRPRACFISSFAGTVTGVRRSGSVCRAVLQACKKWRARVISKSRSGERCTENRRNGKKRSWRYSTRHCRCHHGACRCIRKRKLSSTGLCLAGSKRYFTESGRSSLCRSRLGNGQLVIYAIPKRFSGDHFQERTDFRLLLWFKPCNRCHYRARFIGESQKWYTSKCRCKNRLIFSKIPSRSFGRNLPLQGRKTSTKQKEKI

SEQ ID NO: 6894 - protein, 522 aa, synthetic construct
  REGION 1..522: note = Synthetic
MLGHCTFEPTEPKATKDTYTAERFIWLTKLNNLCILEQGSERPLIDTERAILINQPYTYAQARKLLGLEDTAFFKGLRYGKGNAEASTLMEMKAYHAISRALEKEGLKDKKSPLNLSPELQDEIGTAFSLFKTDEDITGRLKDRVQPEILEALLKHISFDKFVQISLKALRRMVPLMEQDKRYDEACAKIYGDHYGKKNTEEKIYLLPIPADEIRNPVVLRALSQARKVINAVVRRYGSPARIHIETAREVGKSFKDRKEIEKRQEENRKDREKAAAKFREYFPNFVGEPKSKDILKLRLYEQQHGKCLYSGKEIDLGRLNEKGYVEIDHALPFSRTWDDSFNNKVLVLGSENQNKGNQTPYEYFNGKDNSREWQEFKARVETSRFPRSKKQRILLQKFDEDGFKERNLNDTRYVNRFLCQFIADHMLLTGKGKRRVFASNGQITNLLRGFWGLRKVRAENDRHHALDAVVVACSTVAMQQKITRFVRYKEMNAFDGKTMDKETGEVLHQKTHFPQPWEFFA

SEQ ID NO: 6895 - protein, 1096 aa, synthetic construct
  REGION 1..1096: note = Synthetic
MHYKIGLDIGMASIGWSVLALDEQGEPMQILHMGSRVFEAAENPKDGSSLAKPRREARGIRRRLRRHVHRNERIRRLIVSRNILTHEALAKLFDGDLQDIYKLRTKGLDQLLAPGEFARVLIHLAQRRGFKSNRRADSKEGDAGKLLKAVEENQKLIGEGKKYRTVGEMLNSRPAGERKRNQGDYKNVVARDDVAHEVREIFKAQRYLGQAQADEETERLYLEILLSQRSFDQGPGGDSPYKVDFGALAGNCSLIEGEKRAPKSCYSFERFNLLQKVNHIRIHQSGRERPLTDAERHRLIDYAHEKATFNYGDIRKLLGLDPADMFNIRYGSDKAEDVEKKTKFNFLPCYHKIKSALSKIKKGRIVHFADRLDDIAYAMTITKDDGKLGEKLTELGLEMLDADALVAANSEKSFSKFGHISLKACRMINPHLDKGLTYNQACEAVGLDFQGYNRGKKSKFLHHHQIPELDGLTNPVVRRAVLQAIKVINSIINKMGSSPDFIGIELARELSKTKQERDRADKSMKDNQATNDLIKEQLQEYGVSAPKGYDIVKMKLWKEQDCICPYCLKPLKIEELFSGAGCPEVDHIVPYSISFDDSYKNKVVVCAVCNRTKGNRLPMQYLTGGVRDDFEIWVKNHIRDKVKCLRLLKEGLTEEDEGYKDRALNDTRYVCRLMLNILQNYLELAPPPPGVKKQIIAVNGGITAYIRKRWGISKIRADGDKHHAIDATVVACVTDGMIRKISRYAQRRELQYTQTEQGEFIVDTNTGEVLEDEKHFPQPYPHFRKELKARASSQSVQLIEQLKLPAYTNPAVEATPIFVSRMPRRKSTGAAHEATIHSSKMIDEGYILKSVPLTSLTLDKDGEIKDYYEKARQSDPKLYNALLDRLRAFDGIGGAAEAFKDGFILMGRDGHPPLKKVKIQEHSTLNVSVHDGKGVAKNESMIRIDVFHIPEGKDKGYYFIPVYVADTKKPQLPTHAVVAHKKQEDWKEMREEDFIFSVYPSELLKISFKKTTKFHLPKTSKNSSLSKEYMTQEELVYFISAHIGVGAIKVKTHDGAYVSEPGIKTLLLLEKYTVDVLGSISPAPKETRQGFGKKEG

SEQ ID NO: 6896 - protein, 1064 aa, synthetic construct
  REGION 1..1064: note = Synthetic
MRYRLALDLGTASVGLVAYELNETNAPLGVAYHVVRVFDEPVLPAKGGSVGEPKKAARRQARQQRRQLERRARRLRGLAQVLGEALGLDLRSVPPDPGQHIHALRSASAHERVELPGLLNVLLNLAKRRGYAGGFRAVADDNDDSQVKAGIDRLRTEMAERGCDTLGDYLSWRAANGQTLKLKTVGLYADRDMVREEFERIWRIQATHHPRIAAGGEALRKRVAERIFHQRPLRSPAPAVGNCPLEPSLRRAPMAQPAAQAFRIEKQIADLRWTNGRWSQPLSPAQRGVVRDLLAQHPRQTFTQIYRALQKRGCPRPEIGWLNLDRSSREELIGNKTDAAMARLGLAEDWAGLEAGQRVTVINLLADIGSPETLCIPGWHEQLVTGGKQRRKRVLPAAVVAFIDKLAAQPAFGRLGAMGLDGGRSAYCVKTLCRLADAMGEKGIDEHEAVARLYEAPKTQQQATAAELGRPRPTGNTVVDVALRQVRYTVNAAIRHLGTPPTQIIVELSRDMALGINRRREIEYRINKNQRARRQAAEAIAAHDGRVTHSAIRRYLLWREQDEQWCPYCERPINLSDALDGNATHYEHIYPKSLTRIGKQRDFLVLAHRDCNDFKGNRTPWEAWGEDDARWQIIKQRAARFREKRLNGKAKQLLAQEPVDRALNDKVINDFSARQFHESSWIAKQAARWLREVCGDVAVSRGMLTAHLRRSWALETVIPEARLAEGLRLRDTDGKLVSAAEFQRYRRYWNGDRSGEATERELDKRIDHRHHLIDALVIGLCDRSLYQRMARDYKQAQERGETRLTLRVKPPLPNLRAVAVELVRHCNLSRKADRYVSGRLFQDTAYGCTPDGQHLTKRKAVAELGGGAKATLSKVRKDIDKIVHESTRDLVRQAFERRVAAGRSPAEAISEPIQHPAYGTVIKRVLLLDEKTEGTKAVDHYARGDHLFKHLKPFDNAYLELVAGSGSKFEKRLIRRYEAKNHTMPVGVVGFAKGDTVRHPDNGLHYVVGQIKTERGGVLLLARLVETDPVDKVKGSPGFAYMSSGPALAKLEIVPDVIAPDSSD

SEQ ID NO: 6897 - protein, 1058 aa, synthetic construct
  REGION 1..1058: note = Synthetic
MGYRLALDLGTASIGLVAYVLDGDGTPVEVAYHAVRIFDEPLLPPKKSGVGEPKKTQRRLARQQRRQHQRRARRLGKLAHLASRLGLDPAKVKPDAGQSIHRLRAQAAHGRVELADLLRVLLKLAKRRGYGGGFRNRDDDEDAGVVKSGIDKLRAQMHDQGCDTLGDYLNTRVSEGLTLRLKSAGLYADRQLVLAEFECIWDEQSRHHPILAVRDETLRNDFRDAIFYQRPLRSPAPMVGNCPLEPSLRRSPTAQPAAQAFRIEKHLADLCWGNGRRRSPLTKEQKGVVRELLREHPSVNFDRIYRELEARGCPRPPLYWLNLDTSNRDELPGDKTAAAMRRLGLFAEWSALTAGHQVTVINLLADVGSPELLQDPAWHQTLMSGKGDQMRVRQFAPEVIAFVDRLAANPRFGRMAKLHLDTGRSAYCIKALRSLTEAMQVNGCDEHYAIAQVYPRSRQSEPALGDRLAMPPHTGNIVVDVALRQIRRAVNTAIDHLGGPPAQIIVELSRDMALGVKRRAEINDRIGKNTRARRQAAAAIAEHGGTADRNTVLRYLLWTEQDQHWCPYCDRPINLSDALDGAATHYEHIYPRSLTRIGKQRDFLVLAHRECNDAKGDRTPWQAWGQGQDPERWQLIQDHAERFKQTHRYGKARQLAAQETADSFIDEQVIQDFSARQFHESSWIAKEAAAWFRTICRDVMVGRGTLTAHLRRTWRLETVIPEIRIEEGLQVLDTDACIIDPETFRRYRAHWEGHSAGERTDRRPDKRIDHRHHLIDALAIGLCDRSLYQRMARHYKAVTEAGETRMRLVVEPPLRPLRDLAVALVRDCNLSRKPDRHAGGSLFLDTAYGRSADGQRLLIRKEVAKLGGGTRPSADKIRADIARIEHASTREILSRAFEERLAAGCTPAEAIGDPIEHPDYGNQIRRVALVADGNSGAHCVRHGDRQPGLFKLLRPEGYAFMEVISNPSGPPVVALVPHHLVPRRTSSPGACRFYKGDTVRDTKDGLIFVVGQIKSEGGGALILGRWMETRPVDKLNGANGYRKVSGKGLLRLELLQDV

SEQ ID NO: 6898 - protein, 1122 aa, synthetic construct
  REGION 1..1122: note = Synthetic
MNPGLRKRQTAAEATVWYRQHQHSRKSTSALLPIVPTIGTPDTLRKVAQAFKGGKAPMRYRLALDLGTASVGLVAYELNDDDAPVGIAYHAVRVFDEPVMPSKSSSVGEPKKAARRLARQQRRQHGRRARRLRGLAQVLRDALSLDLTAIPPDPGQRIHALRSAAAHGRVELPHLFNVLMHLAKRRGYSGGFRDTDADEDAGVVQSGISQLRAEMAEHGCTTLGDYLHWRAGKGQTLRLKNAGLYADRKLVRDEFEHIWLEQAKYHAVIAKGGATLREQVAERIFHQRPLRSPAPLVGNCPLEPSLRRSPMAQPAAQAFRIEKQIADLRWTNGRWSSPLSAEQKSIVRELLEQHPQQTFTQIYHEFQRRDCPRPSIGWLNLDRSSRDTVTGNRTVAAMARLGLAEAWAALDPGHQITVINLLADIGSPEVLSRAGWHEQLLTGGKEPRRRVLHEAVVRFIDALAAKPKFGRLTAMGFDSGRSAYSIKALRRLTAVMYEQGCDEHAAIAQCYPSRHEQRQAPGPELPPPRQTGNTVVDVALRQVRCAVNVAIRALGTTPAQVIIELSRDMALGITRRREIEGRIDKNRRARQKAAAAIAAHGGDVTQSAIRRYLLWQEQDEQWCPYCDRPINLADALDGSVTHYEHIYPKSLTRIGKQRDFLVLAHRECNDAKGSRTPWQAWGQGQDPERWRSVQQRAARFKETKRYGKAKQLLAEETADRAIDDDVIKDFSARQFHESSWIAKEAASWLRTICTDVMVSRGMLTAHLRRNWGLETVIPEARLAEGLRLKDTDGNEIASDDFDLYRRYWNGDKSGARTDRELDKRIDHRHHLIDALVIGLCDRRLYQRMARDFKQAMERGEARLSLVTKPPLRDLRTVARHLVDHCNLTRKPDRFVSGNFFKGTAYGRTADGTHLLLRKAVSELGGGAKATLDKVRKDIANIAHDSTRDLVQQTFERRIAAGLSPARAITDPIEHPAYGTVLKRVLLMDQRAQDAKMVTHGKRNPNLSKHLKPDGYACLELFSGEDGSPKTSLLPHHVAHTTLARCGSRRYFKGDMVRDPKDGAIFVVGQIKAEDNGSLMLARVTETAKIEQLKGTKGFRKVSGRQIARLEVLTDVCSSRTAH

SEQ ID NO: 6899 - protein, 1074 aa, synthetic construct
  REGION 1..1074: note = Synthetic
LGAKIQNRHVSYKFFLHFLQRSHTMAKVLGLDVGTNSLGWALLDTAAQTIIDCGVRIFSGALTPKKDKLSNADRRQFRLTRRQFERRRRRKEKLRHRLQQLSMMPEDIKQFYRMNPYALRAMALDKQLTLHELGRVIYHLNQRRGYRSNRKSTNEEEEKGTIFKGATDKPGINTVEEALSSGKFRTLGEYLASLDTTTQRIRNRFTLRSHHEDEFNRIWKKQAEFYPDILNQAQYEYIAKKCVFFQRPLKSQKKNLGKCTLEPKKYKAPKSQPLSQMFRLLQNLNNLRIITPDRVTDESRMLTTKEREVIFAYLSSHDILDTEKKFPAALKTELGYGKRDSIAFNIKKLHGLKTEIALRNALGDTHFLSLSDEEKHQMWYILYGAEHEEWVKNYAKSHWQCNDEQAKQLAAMRLESGYMSLSSKAMRKMMPFLENGDRYDEAAFAAGYHHSDLRQDKGVADRIPPINTIRNPIVMVSLTQVRTVVNCLIDEYGKPDEIHVEMARDLKNSLSKRLEIEKQQKDRAKQREKIKEILRQYIANPSNNDILRYELWQEVNEHCPYTGDYISPSRLCSDHSDIDVEHILPYSRTLDNSVMNLTICVREENARKGDRTPWEMYGGDEEMFEELCRRINTEKMSDEKQKRFRMNDKQFEEFMTSGEGGDFLDRQLHDTAYIARETKAIMETICTNVIITKGTATADLRHLWGLNNILGKKNTIDNIAIKNRDDHRHHAIDAIVIALTSRRTLQLLSSWNASEKFNRRTKARFQLPRPWDDIFLQSQKAIANIIVSHKVNKRVRGALHEETVYGRLKMPFTGMPAYNKEKQQPYYVVRKPLSGMTDTNPVYKIVDPIVKETVYQRLIEKGINEHDLRSAEKNEKAKKIKIPKDAFAEPLYMPAAEGKKAPRILSVRIAVPATKMFPLHSHGDSAAFVEPGNNHHVTIFEREGRRKTERKEYVISLFEAVRRVIQKQSPIQRSMDGWDFICSLQKNELFIRDYHPDEINLEDKSQYHTFAESVYRVQKFTEGEINLRLHRLAVLKAVIDNKEVDIGRWICAASTLSGFKVRISPIGKLEIADD

SEQ ID NO: 6900 - protein, 1512 aa, synthetic construct
  REGION 1..1512: note = Synthetic
MNKIIGLDLGTNSIGWALRNPDLTENQIEKFGVITFPTGVGKDDKGKLTKSYAAERTKKRSTRRLYQARKYRLWATLENLINEGYCPLTIDDLNKWRHYSKDEARKNNNAGRTYPVWNTAFDAWIKLDFDNDGKPDYTSPYQLRKELAEKKSDFTQEKNRFKLGRALYHIAQRRGFKSSRKGADDVKEKETNDNEVMDLQYSEKKKNKVITELFEKYSNAKTIGWLFALLENDKIRVREAITQYAIRENYKDEIKHIFQLQGLKFGDALYTKLVETGKNKNDGSIFYKRPLRSQKGLVGKCTLEPNKYRAPISHPSFETFRAWSFLNNIKYKENNEWKQLPLELKQEIYSELFFRKSKGYFPFSEIVTFLKKKGKNWELNYKPKTTVTACPVSARLKDIFGYKWNETITKKDVEGKIIHITHKDHNGNELGRIPLEQPFYQDAWHVLFNYEDQEYVYEFAKDKLKPSEERKSEKEKSEVEKFVIAWNACPVGYGMLSLNAINKINVFLQKGLIYTEAVLLANIPEILGKELWQQNEQLLLASINGVIVENRNQKSILSIVNNLISKHKNLGENKFGHKDNSYKLVDSDLKDIQIAIEEQFGATKWESLPDEEQQNILGTVKDCYQAYFSKQGIVRDNGSEERIVAIQSNGKNYHKTDTGYYRLPKLIDTLKVFLQDNFENLDEKQLSKIYHPSEINIYPPAKEDKDGIIKLGSPKTGSFKNPMAMRTLHELRKLMNYMIETNQIDNETRVVVEVARDLNDANKRWAIEAWQRQREAENQEFAEAINQLLNDDKTIKANATNNDDIDKLRLFYEQNTEQTLPEVVVMEEDENGKKKKKKPADKDEAIRWSGHGKKLIDKYRLWKEQGYQCLYTGKFIKLTDLFNENVIDFEHTVPRSISFDNSLANLTVCFADYNRTIKKNQIPSQLPNYSEDSGGYTAILPRLDAWKEKVERIKQQIDFWNLKSKRGSKSVMIAKGSNISTKDDAIRQRHLWQMELDYWKNKVDRFTITEITSGFKNSQKVDTQLISKYAFHYLKTYFDKVDVQKGSITAEFRKIYQLQVADEKKDRSKHSHHAKDAAVLTLIPVAAKRDEILERYYKAKELNPKASFTEDPYKGFKREFVWRIDDNVLINNITNNQELTPAKRKVRKRGKEVIVNGKNRWATGDCIRGQLHQETFYGAIKPARRGEKGNIEKDENGKFVQEDNIKYVLRVPFNADFTGVDKIVDEGLKRQIQEHIKRAGNFKKAFEEGIYLLDQNGKPHGNKIRHIRVYASVSEPLAIKKQTNLSDKEYKQHYWAGNGENIVCAYYKNDHLDKKGNIKKDRELEIINLFEISEFKKHNLFDANGQLELYRKDKDNKTIIDDNGNKQTPYAILKAGMKVVFYDERIEELKQQNNEKDCDYNKRISYRTYRIVKFTGGRLTFQHHLEARNDKELENAYPENIVFKTDEKNKDVAYGGRGTSGFTEKVSDALKFNGHNNYEPFPKLLYSVNWLDFVVEGYDFKIEMDGSIKWLK

SEQ ID NO: 6901 - protein, 1470 aa, synthetic construct
  REGION 1..1470: note = Synthetic
MSKIFGLDLGTNSIGWALRNPDLKENQIEKFGVLTFKKGVGSEKGVEYSFAAKRTKKRSTRRLYQARKYRLWVTLENLIQEGYCPLTIEDLNKWRHYDKAEAHKNNNAGRTYPVWNTAFDAWIKLDFDGNGKPDYTSPYQLRKELAETKLDFSQEINRFKLGRALYHIAQRRGFKSSRKGADDVKEKETNENDETLNLQYSEKKKNKVIAELFEKYTEAKTIGWLFASLENDNIRIRESIAQYAIRENYKDEIKYIFQETQKLGLEHSLYKKLVETGKNKNDGSIFYKRPLRSQKGLIGKCTLEPNKYRVPISHPSFEAFRAWSFLNNIKFKENNEWKRLPLELKQEIYSELFFRKSKGYFPFSEIAMFIKKKGKNWELNYKPKTTITACPVSARLKEIFGDKWSEIITKKDSNGEVVYITHKDHNGNELGKIPLEQPFYQDAWHVLFSYEDQEYVYEFAKDKLKLSEERKSEKEKSEVEKFVIAWNALPVGYGMLSLNAINKINVFLEKGLIYTEAVLLANIPEIIGKDLWQQNEQLLLGSISEVITENRNQKTILNIVNSLISKHKNVEVTERNGYRNNNYLLADSDFQDIQAAIEEQFGANKWNGFPDEEKQHILDTVKDCYQAYFSKQGIVRDIGRQERILAVQSNGKNYYKTDTGYYRLPKLIDTLKEFLQDKFKSLDEKQLSKIYHPSEINIYPPAKEDKDGVLKLGSPKTGSFKNPMAMRTLHELRKLMNYMIETKQIDNETRIVVEIARDDKGKLDYANKRWAIETWQRQREAENQEFAEAIKQLLNDDKTIKANATNKDDIDKLRLFYEQNTEQTLPEVVEMEEDEKGKKKKKKSNEKDEAVRWSGHGKKLIDKYRLWKEQGYQCLYTGKFIKLTDLFNENVIDFEHTVPRSKSFDNSLANLTVCYADYNRSVKKNQIPTALSNYETEHNFGGSIGRCSAILPRLDAWKEKVERIKQQIDFWKTKSKKAADKSWKDDAIRQRHLWQMELDYWQNKLDRFTITEITSGFKNSQKVDTQLISKYAFHYLKTYFDKVDVQKGSITAEFRKIYQLQVADEKKDRSKHSHHAKDAAVLTLIPVAAKRDEILEKYYEAKEKNPKATFTEEPYKGFKREFVFGIDDSVLINNITNNQELTPAKRKVRKRGKEVIIDGKNRWATGDTIRGQLHQETFYGAIKPAKRGEKGNIEKDENGKCIQEDNIKYVLRVPFNADFTGIDKIVDEGLKKQIQEHVKRVGNFKKAFEEGIYLLDKNGKPHGNKIRHIRVWASVSEPLAIKKQTNLSDKEYKQHYWAANGENFAYGLYENEHKQRGFKLISLFKVSELKRTSNGLTEMFEQEIETQKPKAKVQLKYVLTSGLKVLFNKDNLDELQDLANDIKQISNRLYVIDGFEKDGRIRFSHNLDSRSANDLKELENVYGKAYWQGFSQVIFNNPLPKLKLSKDSLNFAVEGYDFKIEIDGTIKWLK

SEQ ID NO: 6902 - protein, 1470 aa, synthetic construct
  REGION 1..1470: note = Synthetic
MIQNRVYVSRFDHNFLLPVTNEVYCLSQQKSVYMNKVLGLDLGTNSIGWAIRTVDEPDNQITHFGVLTFNKGVGVGKTGEFSYAAERTKKRSARRLYQARKYRLWKTLEHLINEGYCPLSIAELNKWRYYNKEEALLNKNGGRVYPLHNKLFDAWIKLDFNGDGVPDYTSPYQLRSELADRKIDLDVEQNRFKLGRALYHIAQRRGFKSSRKVAGENMPSEDAEEVVDLKKSEKKKNQEIIKLLEENPEAKTIGQLFALLERKNERIREKIAQHAIRENYKDEIKFIFSVQELGSAHPLYVKLVESGKNKNDGSIFYKRPLRSQKGLVGRCTLEPHKYRAPISHPAFETFRAWAFLNNIKYKVINDEGKDWKRLPLDLKQFLLKEKFLRKSRPYFSFAEIEEVVKARGFNWKLNYKSTTTIAGCPVSVHLKGIFGEDFLNVKIQKPKAPNTEKDYYDIEDIWHVLFSFEDQEFVSEFGEEKLRLDQEKTRRFVNAWNAIPEGYSMLSLKAIRKINRFLEKGLIYTEAVLLANLPEIIGEDKWAEKEEYFLEKIGFIISENRTQKSILAVVNNLISKHKNLTAIEKFGYKDNTYRLDNSDIRDIANTISDTFGKEKWEHLSSTERDRIFESVKDCYQAYFINSGLRRVDINGERHFEVHTNGCIYYKTDSGYYRMPKLIDTLADFLRDNFGLNEKVRDLIYHPSEIEIYPPAKPDKDGVLKLGSPKTGSYKNPMAMRTLHQLRKLINHLVEKGTIDSDTRVVVEVARELNDANKRWAIEAWQRQRENENKEFAEAIARLLKEEEGIQANPDSPADIDKLRLFSEQVDEETLPPVEQEVEQEDEKPSKKKKEKKRADAVFWTGMGKNLLDRYRLWKEQGCLCMYTGKVIPLSELFRPNIIDIEHTIPRSISFDDSMANQTVCYADYNRQVKRKQFPTQLVNYDKDYGKFKAILPRLDAWKDRVERIKQQIEFWQNNSKKALDKDTKDKAIRQKHLWKMELDYWQNKLDRFLMTEVTAGFKNSQLVDTQLISKYALHYLKTYFNRVDVQKGRIVSAFRKIYNLENVDEKKDRSKHSHHAKDAAVLTLIPVAAQRDNILAQYYEARENNLPFFLAPYKSFSRQHIVAIEDAVLINNSVKDQTLTPGRKKVRKRGKEQMIPGTNRIMWATGDCIRGQLHQEKFYGAIKRALRDETGKLLKDENGKILHEEEVTHVIREPFVFKKDDVSPGFKSLDDIKKRVVDPKLVRDIEDQVSKHGSLREAMAHGIYLLDKEKKPHGSPIRHVRVWANIKEPLKIKLQTNLSRKKHKQYYLAANATNSYFAIYEGEGKRTFELKNLFDIAKTKNQIPVSSVNDLFEARKIVSKGKKQIEMGLKYVLRSGLKVLFRKDEHENLKSLDVVELLKRLYVFTNFEKDGRLNFRYHLEARKDISEEYSDSEIDFEIPKPTLRFSYNKYDFLLEGVDFDVEMDGMLLWK

SEQ ID NO: 6903 - protein, 1446 aa, synthetic construct
  REGION 1..1446: note = Synthetic
MNILGIDLGTNSIGWAIRNPNLKGNQIEKFGVITFNKGVGLGKTGEYSYAAERTRKRSTRRLYQSRKYRLWTTLEHLITEGYCPLTIENLNKWRHYNKEEAIKNSNAGRVYPIGDLAFDAWIKLDFNVDGKPDYTSPYQLRKELADTKLDFTKEENRFKLGRALYHIAQRRGFKSSRKSAEDTKDSISGDSEVLDLQYSEKKKNRVIAELFEKYNEARTLGWLFALLEENKIRIRESVAQYAIRENYKEEIKYIFQLQEISFDHPLYTKLVESGRNRNNGSIFYKRPLRSQKGLVGKCTLEPNKYRAPISHPAFETFRAWAFLNNIKYKEIADKSSDWKPLPLELKRDIYRDKFFRKSKPYFPFFEIEEFIKARKKGWVLNYKSKTTVMGCPVSARLKDIFGDDYLNIKISKTKAAKSNKSNYDIEDVWHVLFNYEDQECVSAFAEQKLKLDSEKVKQFVIAWNALPVGYGMLSINAINKINKFLEKGLIYTEAVLLANIPDIVDEKLWMDNENFFSQNISNVIEENRQQKTILNIVNTLVSKYKNLEPGERFGVKDDSYKLDDSDYNDINLSIEEHYGKNRWNEFEEDKKQTIFDSIKDCYQAYFNVSGLKRKDINGKRHFEVHSNGKVYYKTDSGYYRLPKLIDTLSEFLRLKFNVEEKSLQKIYHPSEINIYPPAKPVNGVIKLGSPQTGSFKNPMAMRTLHELRKLINFLIETNQINDETRVVVEVARELNDANKRWAIEAWQRQREAENQEFAKAIEQLLSEERGIIADPKNDSDIDKIRLFYEQNNEHTLPPVLERENGKTKNKRNDVKDESVRWNGNGKKLIDKYRLWKEQGYRCIYTGRFITIVDLFKEGVIDFEHTIPRSKSFDNSLANLTVCYHDYNRIIKKNRIPTQLKNYDSLYDYGPNIGVCTAILPRLDTWKEKVERIKQQIDFWTAKSKRAVDKQWKDDAIKQRHLWKMELDYWQNKLDRFTITEITTGFKNSQKVDTQLISKYAFHYLKTYFEKVDVQKGSITAEFRKIYKLQSPKEKKDRGKHSHHAKDAIILTLIPSAAKRDVILEKYYEAKEKNLSFTETEPFKGFRREFVSGIDETVLINNIIKNQSLTPAKRKVRKRGKEQHIPQTNNPMWATGDTVRGQLHQETFFGAIKPAKRGEKGNLLMDENKKFIQEEKERYVIRIPFQFKKDANTPGFKTMEEIKQQIVDEGLKKQIEKQVNDIGGLKEAFEKGLYLLDKNGRPHGNKIRHIRVWANVSEPLKIKRQTNNSKAEYKQYYLAANATNSYFALYISEDKKEFDFRNLFETAKITSLNTVKNPKELFPPVISIVKGKKAIELPLVYVLEVGTKVFFRKDKNEDLSILSNNELSKRLYVYTNFEKDGRLNFKYHLEARNKIEEAYKDSEIDFDNPKPTLRFGYAKYSFLVEGCDFRIEMDGTIKWKDLRAPQD

SEQ ID NO: 6904 - protein, 1443 aa, synthetic construct
  REGION 1..1443: note = Synthetic
MKILGIDLGSNSLGWAIRNTDLTGSQIEKFGVLTFNKGVGVGKTGEYSYAAERTKKRSTRRLYQSRKYRLWATLERLISEGYCPLSIEKLNRWRHYNKEEAIKNNNAGRVYPIEDLAFDAWIKLDFNNDGKPDYTSPYQLRKELAETKLDFAKEENRFKLGRALYHIAQRRGFKSSRKSTDDTKEKETIDSDVLDLQYSEKKKNKRIIEEFNKYPEAKTIGWLFALLEKDKARIRESIAQYAIRENYKEEIKYMFQFQNLKLEHPLYIKLVETGKNRNDGSIFYKRPLRSQKGLVGKCTLEPKRYRAPISHPAFETFRAWTFLNNIKYKDAGDKNSLWNPLPLELKKEIYDDKFFRKSKSYFPFSEIIDFVKAKGNNWELNYKPKTTVTGCPVSARLKDIFGDNYLSIKISKEKASKTNKTYYDIEDIWHVLFNYEDQEYVSAFAEQKLKLEPEKVKQFVIAWNALPVGYGMLSINAINKINRFLVKGLIYTEAVLLANIPEIIGEELWIGNENFFLQNIGDVIDENRLQKTVLNIVNTLVSKHKNLDSNEKFGVKNNNYKLDDSDHREVNVAIEEQFGANRWSEFTEDKKQQIFNAVKDCYQAYFITSGLTRKDINGERYFEVHSCKGKYYKTDSGYYRLPKLIDTLGEFLQLNFGVEDKSLHKIYHPSEINVYPPAKPVNGFLKLGSPKTGSFKNPMAMRALHELRKLINYLIEINQIDSDTRIVVEVARELNDANKRWAIETWQRQREAENQEFAKAIEQLLNEEKEIVADAKNNNDIDKVRLFYEQNTEQTLPSVIEAENDKSKKKRDVFKDESVRWNGHGKNLIDKYRLWKEQGYRCMYTGKIITLADLFKEGVIDFEHTVPRSKSFDNSLANLTVCYHDYNRTIKKNQIPTLLSNYDKDYDFGGKVGACTAIFPRLDAWKEKVERIRQQIDFWTTKSKRAIDKQWKDDAIRQRHLWKMELDYWQNKFDRFTITEITTGFKNSQKIDTQLISKYAFHYLKTYFEKVDVQKGSITAEFRKIYRLQAPDQKKDRSKHSHHAKDAAVLTFIPTAAKRDAILEKYYEAKENNLPFTEVEPYKGFKREFIWNIDDTVLVNNITNNQSITPAKRKVRKRGKEQFIPGTNNTMWATGDSVRGQLHQETFYGAIKPAKRDDKGIVQKDENGKFVQEEKVKYVVRVPFQFKKDTNTPGFKTLEEIQKQIVDEGLKKQIEKQVQQSGGLKEAFEKGIYLLDKNGKPHGNKIRHIRVWASVSDPLKIKKQTNISKIKSQEYKQYYWAANATNSYFALYKGDGKKGFAFRSLFETAKVISVNRIKSPRDLFEPLMSISKGKGTIELPLAYVLEVGVKVLFLKEESESLETLPNTELLKRLYVYTNFEKDGRLNFKYHLEARNKIEDEYRDSEIDFNDPKPTLRFSYAKYSFWVEGYDFKIEIDGTIKWTN

SEQ ID NO: 6905 - protein, 1438 aa, synthetic construct
  REGION 1..1438: note = Synthetic
MSKIFGLDLGTNSIGWALRNPDLTGNQIEKFGVITFPTGVGKDDYGRYTKSYAAERTKKRSTRRLYQSRKYRLWATLEHLIKEKYCPLSIDDLNKWRHYDKEEARKNNNAGRVYPVWNTTFDAWIKLDFDSDGKPDYTSPYQLRKELAETELDFSKEINRYKLGRVLYHIAQRRGFKSSRKGADDTKPKDNEEITDLQYSEKKKNKVIEDLFGKYPQAKTIDWLYALLETDKIRIRESIAQFAIRENYKDEIKHIFQFQKLGLEHSIYKKLVETGNNKNDGSIFYQRPLRSQKGLIGKCTLEPNKYRAPISHPSFELFRAWSFINNVRYKSASDSNAYWKTLSLDLKKEVLDKLFFRKSKTYFPFSEIVDFLSKKGNTGQFNYPLKTTVTGCPVSARLKDIFGDDYLNIKIAKEKAPKSQKAYYDIEDIWHVLFSYEDQEYVAEFADKKLKLSPENIKQFVIAWNTFPVGYGMLSINAINKINVFLQKGLIYTEAVLMANIPKIIGKELWPENEKLLLENISGIIDENRRQKTILNIVNNLVSKHKNLKVSEKFGHKDNNYKLDDLDKKDILKAIEETFGTSKWTEKPAQEQQQIFTIVTDCYQAYFKQTGLSVKYIHNEKHFEIKSEKHFYYKTETGYYRLPKLIDTLSEFLLAHFEISEKQIQKIYHPSEINIYPPAKEDKDGVLKLGSPKTGSFKNPMAMRTLHELRKLMNYMIETKQIDNETRLVVEVARDLNDSNKRWAIEAWQRQREAENQEFATAIEELLKTNSSINANAKSNNDIDKLRLFYEQNDEQTLPPVSEEETKGKKKKSFEKDEVVRWGGHGKKLIDKYRLWVEQGYQCIYTGKFIKLTDLFNQNVIDFEHTIPRSISFDNSLANQTVCFHDYNRTVKKNQIPTQLNNYDKDFGGHTAILPRLEKWKEKVERIKQQIDFWKTKSKKAADKQRKDDAIKQRHLWQMELSYWKNKLDRFTITEITSGFKNSQKIDTQLISKYALHYLKTYFDKVDVQKGSVTAEFRKIYSLQVPDEKKDRSKHSHHAKDAAVLTLIPIAAKRDEILKTYYEHKEQKKHYTTEPYKSFKREFVWNIDDIILINNITKNQTLTPAKRKVRKRGKEVFIEGTNKPMWATGNSVRGQLHQETFYGAIKPAKRGEKGNIEKNEKGQFVQEEKIKYVVRVPFQYKKDSNTPGFKTLDEIKKQIVDGGLKSQIEEQVQKAGGLKEAFDLGIYLLDKSGKPHGNKIRHIRVWASVSEPLAIKKQTNISQKNIEYKQNYYAANATNSFFAIYKGEDKTDFDYRNLLETSKIINTGQIKKHADLFEPKISFKKSKKEIELKLCYVLIPNVKIIFLKDDEQLEDVKSFSVIELTKRLFVFTNYEKDGRLNFKHHLEARNKIEENYSESECDFNNPTPTLRFSYAKYNFLVERYDFEIKPDGEITWID

SEQ ID NO: 6906 - protein, 1436 aa, synthetic construct
  REGION 1..1436: note = Synthetic
MNKIFGLDLGTNSIGWALRNPVLAENQIEKFGVLTFNKGVGLGKTGEFSYAAERTKKRSTRRLYQARKYRLWATLEVLITEGYCPLSIDDLNKWRHYNKEEAVKNNNAGRVYPVNNSAFDAWIKLDFDNDGKPDYTSPYQLRKELAEIKLDFTKEQNRFKLGRALYHIAQRRGFKSSRKGADDSKENETNDNEVIDLQYSEKKKNKAIAELFEKYTNAKTIGWLFALLEKDKIRIRESITQYAIRENYKDEIKFIFQTQELKFEDSLYTRLVETGNNKNDGSIFYKRPLRSQKGLVGKCTLEPNKYRVPISHPAFETFRAWAFLNNIKYKENNEWKQLPIELKQEIYTELFFRKSKSYFPFSEIVAFIKKKGASWQLNYSPKTTVTACPVSARLKDIFGDDYLNVKIEKAKAPKSDKAFYNIEDIWHVLFSYEDQEYIADFAEQKLKLEPEKIKQFVTAWNACPVGYGMLSLNAINKINVFLQKGLIYTEAVLLANIPEILGKGLWQQNETLLLDSISEVIAENRQQKTILNIANNLVSKHKYLEANEQFGRKDNNYKLVESDLYDIQTAIEDQFGALKWNSFPEDEKKIISDTVKDCYQAYFAKQGIIRDTGNEERIVTVQSNGKKYYKTESGYYRLPKLIDTLKEFFQDNFEHLSEKKLSKIYHPSEINIYPPAKPDKDGVLKLGSPKTSSFKNPMAMRTLHELRKLMNYMIESNQINSETRVVVEVARELNDANKRWAIETWQRQREAENQEFAEAIKQLLNEDGSIKANAESADDIDKVRLFYEQNVEQTLPEVAETEEDEKGRKKRKKSTQKDEAIRWKGHGKNLIDKFRLWKEQGYQCLYTGRFIKLADLFNENVIDFEHTLPRSKSFDNSLANLTVCYADYNRTVKKNQIPTQLPNYEIEHDFGGKIGKCSAIQPRLEVWEEKVKRIKQQIDFWITKSKKAADKGWKDDAIRQRHLWKMELDYWQNKLDRFTITEITSGFKNSQKVDTQLISKYAFHYLKTYFDKVDVQKGSITAEFRKIYQLQASDEKKDRSKHSHHAKDAAVLTLIPVAAQRDAILERYYEAKEKNPKATFTEEPYKGFKREFVWNIDDNVLINNIANNQELTPAKRKVRKRGKEVFIEKPDGTKVNKWATGDSIRGQLHQETFYGAIKPAKKGDKGNLLKDEDGKFIQEESLKYVLRVPFTADFTGVDKIVDEGLKKQIKEHAQRAGSFKKAFEEGIYLLDKNGKPHGNRIRHIRVWASVSEPLAIKKQTNLSDKEYKQSYWAANATNSFFAIYKGEDRKDFDFRSLFDSAKIKSINPVKNPKDLFEAKITITKGKKVTELPLTYILEVGTKVIFRKDEKEDLKSLSNSELLKRLYVYTRFEKDGRINFKYHLEARSDSDITERYKDSSVNFENPLPTLRLVLNKCNFLVEGYDFDIKMDGTIKWK

SEQ ID NO: 6907 - protein, 1432 aa, synthetic construct
  REGION 1..1432: note = Synthetic
MNKIFAVDLGTNSIGWALRDPNLTGNQIEKFGVLTFNKGVGLGKTGEYSYAAERTQKRSTRRLYQSRKYRLWATLESLIKEGYCPLSIEDLNKWRHYDKDEAIRNNNGGRVYPINNHLFNAWIKLDFNNDGKPEYASPYQLRKELAEINLDFTKIENKFKLGRALYHIAQRRGFKSSRKTTDEHKEQDISDDEIVDLQRSEKKKNKVITDLFEKYPEAKTIGQLFALLESDHVRIRENFAQYAIRENYKDEIKYIFLFQKLGLEHSIYTKLVEKRKNANDGSIFYKRPLRSQKGLIGKCTLEPNKYRAPISHPDFEIFRAWSFLNNIKYRPVTDKTSTWQPLPLELKEHIYHEKFFRKSKAYFPFAEIADLVKKTGHNWELNYRANTTVTGCPVSARLRDIFGVDYMQLKIEKEKNSISGKSWYDIEDIWHTLFNYEDQEFVFDFAVEKLRLDETKAKQFVTAWNTMPVGYGMLSLNAIRKINTFLRKGLIYTEAVLLANIPSIIGQDLWLNNEQFFLQHIGALIDENRRQKTILNIVNNLVSRHKNLDQKYGYKDSSYILDNQDKKDILTAVEDTLGIKKWLEYNPIEKEKIIQTITDCYQAYFKTSELKRKDINGERHFEIKSGNDFYYKTDAGYYRLPKLIDTIAHFVQLNFSVSNKPLSFIYHPSEISIYPPAKPDKNGLLMLGSPKTGAFKNPMAMRALHELRKLINYMIKNNHIDTDTRIVVEVSRELNDTNKRWAIEAWQKQRESENKEFAQAIEHLIFTNPDISASNQNKQDIDKIRLWYEQTEEETLPPVTNTKKDIKGMRWTENVKKSYKEIISQKSLVDKYRLWKEQGCQCIYTGRLISITDLFNENVIDFEHTLPRSKSFDNSLANLTVCYADYNRTVKKNQIPSQLVNYETSHNGYSPILPRLEKWKEKIERIKQQVDFWKSKSKKAIDKQRKDDSIRQRHLWQMELDYWKNKVDRFTITEITSGFKNSQKVDTQLISKYALHYLKTYFEKVDIQKGSITAEFRKIYKLQMPDEKKDRNKHSHHAKDAAILTLIPVAAKRDAILEKYYNSKEQKEKFTEAEPYRGFKREHILNIDDTLLIHNIVNNQSLTPAKRKVRKRGKEQFIKDSSNPMWSTGDSIRGQLHQETFYGAIKPARRDAQGILQKDESGKFIQEDKIRYVIRVPFQYRKDSNTPGFKTLEEIEKQIVDVGLKSQIRKQVEKAESLKEAFEKGIFMLDKNGRPHGNKIRHIRVWASVSDPLIIKPQTNLSKIDYKQNYYAANATNSYFALYSGDEKKSFKYRNLFDVANILSKNGARKPEELFEPSIISKEKKDLQLKLSYILESGIKVIFYKEKEDLKAFSISELSKRLYVFTNFEKDGRLNFKYHLEARIKIDDNYSESELDFSTPKPTLRFSYAKYEFLVETYDFTINMDGSIKWHK

SEQ ID NO: 6908 - protein, 1425 aa, synthetic construct
  REGION 1..1425: note = Synthetic
MKKIFALDLGTNSIGWALRNPDLTENQIEKFGVLTFNKGVGLGKTGEYSYAAERTKKRSMRRLYQSRKYRLWATLENLINEGYCPLSMEDLNKWRHYSKEEALNNNNGGRVYPIDNLVFDAWIKLDFNNCGKPEYSSPYQLRKELAEVKLDFNKEENRFKLGRALYHIAQRRGFKSSRKGADDVKEREDDENEVVDLQYSEKKKNKVISELFKQYSQASTIGYLFALLENDNVRIRESIAQYAIRENYKDEIKYIFNFQDLDLNHKLFMKLVESGKNKNDGSIFYKRPLRSQKGLIGKCTLELGKYRAPVSHPNFETFRAWSFLNNIKYKPLEDKAAYWQPLPIDLKKDIYINKFFRKSKSYFPFAEIAEFIITKGNNWELNYKPKTTVTGCPVSARLKEIFGEDYMHIQIPKQKALKSNKSYYDIEDIWHVLFSYEDQEFVSAFATEKLNLNDVQTKQFVIAWNAMPVGYGMLSINAINKINNFLKKGLIYTEAVLLANIPSIISNELWTKNEQLFLENISDLINENRRQKTILNIVNNLVSQHKNQDQKSGFKDSSYQLNSSDKQDIFNAIEDTFGSKKWKEKNDADKEQIVNTVTRCYQAYFKTSGLTRKDIKGERHFEIISDNHFYYKTDSGYYRLPKLIDTVVEFLQVHFDVNDGQLKKIYHPSEINIYPPAKPDENGILKLGSPKTGSFKNPMAMRTLHELRKLMNYMIETDQIDSDTRIVVEVARELNDSNKRWAIEAWQRQREAENQEFALAIEELINAIPEISANSKNENDIDKMRLWYEQNDEETVPAIADAKKEVKGIKWSENIKSSYKQISTQKLLIDKYRLWKEQGCQCIYTGKIISISDLFNENVIDFEHTLPRSKSFDNSLANMTVCYADFNRTVKKNQIPFTLNCYDEILPRIEKWKEKVERIKQQIDFWKTKSKTASEKQWKDDAIRQRHLWQMELDYWKNKVDRFTLVEITSGFKNSQLIDSQLISKYAFHYLKTFFEKVDVQKGSVTAAFRKIYQLQVPDEKKDRSKHSHHAKDAAVLTLIPIAAKRDAVLEKYYECKENKKPFTETEPYKGFKREFVWGIDDSVLINNITNGQALTPAKRKIRKRGKEQFIDGTNQPMWATGDSIRGQLHQETFYGAIKPAKRDEKGTILKDDKGSFILDEKIKYVIRVPFQYKKDSNTPGFKTIEEIEKQIVDEGLKAQIRKQVEKAGDLKDAFEQGIYMFDKKGNKVNKIRHIRVWASVSEPLIIKKQTNLSKIAYKQNYYASNATNSYFAIYIGDDKKDFDFRNLLETAQVLSTNSIKSGKDLFEPSIIITKGKKQLDLTLTYVLENGMKIIFKRDKDDDLKKISNNELTKRLYVYTNFEKDGRLNFKYHLEARSKIEEEYSESEVDFEIPKPTLRFGYAKYDFYVEEYDFKVNLDGTINWK

SEQ ID NO: 6909 - protein, 1429 aa, synthetic construct
  REGION 1..1429: note = Synthetic
MNKILGLDLGTNSIGWALRNPNLTENQIEKFGVITFRKGVGLGKTGEYSYAAERTKKRSMRRLYQARKYRLWATLEHLIKEGYCPLSMDDLNKWRHYDKQEALKNNNAGRVYPVNNDAFNAWIKLDFDNDGKPDYTSPYQLRKELAEKKLDFSRTENRFKLGRALYHIAQRRGFKSSRKGAEESKESNNSDEIQDLQYSEKKKNKVITDLFEKYPEAQTIGCLFALLENDKVRVRENITQYAIRENYKDEIKYIFTEAQKLGIEHPLYKKLVETAPNKNDGSIFYKRPLRSQKGLIGKCTLEPNKYRAPISHPAFETFRAWSFLNNIKYKEGDTLKELPLELKQEIHSELFFRKSKAYFPFSEIVAFLKKKGKDWQLNYSPKTTVTACPVSARLKDIFGDDYLNIKIAKDKKSKSGEGYYTIEDIWHILFSYEDQECVSEFAEKKLKLDSEKVKQFITAWNTLPVGYAMLSLNAIKKINYFLEKGLIYTEAVLLANLPKIIGTELWKQSEQLFLDSIGLIIEENHNQKSILNIVNSLISKHKNLDENKFGHRDNNYKLVDSDLKDIQTAIEEQYGTSKWNSFPEEKKEVVFDTVKDCYQAYFTKQGIVRDSGSAERVVTIRSNNKNYYKTETGYYRLPKLIDSLKDFLRDNFDHLDENKLSKIYHPSEINIYPPSKEDKDGPKLRSPITGSFKNPMAMRTLHELRKLINYLIETNQIDSETRIVIEIAREAKGKLDYANKRWAIETWQRQREAENQEIAAAIKQLLIEYPGIKANPESDDDIDKVRLFYEQNEEQTLPPVIVEGEEEKGKKKKSKKTPQNGEAIRWNGLGKNLIDKYRSWIEQGYRCLYTGKFINLTDLFDDNVVDFEHTIPRSKSFDNSLANRTVCYHDYNRTIKKNQIPTQLPNYDKDFNFGGSIGMCSAILPRLEPWKEKVARIKQQIDFWTTKSKKAADKQWKDDAIRQRHLWQMELEYWQNKLDRFTIKEITTGFKNSQKVDTQLISKYAFHYLKTYFEKVDVQKGSITADFRKIYQLQSPNEKKDRSKHSHHAKDAAVLTLIPVAAKRDAILEKYYEAQENKTSFTIEPPFKGFKREFIWSIDDSVLINNVTNDQTLTPAKRKVRKRGKEVIINGKTRWATGDCIRGQLHQETFYGAIKPAKKDEKGNPLKDENGKFILEEDIKYVQRVPFNADFTSVDKIVDEGLKRQIKEHIKRTGSFKKAFEEGIYLLDKNGHPHGDRIRHIRVWASVSEPLKIKKQTNLSDKEYKQYYWAANATNCYFAIYKDEGKKAATFRNLFETAKILSLNPIKSPEELFEPTLQKQNKLLTLTCVLRSGLKVIFKKDSKEALSLLSNSELTKRLYVYTNFEKDGRLNFRYHLEARNDKDITEKYVYSEIDFDNPKPTLRFGYAKYDFLVENYDFEIKMDGTVTWL

SEQ ID NO: 6910 - protein, 1477 aa, synthetic construct
  REGION 1..1477: note = Synthetic
MNKIFALDLGTNSIGWALRNPDLTENQIEKVGVLTFNKGVGLGKTGEYSYAAERTKKRSTRRLYQSRKYRLWATLENLITEGYCPLSMEDLNKWRHYNKQEALKNNNAGRIYPVSNLAFDAWIKLDFNNDGKPEYTSPYQLRKELAETKLDFTKEENRFKLGRALYHIAQRRGFKSSRKGADDIKEKETDDNEVVDLQYSEKKKNKVITELFEKYPDAKTIGHLLALLETDKVRVRESIAQYAIRENYKDEIKYIFHFQNLGFEHLLFKKLVETGKNKNDGSIFYKRPLRSQKGLIGKCTLEPNKYRAPISHPAFENFRAWSFLNNIKYKPINDKNAYWQPLPLSLKQSIYNDKFFRKSKGYFPFSEISDFIKSKGNNWELNYKPKTTVTGCPVSARLKDIFGDDYLQIQIAKEKAPKSDKAYYDIEDIWHVLFSYEDQEFVSAFATENLKLNEAQTKQFVIAWNALPVGYGMLSINAINKINIFLEKGLIYTEAVLLANIPHIIGKELWHSNEQFFLENISNLIDENRRQKTILNIVNNLVSQHKSLEQKFGFKDGAYLLDDSDKKDIQIAIEEAFGIKKWQEKEHIEKEQIISIVTDCYQAYFKTSGFTRKDINGERHFEIKSGKHFYYKTDSGYYRLPKLIDTLAEFLQLRFEVTDKQLQSIYHPSEINIYPPAKPDKDGVLKLGSPKTGSFKNPMAMRTLHELRKLMNYMIETNQIDSDTRIVVEVARELNDANKRWAIEAWQRQREAENQEFALAIEQLINVTPGITANNNNEQDIDKMRLWYELNEEETVPPITDTKKDIKGIKWSENVKVSYKQIASQKSLIDKYRLWKEQECQCIYTGKTINITDLFNENVIDFEHTLPRSKSFDNSLANLTVCYADFNRTVKKNQIPFTLNNYAEILTRIEKWKEKVERIKQQIDFWKTKSKKASDKQWKDDAIRQRHLWQMELEYWKNKVDRFTIEEITSGFKNSQKVDTQLISKYALHYLKTYFEKVDVQKGSITAEFRKIYKLQVADEKKDRSKHSHHAKDAAVLTLIPIAAKRDAILEKYYESKENKTPFTDTEPYKGFKREFVWGIDDTVLINNISNGQALTPAKKKIRKRGKEQLIEGTNKPKWATGDSIRGQLHQETFYGAIKPAKRDEKGILLKNEEGEFIQEDKIKYVVRVPFQYKKDANTPGFKTFEEIEKQIVDNGLKAQIKKQIDKAGNLKDAFDKGIYLLDKNGNPHGNKIRHIRVWANVSEPLKIKTQTNLSKHEYKNHYWAANGENIICAYYKNDSVDKSGKLKKNRDLEIINLNHAAKLKSFGLVNNVGELEIYRKDKNNEVVVDNNGNKEVPYAFFKTGLKVIFYNSNLDELKQKNNEDIVAYTKRISDRTYKIVKFAGGQVTFLHHLDARDEKQHMEVFAETAFFKKDEKGKDLTYGKRGKNGFTEQIDDYLIHNNGKPWHKLLYTKDWLDIAIEGKDFKVRIDGTITWK

SEQ ID NO: 6911 - protein, 1444 aa, synthetic construct
  REGION 1..1444: note = Synthetic
MSKILGLDLGTNSVGWSIRNTQLPDNQIEKAGVITYTKGVGNSKTGEYSYAAERTKKRSTRRLYQSRKYRLWATLDVLIKEGYCPLSLDGLNKWRHYSKEEARKNKNAGRVYPKDQILFEQWIKMDFDGDGIPNYKSPYQLRRNLVEEKFDFSKEANRYRLGRALYHIAQRRGFKSSRKGSDDVKENTEGADIDLQYSEKKKNKELVTQFQKYPQAKTIGSLFAYLEDDGVRIRENMAQYAIRENFKEEINEIFKFQNISLDSDLYKGLVETGKNKNDGAIFYKRPLRSQKGLIGLCTLEQETRIDPKTNKSFQVGKYRAPISHPSFELFRAWQFLNNIKFKEENNKNSIWKPISLELKVEILNEKFFRKSKAYFPFSEIADFIKKKGYKWILNYKSKQTVTACPVSARLKDIFGDDYLDIKIEKVPSPKENKSHYDIYDIWHVLFSFEDQEFVSAFALEKLKLDEEKTKQFVYAWNALPVGYGMLSINAIDKINRFLFKGLQYTESVLLANLPSLVGEELWSKSEALFIQNIGDVIKENRDEKHIIQIINGLVAKYKNLDQKFGFKNEGYILDESDVQDITDAIIDHYGESVWLSKTKEEADMTFLTVKDCYQSFFKTKELERVDIDGERYFLITSNGKNYYKADSGFYKQPKLKDTLAEYASKTLKIDVLKLKKIYHHSDISIYPPAMPDENGEVKMGSPKTGSFKNPMAMRTLQELKKLLNYLIETNQIDSDTRVVVEVARQLSDSNKRWAIEAWQRQREAENMEFAAAIDELVKQEKVSADSKKEADIDKMRLWYEQNKEESVPEISEVKKEIKGIRWNENKKQSYKDITAKKTDIEKYRLWREQKCICIYTGKIISISDLFNTNVIDFEHTLPRSKSFDNSLANKTVAFMQFNRTVKKNKIPSQLPEKDYELVLENIKPWEEKIERIKQQIDFWQTKSKKAADKQWKDEAIRQKHLWKMELEYWSSKVERFKVQEITSGFKNSQLVDTQLISKYALHYLKTYFEKVDVQKGEVTAIFRKIYAIQPQNFDGKKDRNKHSHHAKDATVLTLIPQAAKREEMLKAYFEDLEQGRNFQTLKPFPAFNVSSIFEIDDNVLINSLNNIQFLSRAKRVIRKRGKIQFIEDTDKVKIATGDSIRGQLHQETFYGAMKPAKLDENGRMQKDENGNFMQEDKLKFTIRVPFQYKSKPDAPGFKTWEEIEKQVVDNGLKAQIKKQIDKAGGLKEAFEAGIHLLDKNGDPHGSKIRHIRVWASVSEPLQIKKQTYLSSKVYKQHYYAANATNSYFALYQDKEKTKKDFDFRNLMEVAQALSVENIETENDLFTPFISIKKGKTEKQLDLKYILTPGARVIFVKDEEIREDLSHADIFNRLYVYTNFEKDGRLNFKYHLEARNKIEEKYLESEIDWENPKPTLRFSYSKYDFLVEGEEYDFVVNMDGTIQWK

SEQ ID NO: 6912 - protein, 1518 aa, synthetic construct
  REGION 1..1518: note = Synthetic
MSKIFGLDLGTNSIGWALRNPALTENQIEKFGVLTFNKGVGLGKTGEYSYAAERTKKRSTRRLYQARKYRLWATLEVLITEGYCPLTINDLNKWRHYSKEEARKNNNAGRVYPVWNMAFDAWIKLDFDNDGKPDYSSPYQLRKELAETKLDFTQEVNRYKLGRALYHIAQRRGFKSSRKGADDAKEKETNDSEVMDLQYSEKKKNKVIAELFEKYTDAKTIGWLFALLENDKIRIRESIAQYAIRENYKDEIKFIFQFQGLKFDHSLYTKLVETGKNKNDGSIFYKRPLRSQKGLIGLCTLEQETRIDKKTGKQVQVGKYRAPISHPAFETFRAWAFLNNIKNKENNEWKQLPLELKQEIYAELFFRKSKGYFPFSEISAFLKKRGKDWQLNYSLKTTVTACPVSARLKDIFGDDYLTAQIKKDQKSKSGKDYYDIEDIWHVLFSYEDQEYVAEFAECKLKLDADKIKQFVIAWNALPVGYGMLSLNAINKINVFLQKGLIYTEAVLLANIPEIIGRDLWQQKERLLLNSISGVIVENRQQKTILNIVNSLVSKHKNLKANEKFGHKDNNYKLIESDFNDIQIAIEEQFGSNKWNGFSEDEKKTISATVKDCYQAYFSKQGIVRNNDNEERVVTIQSGNKKYHKTESDYYRLPKLIDTLKEFLQDNFEHLDEAKLSKIYHPSEINIYPPAKEIEGVIKLGNPKTGSFKNPMAMRTLHELRKLMNYMIETNQIDSETRIVVEVARELNDANKRWAIETWQRQREAENQEFAEAIKQLLSENKNIKVSAESNEDIDKIRLFYEQNTEQTLPPVIEDKEDENEDGKKKSKKKKKEDIAKDKAERWSGHGKKLIDKYRLWKEQGYQCLYTGKYITLTDLFDENKIDFEHTVPRSKSFDNSLANLTVCYHDYNRTVKKNQIPTQLLNYDKEYDFGGNIGKCSTITSRLEAWKDKVGRIKQQIDFWKTKSKKAADKSWKDDAIRQRHLWQMELDYWQNKLDRFTIIEITTGFKNSQKVDTQLISKYAFHYLKTYFDKVDVQKGSITAEFRKIYQLQVLDEKKDRSKHSHHAKDAAVLTLIPVAAKRDAILEKYYEAKENRIDFKVEPPFTGFKREFVWSIDESVLINNINNNQALTLARRKVRKRGKEVFIEKSDGAKINKWATGDSIRGQLHQETFYGAIKPAQKGENGNLLKDENGKFKQEEKVKYVVRIPFQYKKDTNTPGFKTIDEIKKQVVDEGLKAQIEKQVNEAGGIKEAFEKGMYLLDKEGKPHGNKIRHIRVWASVSEPLAIKKQTNLSDKEYKQSYWAANGENIICAYYENDTTGKTGKIKKDRELEIVNLFDAANLKKFGLVNGKGALQLFRKDKSNQVIIDDKGNKQTPHAILKAGMKVIFYDEKVEELKKQENEKDSDYNKRISYRTYKIVKFTGGRLTFQHHLEARNDKELEKAYPENTPFKTDEKNKEVTYGGRGTSGFTEKVSDALKFNSHNNFEPFPKLLYSVNWLDFAVEGYDFEIKMDGTIRWIK

SEQ ID NO: 6913 - protein, 1437 aa, synthetic construct
  REGION 1..1437: note = Synthetic
MNKIFALDLGTNSIGWALRNPDLPTNQIEKFGVLTFNKGVGIGKTGEYSYAAERTTKRSTRRLYQARKYKLWTTLEHLINENYCPLSIANLNKWRLYDKEEARKNNNGGRVYPVDDMAFDAWIKLDFNGDGKPDYTSPYQLRKELAEVKLDFAKEENRFKLGRALYHIAQRRGFKSSRKGTDDAKEKESNDESEIADLQYSEKKKNKVILELLEKYPNAKTIGMLFAHLEDNGIRIRESIVQYAIRENFKEEIKYIFQFQDLSLTNSIYCKLAETGKNKNDGSIFYKRPLRSQKGLIGKCTLEPSKYRAPISHPSFEIFRAWSFLNNIKYKPIDDNDGQWKPLSLELKNKVYNKLFFRKKPYFPFSDIADLLEKEGRKLHLNYKHKTTVTGCPVSARLKDIFGDDYLNIKIPKVPSAKSKKNYYNIEDIWHVLFSYEDQEYVIEFAENKLKLNAEQTKQFVTTWNATPVGYAMLSLNAINKINIFLQKGLIYTEAVLLANIPEILGKGLWMKNETLLIGEIGKVIDENREQKTVLTIVNSLVSKHKNLENNEKFGYKDNNYKLDKSDFDTIEETINEQFGAKRWTEKTETERNKISTAIKDCYQAYFITTGLERKDIHNERHFLVKSSNNIYYKSDSGYYRLPKLIDTLGEFLQLNFNVNDDTLNKIYHPSEISIYPSAKADKDGVLKLGSPKTGSFKNPMAMRALHELRKLINYMIETTQIDSDTRIVVEVARELNDANKRWAIEAWQRQREAENQEFAEAIKQLLQDHEGIKANPERLDDIDKIRLFYEQNNEQLLPALEENNEDDKDRKKRKNRIEKDEAIRWSGHGKKLIDKYRLWKEQGYQCLYTGKFIKLTDLFDENVIDFEHTIPRSISFDNSLANLTVCYADYNRNIKKNQIPFNLNNYGKDYDGYSAILPRLEKWQEKVDRIKQQIDFWATKSKKAADKNWKDDAIRQRHLWQMELDYWKNKVDRFTMQEVTSGFKNSQKVDTQLISKYAFHYLKSYFEKVDVQKGSITSEFRKIYGLQIPDLKKDRSKHSHHAKDAAVLTLIPAAAKRDELLKTYYEHQEKRQSFTAEPFKGFKREFVWGIDDSILINNITNNQALTPAKRIIRKRGKVQFIEGTQNPKIATGDCIRGQLHDETFFGAIKPAKRGEKGNIIRDEEGKIIQEDIRYVVRVPFQFKKDTNSPGFKTLEEIEKQIVDEGLKKQIRVQVEKAGGLKEAFEQGIYMLGKKGEKINKIRHIRVFKSATKPLEIKRHTYLSKHSYKQNYYANNASNSYFAIYQGADKKDCDFRNLFETARITSTNTIASKEDLFEKFVHLKKGKTQIELRLKCILETGLKIVFIKSKEEDFKSMPLDELSKRFYVFTNFESDGRLNFKYHLEARESKEVTEDYKDSEVDFDNPKPTLRFAYSKYDFFVEGYDFKIKMDGSIQWK

SEQ ID NO: 6914 - protein, 1431 aa, synthetic construct
  REGION 1..1431: note = Synthetic
MSKIFGLDLGTNSIGWALRNPVLTENQIEKFGVLTFNKGVGLGKTGEYSYAAERTKKRSTRRLYQARKYRLWATLEVLITEGYCPLTIEDLNKWRHYNKEEARKNNNAGRVYPVWNTAFDAWIKLDFDNDGKPDYSSPYQLRKELAETKMDFTQETNRFKLGRALYHIAQRRGFKSSRKGADDNDTKEKNADENEVMDLQYSEKKKNKVIAELFEKYPDAKTIGRLFALLENDKIRIRESIAQYAIRENYKDEIKFIFQFQGLEFNHSLYTKLVETGKNKNDGSIFYKRPLRSQKGLVGKCTLEPNKYRAPISHPAFETFRGWAFLNNIKYKENNEWKQLPLELKQEIYSELFFRKSKAYFPFSEISAFLKKGGKDWQLNYSPKTTVTACPVSARLKDIFGDEYLNIKIGKAKAAKSDKAFYDTEDIWHVLFSYEDQEFVAEFAEQKLKLEPEKVKQFIIAWNALPIGYGMLSLNAINKINVFLQKGLIYTEAVLLANIPEIIGKELWQQKEQFLLDSISGVINENRNQKTILNIVNNLVSKHKNLEINEKFGYKDNNYKLAESDFNDIQAAIEEQFGANKWSGLSEDEKKTISDTVKDCYQAYFSTSGIVRNNGNEERIVTIQSGNKNYYKTESGYYQLPKLIDTLSEFLQLNFNVNNKQIKKIYHPSEINIYPPAKEIDGVLKLGSPKTGSFKNPMAMRTLYELRKLMNYMIETNQIDSETRVVVEVARELNDANKRWAIEAWQRQREAENQEFAEAIKQLLNEDKNVKASAKSNDDIDKIRLFYEQNAEQTLPEVVETEEDEKGKKTKKKSTKKDEAIRWGGHGKKLIDKYRLWKEQGYQCLYTGKYIKLTDLFNENVIDFEHTLPRSKSFDNSLANLTVCYHDYNRTIKKNQIPTQLFNYDKEHDFGGSIGRCSAILPRLDTWKEKVKRINQQIDFWKTKSKKAADKSWKDDAIRQRHLWQMELDYWRNKLDRFTITEITSGFKNSQKVDTQLISKYALHYLKTYFDKVDVQKGSITAEFRKIYQLQIADEKKDRSKHSHHAKDAAVLTLIPVAAKRDEIREKAFILYETTRKQYHEEPYKGFKREFVWSIDDNVLVNNITNNQELTPAKRKVRKRGKEVIVDGKNRWATGDAIRGQLHQETFYGAIKPAKRGEKGNIEKDENGNFIQEENLKFVLRVPFNADFTGEDKIVDEGLKRQIQEHIKRAGNFKKAFEEGIYLLDKTGKPHGNKIRHIRVFKDGEVKEPLPIKKQTNLSDKEYKQHYWAANATNSFFAIYIGQGKKDFDYRNLFDTAKVKSVNPVKKPEDLFEQKLTITKKKSTSELNLAYILGTGKKVLFKNKADEDLKSLSQNEILKRLYVYTNFEKDGRLNFQYHLEARNKIEESYSESEIDFSNPKPTLRFGYSKYDFYVEDYDFEIKMDGTIRWIK

SEQ ID NO: 6915 - protein, 1439 aa, synthetic construct
  REGION 1..1439: note = Synthetic
MNKTLGLDLGTNSIGWALRNPDLKSNQIEKFGVVTFNKGVGVGKTGEYSYAAERTKKRSIRRLYQSRKYRLWATLEDLINEGYCPLSIEDLNKWRHYNKEEAAKNNNSGRIYPINNLAFDAWIKLDFNNDGKPDYTSPYQLRKELIEKKLEFTNEIDRFKLGRALYHIAQRRGFKSSRKGSDDLRVKEDSDDDEVVDLQYSERKRNKIITDLFDKYPQAKTIGSLFAILENANIRIRENVAQYAIRENYKDEIKNVFQFQGLGFEHPLYTKLVETGKNKNDGSIFYKRPLRSQKGLVGKCTLEPQKYRIPISHPSFEAFRAWSFLNNIKYKPFNEKDAHWQSLPLNLKQNIYHDKFFRKSKSYFPFSEIADFIKAKGNNWELNYKLKTTVSGCPISARLKDIFGEDYLQIRIAKKKAPKSEKAYYDIDDIWHVLFSYEDQEFVSEFAEQKLNLSTEKVKQFVIAWNTLPVGYGMLSLHAINKINKFLEKGLPYTEAVLLANIPKIIGVKLWAANEEIFLSSISGLINENRQQKAILNVVNSLVSKHKNLEANEKFGYKDSNYNLVDSDMKDISLAVQEQFGIKRWEQKSKDEKQEIYSSVRDCYQAYFITSGLTRRNINGERHFIIQSSNKRYYKTDSGYFRLPRLIDTMGEFLQVNFNVPEKLLQKIYHPSEINIYPPAQPDNNGILKLSSPKTGSFKNPMAMRALHELRKLINHMIETSQIDNDTRIVVEVARELNDANRRWAIETWQRHREAENQEFEYAINQVIAKVSNVKTDYTSENDIDKMRLWYEQNDEETLPPIAEEKKEIKGIKWSENIKNSYRQILTQKSLIDKYRLWQEQECQCIYTGRVINITNLFDGNIIDFEHTIPRSKSFDNSLSNLTVCYSDYNRSIKKNQLPTQLANYSEDFGEYSAILPRLKKWQERVERIKQQIDFWKTKSKKAADKSWKDDAIRQRHLWQMELDYWQNKLDRFTITEITSGFKNSQKVDTQLISKYAFHYLKTYFDKVDVQKGSITAEFRKIYGLQAFDEKKDRSKHSHHAKDAAVLTLIPVAAKRDAILEKYYEAKENKTTFNAEPPFKGFKREFVFGIDDNVLINNISNNQALTPAKRKVRKRGKEVFIEKADGSKVNKIATGDAIRGELHGDTFYGAIKPAKKGDKGNLLKDEKGKFIQEEKVKYVVRVPFQYKKDANTKGIKEISQIVDEGIKRQIQKIMDTKKCSFKDVFNNDIYLLDKTGKPHGNRIRHIRVWASVSEPLKIKKQTNLSDKEYKQHYWAGNATNSYFALYQGEGKKYFEFRNLFDTAKSLAFSTLRYPTELFEPAITISKGKKSTQIPLFYILENGAKVIFKKEMEEDLKVLSRSELLKRLYVYTNFEKNGNSARLNFKYHLEARNKISEAYVESEIDFENPKPTLRFGFAKYDFLVEGYDFTVEMDGTLKWK

SEQ ID NO: 6916 - protein, 1424 aa, synthetic construct
  REGION 1..1424: note = Synthetic
MNNTLGIDLGTHSIGWAIRNPDLQGNQTEKVGVIRFNEGVGSGKAGEYSYAGQRTTKRAARRLNQARKYRIWTTLDHLISEGYCPLSKEDLNNWRHYNKGEVHTNKNAGRVYPIDNFEFANWVKLDFDQDNAPDYKSPYQLRKELVTIKLSFSEEKNRHKLGRALYHIAQRRGFKSSRKETIESIEELAADEKEIDLQVSEKKKNRVISELFEKYPAAKTIGHLYALLEDDNVRIRENISQYAIRENYKDEIKHIFEFQELGLEHPLYKQLVEEKKNKNDGSIFYKRPLRSQKGLIGKCTLEANKYRVPVSHPAFEKYRAWSFLNNIQYRTQGQGWQNLPLALKEMIFKEKFFRKSKVYFPFSEIIELLLKKGYHWTYNYSPKTTVTGCPVSARLKEIFGENYNNIEIEKTPSSKTSKNYYNLEDIWHVLFSYEDQECVVDFAEQRLQLPPDKAKLFVAAWNAMPVGYGMLSLNAINKINHFLIKGLIYTEAVLLANIPYVIGPELWEGNETLFLNAISTIIETNREQKLIVNIVNNLVSKHKSLDQKFGYKNNDYKLDDQDHSNILGTIIEVLGQSKWDELPEEKRSFVREMVTGCYQAYFRTTGLVRKDIRGQRHFEVKTSNHTFYKSDSGYYTMPKLINSLTTFIQDNFIVSEKKLSKVYHPSEINIYPAAKPGKDQVTVLGSPKTDAFRNPMAMRALHELRKLINYLITTGQIDSETRVVVEVARELNDANKRWAIETWQKQREAENEEFRRIIEELVQKDGIQANSQSEKDIDKIRLWYEQNGEETVPPLTDERREIKGIRWTENKKDSYKQISLQKSMIEKYRLWKEQECQCIYTGKVIPIAELFNSNVVDFEHTIPRSISFDNSLANQTVCYAYYNRTIKKNLLPFHLPDYEGILSRLEKWEEKVNRIKQQLDFWRSKSKKAIDKTRKDEAIRQRHLWQMELDYWQNKVNRFTIKEVTTGFKNRQKIDTQLISKYAFHYLKSYFEKVEVQKGSITAEFRKIYSVQSFDEKKDRSKHSHHAKDAAILTLIPVAGKRDEILREYYECKERHQPFSNTPYPGFRREYVMDIDDNILINNVKNNQMLSIAKKKIRKRGKEVFIPGTNTPMWATGDCIRGQLHQETFYGAIKPAKRDEKGILIKDEEGKFVQENEIQYVLRVPFEYKKDAGSVGFKTLEEVEKKIVDVGLKEQIRKQVNEAGSLKEAFEKGIYMLDKEGNKVNKIRHIRIWVTVVEPLKIKKHTHPSRFPYKQDYYAANATNSYFAIYKGEGRKGYDVRSLFQTANILSLNKTRRRDELFESSKSIIKGKKTHTLHLSCVLERGTKVIFSKGENDDLASLEHREILKRLYVLTKFEKDGRLNFRYHLEARNDIKDVYTESELDFTTPKPTLRFSYSKYDFWVEGYDFNINMDGSITFNTSKP

SEQ ID NO: 6917 - protein, 1482 aa, synthetic construct
  REGION 1..1482: note = Synthetic
MNKIFGLDLGTNSIGWALRNPDLIGNQMEKYGVLTFNKGVGIGKTGEYSYAAERTKKRSTRRLYQSRKYRLWATLEHLIIEGYCPLNIDDLNKWRHFDKQEARKNNNGGRLYPTWNLAFDAWIKLDFNRDGLPDYSSPYQLRKDLAEVKLDFTKEENRFRLGRALYHIAQRRGFKSSRKGADDIKEKDTDENEVMDLQYSEKKKNKVIAELFERHSEAKTIGWLFALLENEKVRIRENISQHAIRENYKDEIKYIFHFQGFNIDSSLYKKLVETGKNKNDGSIFFKRPLRSQKGLIGKCTIEPNKYRAPISHPSFEKFRAWAFLNNIKYKENNEWNQLSLNLKQDIYNELFFRKSKAYFPFSEIITFLVKKDKSKNWQLNFSAKTTVTACPVSARLKDIFGDDFLNIKINKEQKSKSGKDFYDIEDIWHVLFSYEDQEYVSEFAESKLKLDTEKLKQFVIAWNACPVGYGMLSINAINKINVFLEKGLIYTEAVLLANIPNVLGKELWQKNEQLLLDCIGSLIDKNRQQKSILNIVNTLISKHKNLEASEKFGFKNKDYKLNDSDFKDIQNVILEYFGSNKWAGFLDAEKDRILNSIKDCYQAYFAKQGIVRDQGSLERLVTIQSNGENYYRTETGYYQLPKLIDTLKDFLKDNFEHLDDEKLSKIYHPSEINIYPSAKTDKDGIVKLGSPKTGSFKNPMAMRTLHELRKLLNYMIETNQIDNETRVVVEVARELNDANKRWAIEAWQRQRESENQEFAEAIKRLLQEDNTIKASAESNNDIDKLRLFYEQGDEQALPPVIEFEDDENGNKKKKKANAKDDVIRWNGYGKKLIEKYQLWKEQGYQCLYTGKLIRLTDLFDDNVIDFEHTLPRSKSFDNSLANITVCYHDYNRTVKKNKIPAELQNYDKDYDFGGVIGKCTAIKPRLEAWEEKVKRIKQQIDFWKTKAKKASDKTWKDDAIRQRHLWQMELDYWQNKLNRFKITEITSGFKNSQKVDTQLISKYAFHYLKTYFDKVDVQKGTITSDFRKIYQLQVADEKKDRSKHSHHAKDAAVLTLIPLAVKRDAILEKYFESQENRTKFLDTEPYKGFKREFILNIDDGILINNITNNQELTPSKRKIRKRGKEVFIDKPDGTKVNKWATGDSIRGQLHQETFYGAIKPAKRGENGNLLKDENGKFIQDEQVKYVLRVPFNSEFNGIEKIVDEGLKKQIKEHSKRAGSFKKAYEEGIYLLDKYGNPHGNKIRHIRVWASVSEPLPIKKQTNLSDKDYKQTYWAANGENTVCAYYKNDYIDKTGKIKKDRELEIINLFGVAQLKSLNMLENGHLQIFRKDKNNQVIIDNNGKKYEPYAIIRAGMKVVFYDEKIEELKRQDGESITDYNERISYRTYKVLKFAGAQVTFLHHLDSRDEKQQMEDYPENGVFKESTYGKRGKNGFTERITDSIKYNNGKPWHKLLYTKDYLDFAVEGKQFTIKMDGMIEWKDNI

SEQ ID NO: 6918 - protein, 1129 aa, synthetic construct
  REGION 1..1129: note = Synthetic
MSKAAQLQYKVGIDVGLNSVGLAAIEVDDDGTPLKLLNAVVYTHDSGVDPEQAKSATSRLAVAGVARRARHRVRRRKKRLAQLDALLESAGYMLVDNHSNNDPYWPWKVRQRLATEQVDKAELLLLLPVALRHIARHRGWRNPYSSTKTLQQPAPYSQFYEAMRERVSKVTFHEFDDSATPAQIVCEALVPKLAHTIGVIPNPDKTAAKQKAFINQYRVRGGDLHGKLHQQDLANEIHQIATMQQLPAAFVLELISCVFASESPKGKAAERAGKDHLPGQEKLTRAPKAHPAFQKFKIVSTLANLRVAEQPLSAAELQKATDFLLAQTGKDGTTWELLADHLGVSVASLGGLASAGADVEHTGKTPPRDITSVRILNSNHKALKTWWANADELQRAAMVSQLTNSEQLPQEAIGAEAVTEFLGSCDDADLLKLEIISLPAGRAAYSVDSLKKLTAQMLATGCDLFTARQTLFNVERDWRPPADPIGEPVGNPAVDRVLKIVNRWLLAAERRWGTPATINIEHVRTAFASEAKTREYLKELKQRAELNEKIVAEMEARIGVQPGGSSSSVTRWLALARQRNCCLYCGTFIDFFTAEMDHIVPRKGPESTNTRVNLAAACKECNKDKSNRPFAVWAENTGRPNVSYAAVAERVQNLTPYDNFDMRELRRFKQEVLLRLKKRTPDEAIDSRSIASVAWMARELAARIKYHFRSKQEITVGTYAGSVTADARRATGFVGKVELIGGKAKTRLDRRHHAMDAAIVALLRPSVAKTLAIRSNMRQAENLSQRHTGDWKQFDGADHAAQKIYAVWRQHMEVLLGLFNEALQADNVPVTQNLRLGLGNSKAHDDTVRPFYPKGSNPKRLGDAWSVEEIDRANTPQLWLALTRLPDFDAKTGLPENKQREIRVKNRWFIAPDVINIFPKSIAAIAVREGWAEIGSTIHHARLYRLAPKKPGGKPEYGMVRVFMQDLLRHSSDDLFTVPLPPESISLRTAQAKVREQVLAGTAEYLTWIVSGTELAFDSSAFESGSGALKDFLTILPETNTWTITGFYDTARITIKPRQLSAEGLENQNNALLANNQAVCRILGVKGLQISLNVLLQQTVEVIHRNALGEKRYGDAASNSLPTTVQLKA

SEQ ID NO: 6919 - protein, 732 aa, synthetic construct
  REGION 1..732: note = Synthetic
MVSQLANSEQLPQEAIGAEAVTEFLEACDDDELQKLESISLPAGRAAYSVDSLEKLTAQMLATGCDLFTARQTLFNVERDWRPPADPIGEPVGNPAVDRVLKIVNRWLLAAERRWGTPATINIEHVRTAFASEAKTREYLKELKQRAELNEKIVAEMEARIGVQPGGSSSSVTRWLALARQRNCCLYCGTFIDFFTAEMDHIVPRKGPESTNTRVNLAAACKECNKDKSNRPFAVWAEDTGRPNVSYAAVAERVRNLTPYDNFDGRELKRFKQEVLLRLKKRTPDEAIDSRSIASVAWMARELAARIKYHFRSKQEITVGTYAGSITADARRATGFEGKVELIGGKAKTRLDRRHHAMDAAIVALLRPSVAQTLAIRSNMRQAENLSQRHTGNWKQFDGADHAAQKIYAVWRQHMEVLLGLFNEALQADNVPVTQNLRLGLGNSKAHDDTVRPFCPKGSTPKRLGDAWSVEEIDRASTPQLWLALTRLPDFDAKTGLPENLQREIRVKNRWFSAPDVINIFPKSIAAIAVREGWAEIGSTIHHARLYRLAPKKPGGKPEYGMVRVFMQDLLRHSSEDLFTVPLPPESISLRTAQAKVREQVLAGTAEYLTWIVSGTELAFDSSAFESGSGALKDFLTILPETNTWTITGFYDTARITIKPRQLSAEGLENQNNALLANNQAVCRILGVKGLQISLNVLLQQTVEVIHRNALGEKRYGDAASNSLPTTVQLKA

SEQ ID NO: 6920 - protein, 1113 aa, synthetic construct
  REGION 1..1113: note = Synthetic
LLDNLSVARLDWFATVPSRTFRRDRMDFCMTVRSILRFAFDIGTNSIGWVVLLGTTTLPAGATRQGQATEIIGVKALGARIYSDGRSPKDGSSLAMMRRVPKAARRRRDRYLQRQRKLIRLLIEHGLLPAEEGARKKLERLDPYALRTAGLDRALEPFEFGRALFHLNQRRGFQSNRKADAKDKESGVLKEAAKRLAEQLEHDGSRTLGEFLHRRLKTGNHARFRLAGVGTKAEHEFYPTRDLVRREFDALWSAQAAFDPERLTPDVKCKIAEAIFHQRKLKDAKPGRCTLNPHEERLPAALPSVQARRIYQQLNELRFGPRFRLDRQLTREQREPLAATLLGGKSLTWDQIRKALKLDSEILFSREEIDEKIEGCETARRLVGSAKKKAFGNVWRNLPLERKDEIVSRLLTEEDEESLIAWLRAECGLDAEAASNVAGMSLPDGHGRLGKTANAEVLAELKAAVITYAKAAENAGYHHSDFSTEEKLDRLPYYARVLERHVAFGTGEPEEAQPGWKKMSASERRRRRPAWEEKCYGRIANPTVHIGLNQLRRIVNELIAVYGKPDEVVLELARELKLNKKQKDDIERKNRENRTANDRRKKQLAECGVEDNGLNRTLLRLWEEQRDGLNSVCPYSRNQIGIEQLFSEEIEIDHILPFSRTLDDSAANKVVCFRNANREKRNRTPHEAFGYRNDWSAIEANAEKLPYNKRWRFAPDAMERFDTRERDFLDRQLNETKHLSRVAKEYLECVAPDVWAVTGNLTSLLRHKWGLNSILGDDRKNRDDHRHHAIDAAAIGCISRSILNRLAQRAGESESSEERGRIADDIPDPYPTFRDDVRELVRKTIVSHKPEHAKGGALHEDTAYGLVRDEAERQIGNLVYRKALTALTPKEIERVRDTDLRKKLLALRDAVQASGEKLEAALIAFAQAEAHAEQERTGKPRNPIRHVRLLKPEATNVEIEDRRNGKPYKAVVPSENWCMDVVSLKDGNGGHVWKGFAASLFEVNQKGWRPQWERDRIGGKLVMRLHKGDFVEIDDKDGERRIKKVVRLSPSNGIVYLVGHNEAGELQKRHDDPEDPFRWDFANIGGMRIRNAQKIAIDELGCIANKIRDCYSF

SEQ ID NO: 6921 - protein, 1059 aa, synthetic construct
  REGION 1..1059: note = Synthetic
MDVIRFSFDMGTNSLGWAVLKGTRTDKSANARQGEATNIVKTLAVGARVYSDGRNPKDGTSLAMMRREPRAARKRRDRFLQRQRKLIKLLISYGLMPKAEGERKRLELLEPYSLRVKALDNAIEPFHLGRIIFHLNQRRGFQSNRKTDKSDKDDGVLKQAQKRLCEALERDGSRTLGEFQYRRLQTGDNARFRITGTGLKAEHEFFPTRQLVKDEFAALWAAQKMHHPSLLTDEAKTAISNAIFFQRPLKAVKAGRCTFNPSEERLPAALPSVEARRIYQEVNELRYGEGYRITTPLEQAERNALVSALLMGNKLTWVQIKKQLKLPAGTRFSLEDVRDELKGCATAAILRGKKGRELFGKGWHAYPLKRQDDIVRHLLDVEDPGEIISWLQMECGVSAEVAAHIASVNLPDGHGRLGKTANAAILEQLIAHHEFTYAQAAEAAGYHHSDFSPQQKLSSLPYYARVLERHVSFGTGNPADGDEKCFGKFANPTVHVGLNQLRKLTNKLIAKYGRPDEVVIELARDLKQSKKQKDEEQKTNLKNRSINDGFRKLLAENNVPETPVNMMRMRLWHEQRDALNTFCPYCGEQISISNLLSDTNEIEVDHILPFSRTLDDSAANKIVCHRTCNQGKRDRTPFEHFGSRPIWGAIEANAAKLPRNKSWRFAPDAMDKFKTESRDFLDRQLNETRHLSRVAKAYLETVSPQVWVVTGSLTAMLRGKWGLNSILDGGNRKNRDDHRHHAIDAFTIGCISRSLLAAVARSSASAEGLDSDRVLADLPEPFDNYRDPLRELLRTMVVSHKPDHSKDGELHEETAYGIVSSKKERAIGNLVYRKTLGGLTDKEIERVRDPQLRRELQSVRDGLADAGKKPDAKALSAALIAWATTQAEAEEVRTGRPRNPVRHVRLLKPEASCVEIINRETDKPYKALVPGQNWCMDIVSVRDGNGSFEWKGFAATYFEVNRKGWRPQWERDKIGGKLVMRLHKGDLVEIDDRDGVRRVKRVVRLAPSNNLVYLAGHNEGGDLQKRHDDADDPFRWDFANIGGMAARNARKVKINEIGI

SEQ ID NO: 6922 - protein, 1045 aa, synthetic construct
  REGION 1..1045: note = Synthetic
MTETSVLNERFHHGLVIGLDVGTAGLGWAVRRGPDLLDLGVLVVPEKVGNLEERRTLRRMRRTIRSRRQRMQQLRAMLTEVGLPSPGANAELDSPAVLRLQALNGEPLRPEELHAALFHLWKHRGWLDAWWKKKTVERTADDEPELTAEQKTAQKEAKETAARIAGLLAAMKDRGCRFACHYLALKEGRWDRTMGCLPRPKPGQAIAPEGHKNLIFPRELLREEFLAIVEAQRERWPTLYVARERILYGAWGEDSHHPAPEAAGRQHRLHGGVWHQRQARFDNRKPGKCVACGVNNVCRADAPEFAEAQRAIVLGNYRVFSAVQGKAVPVGQAALPELADILAKHQAGLKELRALAKTGGYTPLEPGIKKKDQARDLLVQQWADRNGYELLPGQQLTARKLSDGRCAFCRPCLRAVRYEYERTGTIRTFQPLLRRPGESLASARARYVRELRNPLVRQRVEALDRLLDRLERDHGSPAVIVVEAVRSLGLGKKANDDLKKKQATQREEREAARQEAAEHHAAGSQAVLRFRLAKEVGKVCPYCHQPFHADLADAEIEHILPRALGGSDQQVNLTVAHTHCNHEKHDQLPHAAWGEADRWPCLERFAREHFKGLKLQLFLHQGNPEEALALLAPPADLTQTAYIARALRGLCLLRQNWLTPEGRDPSDQPGGPGQFFQLTNGYLTAGIRRCWGLDELLPSALDDEGGKNRHDLRHHALDAAVIACTLPWAAHQPLSRGGWREAPPFGSARREQWRTPFDHLRSQIRARVPDIVPTQKVGTSAKQKMMNTTAYGPRPQRDRKGKETTVLVTRVPLVQLKEKQLNDIYPQVLMRYIAAALSEFRRTHGDEHAFQQKAPNTGKLSPAFVATLHNPGTGRPIHKVHVLGKDPAACREVRPNVFVEYTDATAYLVYPDPKKGRTWAVYLVKPWEKLGQLRASFPTPVYVFQKKQLIEFPREVVVSATNKAQAGKYRFMSCNKNGNVRLCPAHIVQGKEGFLSAGLPYYGFELHIRHLMEALGYGASPPPPAEAGVAAHPRPEPPHPQRRRG

SEQ ID NO: 6923 - protein, 1746 aa, synthetic construct
  REGION 1..1746: note = Synthetic
MSKNILGLDLGTNSIGWALIEIDHENKIVKILGIGSRILTMDAAEIAKFESGAKTESGAAKRTTQRSPRKLNERFLLRRDRLHCVLNLLNSLPEHYKLSIEFENEKGKRSGKFKKGSEEKLAYYKNDNGKYQFLFMDAYFQMENDFRKLYPELFYKRKNSNETRIPFDWTLYFLRHKAVTDKDFELTKEQLAWITLSFNQKRGYEKVIGQDEKVQKDGELSDSFIGKVKEVSKIDNEDAYQITLVDNNNEDIELFKYKEESKILITEIGDLKEVEIVSKYDDEGTIDSKKTEYIINEVREFFINDVRNTGRKMKENFIFEVELETGWIKEQQSKFTPKWKDTTRDFIIRTKYDENGIRIPKGADKGRNINIPKEEDWTLMKLKTETSLTSFNTKNNTKGVASFVYYNLLQNPKQKIKADLITVIERDYYREELDKIYKNQEKFHPELRNRNLYEQAVQLLYPNNISHQKTIKELDFNHLIKEDILLYQRDLKSKKSLIANCVYEKENYERTDEKSGNKYKNPLKVIHKANPIYQEFRLWQFIKRLKIIKKSETINEEIKINLDVTSQLLTNKVKEELYAFLNDKESVTEKDILSFLNKKYKDLNISSENYKWNFASEKEPCNPTRYNFILRTKRIKGFNYKTFLTPENEYSLWHFFYSVKKKEEFNKGLSNILSRLLDKSGLSKEFHAELTKNFSSFAGYTNDYGTYSEKAIKKMLPFLRLGQYWNEKDVENILSKANQEVKQKVLDKEEIHGELKDFQGLWVSSACYLVYGRYSEVGEIQFWQSPYDIENYLKNEFKQHSLNNPTVEKILVETLHVVKDIWKYYGEEIGTDEDGRVIYAKLFDRIHIELGREMKKNNKQKEKDDKQNKENRKANERIVELLKELKKTNPTLQEKSPFQQEKLRILEESLLSSIEYDKDTTEYQLANGKITKKDIKEVTTKELSKIRRSDFERYKLWLDQRYQSPYTGKFIKLSDLFDRKKYEIEHIFPQERVTLNALYNKIICETEINKEKKASTGYGFILNAKSKKVFCSAHDSDTEIIDIKDYEDLVNNNFSGRKREILLSKEIPEEFTNSQLNNSQYISKMAMKLLSNIVREKDEKTFRSKNVLATNGTITSTLKRHWQLNDAWNEIISPRFKRLNELTNTNLFGDYREINGHKVFINSVPEETSKNFDLKRIDHRHHALDALIIALTTENHVQYLNNISSQEKNDEEKLKTRKGIKFQLTNSRKGFNDEKEWYFLPPAQIKTKEGIDKFEYQYKDTKSRIFKDIAKMALEKTVASFKQKNRVIRQRWNKYLKSEDGKLNTIKQEGLKEIVNYNIRKRLHEDTFYGKVKLSHKTISVSMEKALVESFAFVDTEINKEIDNLSNIENRSQQEIIKLLGDKYPKVMVYEKYVATRFGNNLESFASIPSDKIIKTIESITDTGIQKILKKHLHKYDTVSMKIVEVTEYVNYIVDDVQRTVIKDLLKNNTTIEYITIEKKDIKETEVFISSLGEGYDRKGVKQNPQLAFSYDGVKELNKNIIELNDGKFHHPIYKVRTSDAMGTKFPVSEEGQKSTKFVVTAAGSNSFCGFYKSGTERKFYIPTLRESVESLKQGLEPCPIVHPEDSKFELMFVLHPSDLVYVPTEEEIENSNLVDFKNLDKQQFERIYKFTDGSGNTMNFVPTNLASPIIDVKAEEHKKIIDNLLFWEEVNETKKGIVKKTKPLFNEVGLGSENKTKSQNTFDREQIKSICWKLKVDRLGNISKA

SEQ ID NO: 6924 - protein, 1704 aa, synthetic construct
  REGION 1..1704: note = Synthetic
VICFQNCSLKINRLDNKKPNDMKKILGLDLGTNSIGWALVEIDHEKRIVRILGLGSRILNMDSSEIAKFESGAKLSSAAAQRTERRTPRKLNERYLLRRDRLHCVLNLLNTLPPHYKLSIEFENEKGKRSGKFKSGTEEKFAYSKDENGKDHFLFMNAYEKMEADFKLRHPELFYQKRNGNITKIPYDWTLYYLRHKAVTDPSFELTKEQLAWITLSFNQKRGYEKVIGQDEKVQKEGERSDTFIGKVKSVQKLQEKDIYEIVLSDINNEALELFRYKEESTIPITEIGDLKEIERVSKFNDTGEIDNSKTEYIVNEIRELLITNVQNTWQKRKENFVFEIELETGWIKEQQSRFTPKWKDTKRDFIIKTKYDEQGDRILKGADKGRNIGIPKEEDWTLMKLKTETSITNFNTKNNTVGIASFVYYNLLQNPRQRIKGDLVTVIERDYYREELDRIFVNQEKFHPELKNRILYEQAIKLLYPNNINHQKTIKELDFNYLIKEDILMYQRDLKSKKSLIADCVYEKRRYRNGETHEMVDVPIKAIHKFNPLFQEFRLWQFVKRLKILKKQDVVNNETKLNIDVTSQYLNSIEIKEKLFDYLNDKDFVTEKNILDFLSKTYNDKTIKSENYKWNLASEKEPCNTTRHEFILRTKRVNGFDYKSFLSSETEYKLWHFFYSVKRKEEFYKGLNSLFSQILEKSGLSKDYLPELVRNFSSFGGYPNDYGTYSEKAIKKLLPFLRLGKYWDAKEVENNLKKDLPDEISKKVIDKESINGEINDFQGLWVSSACYLVYGRYSEVGEVEFWNSPYDIEKYLQNEFKQHSLNNPVVEKVLVETLHLVKDVWKYYGEKLSEDEKGNPVYAKLFDKIHIELGREMKKNNKQKEKDDKQNKENRKANERIIEILKELKKENTSLEVKSPFQQEKLRILEEGLLSSIEFDKDTTEYNLPEGKISKKQIKEITTKEISKVSRSDFERYKLWLDQRYQSPYTGQIIKLSDLFDRKKYEIEHIFPQERITLNALSNKVICETEINKIKGSNTGYGFIIGANEREIFCAAHNEKIKILSVDRYEQLVTQNFIDKKREILLSKDIPGDFTNSQKVNMQYISKMAMKLLSNVVRDQDDDSYRSKNVLATNGTITSELKRHWKLNEAWNELTSPRFKRLNELTNSNLFGDYRKINGHDVFVNDVPEATKKDFDPKRIDHRHHAMDALVIASTTEEHVQYLNNISSQEENDEQKLKTRKGLKYILTNSRRGFNDEKEWYFLPPAQTKSSDGISEFEYHYKEVKSKVFKDIAKEALDNTVASFKQKNRIIRQRWNKYLKYNENGQLDIHEEENLKLKKKYNVRQALHLDTFYGKVKIQNNEKTNTNVVEVDLGTAIKDNYDFFETEIIDRIRILRDQKQSNSEIISLLSIEYPKVRVFAKFVASRFGNELTSLASSDMILKAIESITDTGIQKILLNHLENYKEKIDEEGKEIAPQTLAFSPEGIKELNQNIKSLNNGKSHQPIYKVRMADAMGKRFFPVSEELAKSSKYVATAGDSNAFCGIYENGKMRKYYVPTLRESLINLKEGYDPCPQKHPEDTDYSLLFVLNPNDLVYVPTIEESERPKLVDFNNLNSEQMTRIYKFRDGSINKHGGVQYNFMPSNWATMIFKSTKELEKIKMSNESELKGEITLTTDKDKSQNSLEGNQIRSICWKLKVDRLGNISRIN

SEQ ID NO: 6925 - protein, 1689 aa, synthetic construct
  REGION 1..1689: note = Synthetic
MMIKNILGLDLGTNSIGWALVEIDHDNKIVRILGMGSRILAMDAAEIAKFESGAKTESGAAKRTKLRSPRKLNERFLLRRDRLHCVLNLLNSLPEHYKLSIEFENEKGRRSGKFKKGTEEKLAYYKDDNGKFQFLFTDVYHQMENDFRIKHPQMFHQRKNGNQTKIPYDWTLYYLRHKAVTDRNFELTKEQLAWITLSFNQKRGYEKVIGQDEKVQKEGELTDSFVGKVKEVNKLENEDAYQIILVDNNNEEIEIFKYREESKIAITKIGDLKEVEIVSKYDDDGTIDSKKTEYIINEIREFLITDVRNTGRKIKENFIFEVELETGWIKEQQSKFTPKWKDTNRDFIIKTKYDENGIRIQKGADKGRNINIPKEEDWTLMKLKTETSLTSFNTENNTKGVASFVYYNLLQNPKQKIKADLISVIERDYYRDELDVIYKNQEKFHPELRNRGLYEQAIQLLYPNNLNHQNTIKELDFNHLIKEDILLYQRDLKSKKSLIANCIYEKENFERTDEKTGKKYKKPLKAIHKANPFYQEFRLWQFIKRLKIIKKEEIINEEIKINVDVTDQLLTTEVKEELYAFLNDKENVTEKDILGFVNKNYKNLKISAENYKWNFTSEKEPCNPTRYNFILRTKRIKGFDYRAFLTPENEYNLWHFFYSVKKKDEFNKGLNNVISRLLDKADLSREFQSELVKNFSSFGGYTNDYGTYSEKAIKKLLPFLRLGKYWNSNDIDNILSKISHEIKQKVLDKEEINGELKDFHGLWVSSACYLVYGRYSEVGEVQFWQSPYDIENYLKNEFKQHSLNNPTVEKVLVETLHVVKDIWKYYGKEIGTDEEGKIIYDKLFDRIHIELGREMKKNNKQKERDDKQNKENRKANERIVEILRELKQNNSSLQEKSPFQQEKLRILEESLLSSIEFDKDNTEYQLSSGKITKKEIKDITSKEFSKITRSDFERYKLWLDQRYQSPYSGRFIKLSDLFDRKKYEVEHIFPQERITLNALYNKVICETEINKEKKALTGYGFVSNAKSKKVFCSAYDSEIEIIDIKDYEDLVNNNFSGRKREILLSKDIPEEFTNSQLNNSQYISKMAMKLLSNIVREKDEDTFRSKNVLATNGTITTTLKRHWQLNDAWNEIISPRFKRLNELTNTNLFGHYREINGHEIFINTVPEEANKNFDSKRIDHRHHALDALIVALTTENHVNYLNNISSQESNEEKLKTRKAIKFQLTNSRRGFNDEKEWYFLPPAQIKTKDGIDEFEYQFKDFKSKVFKDIAQNALENTIASFKQKNRVIRQRWNKYLKSEDGKLNIIKQENLKEIINFNVRQSLHDATFYGRTNLYYETSIMTIEKAIKEDFVIVDYNVRNEIENLKRDHSPLTKIISVLSTKHQNVQVYNKFIASRYNGELEKFASIHSNAIEDKIKTITDTAIQKILMNHIKNYIELDVKKNEFYNTGKAFSSDGILEMNNNILALNEGKPHQKIFKVRTAGKMGKAFPISENVFKNSKIVKTAGDSNFYCAFYQKGTERKFYIPTLRESVESLKQGFEPCPAIHPEDSDFKLLFVLNPSDFVYVPTEEERESSILIDFNNLSKEQMNRIYKFTDGSGTTMNFVSANISNPIIDIKAEEHKKIKDNLLFWEEINETKKGIVKKIKPLFNEVGLGSENKTKSQNTSNREQIKSICLKLKVDRLGNISKA

SEQ ID NO: 6926 - protein, 1687 aa, synthetic construct
  REGION 1..1687: note = Synthetic
MTKNILGLDLGTNSIGWALVEIDHDNKIVKILGLGSRILTMDAAEVAKFESGAKTESGASKRTSLRSPRKLNERYLLRRDRLHCILNLLDSLPEHYKLSIEFENEKGKRNGKFKKGTEGKLAYYKDDNGRFQFLFKDAYNQMENDFRNKYPEMFYHRKNGNETKIPYDWTLYYLRHKAVTDKDFELTKEQLAWITLSFNQKRGYEKVIGQDEKVQKEGELIDSFVGKVREVNKLEEDAYQIILVDNNNEEVELFKYKEETKIAITKVGDLKEVEIISKYDDEGTIDFKKTEYIINEVREFIITDVRNTGRKIKENFIFEVELETGWVKEQQSKFTPKWKDSKRDFIIKTKYDENGIRIPKGADKGRNINIPKEEDWTLMKLKTETSLTSFNTKNNTKGIASYVYYNLLQNPRQKIKADLITVIERDYYREELDLIYKNQERFHPELGNRDLYEQAIQLLYPNNLNHQKTIKDLDFNHLIKEDILLYQRDLKSKKSLIANCIYEKENFERTDEKTGKKYKNPLKAIHKANPLYQEFRLWQFIKRLKIIKKEEIVNEEIKLNVDVTSQLLTNELKEDLYAFLNDKENVTEKDILGFLNKKYKDLDISTENYKWNFTSEKEPCNPTRYNFILRTKRIKGFDYRTFLTSENEYNLWHFFYSVKKKDEFNKGLNNVISRLLDKTGLPKEFQSELVKNFSSFGGYTNDYGTYSEKAIKKMLPFLRLGKYWNSDDIENILSKSNQEIKQKVLDKEEINGEVKDFQGLWVSSACYLVYGRYSEVGEVQFWQSPYDIDNYLKNEFKQHSLNNPTVEKILVETLHVVKDIWKYYGEEIGKDEEGKIIYNKLFDRIHIELGREMKKNNKQKERDDKQNKENRKANERIVELLRELKQSNSSLQEKSPFQQEKLRILEESLLSSIEYDKDNTEYQLSNGKITKKEIKDITSKEFSKISRSDFERYKLWLDQRYQSPYSGRFIKLSDLFDRKKYEIEHIFPQERITLNALYNKVICETEINKEKKAFTGYSFISNAKSKKVFCSAHDSEVEIIAIKDYEDLVNNNFSGRKREILLSKEIPEEFTNSQLNNSQYISKMAMKLLSNIVREKDEDTFRSKNVLATNGTITTTLKRHWQLNDAWNEIISPRFKRLNALTNTNLFGDYREINGHQVFINTVPEETSKNFDSKRIDHRHHALDALIIALTTENHVNYLNNISSQESSEEKLNTRKAIKFQLTNSRRGFNDEKEWYFLPPAQIKSKDGIDEFEYQFKDFKSKVFKDIAQNALENTIASFKQKNRVIRQRWNKYLKSEDEKLNIIKQENLKQPVNYNVRKRLHEDKFYGKVKLQNKITTLSLEKALIEKYDLVDDELVKEIDVLKNNDGKSVKEIIELLNNKYAKVSVYEKFVATRFGNNLESFSQIPSDKIIKVIQSITDTGIQKILENHLDNYKEVINDKPKFDTENAFSSDGIKELNKNIIELNNGKFHHPIYKVRTSDAMGTKFSVSEEGQKSTKFVVTAAGSNSFCGFYQNGIERKFYIPTLRESVESLKQGFEPCPAIHPEDSDFKLLFVLNPSDFVYVPTEEERENSILIDFNNLNKEQMNRIYKFTDGSGTTMNFVPANISNPIIDIKAEEHKKIKDNLLFWEEINETKKGIVKKIKPLFNEVGLGSENKTKSQNTSNREQIKSSCLKLKVDRLGNISKA

SEQ ID NO: 6927 - protein, 1675 aa, synthetic construct
  REGION 1..1675: note = Synthetic
MMIKNILGLDLGTNSIGWALVEIDDENKIVRILGLGSRVLTMDAAEIAKFESGAKTESGAAKRTKLRSPRKLNERYLLRRDRLHCVLNLLNSLPEHYKLSIEFENEKGRRSGKFKKGTEEKLAYYKDGNGKFQFLFKDVYHQMENDFRIKHPQMFHQRKNGNQTKIPYDWTLYYLRHKAVTDRNFELTKEQLAWITLSFNQKRGYEKVIGQDEKVQKEGELTDSFVGKVKEVNKLENEDAYQIILVDNSNEEIKLFKYREESKIAITKIGDLKEVEIVSKYDDDGTIESKKTEYIINEIREFLITDVRNTGRKIKENFIFEVELETGWIKEQQSKFTPKWKDTNRDFIIKTKYDENGIRIPKGADRGRNINIPKEEDWTLMKLKTETSLTSFNTKNNTKGIASFVYYNLLQNPKQKIKADLITVIERDYYRDELDVIYKNQEKFHPELRNRGLYEQAIQLLYPNNLNHQKTIKELDFNHLIKEDILLYQRDLKSKKSLIANCIYEKENFERTDEKTGKKYKNPLKAIHKANPFYQEFRLWQFIKRLKIIKKEEIINEEIKINVDVTAQLLTTEVKEELYAFLNDKENVTEKDILGFVNKNYKDLKISAENYKWNFTSEKEPCNPTRYNFILRTKRIKGFDYRTFLTPENEYNLWHFFYSVKKKDEFNKGLNNVISRLLDKVDLPREFKSELVKNFSSFGGYTNDYGTYSEKAIKKILPFLRLGKYWNSNDIENILSKTNHEIKQKVLDKEEINGELKDFHGLWVSSACYLVYGRYSEVGEVQFWQSPYDIENYLKNEFKQHSLNNPTVEKVLVETLHVVKDIWKYYGKEIGTDEEGKIIYDKLFDRIHIELGREMKKNNKQKERDNKQNKENRKANERIVEILRELKQNNSSLQEKSPFQQEKLRILEESLLSSIEFDKDNTEYRLSSGKITKKEIKDITSKEFSKITRSDFERYKLWLDQRYQSPYSGRFIKLSDLFDRKKYEIEHVFPQERITLNALYNKVICETEINKEKKASTGYGFISNAKSKKVFCTAHDSEIEIIAIKDYEDLVNNNFSGRKREILLSKEIPEEFTNSQLNSSQYISKMAMKLLSNIVREKDEDTFRSKNVLATNGTITTTLKRHWQLNDAWNEVISPRFKRLNELTNTNLFGHYREINGHKIFINTVPEEADKNFDSKRIDHRHHALDALIVALTTENHVNYLNNISSRESNEEKLKIRKGIKFQLTNSRRGFNDEKEWYFLPPAQIKTKEMIDEFEYQFKDFKSKVFKDIVQNVLENTIASFKQKNRVIRQRWNKHLKSENGKTSLVSQEGLNEIVNYNVRKRLHEDTFYGKVKLQNNKNTNKNVINIRLKKAIEEGYDFYDSILLSHISILRSENISTKEIISKLEDEYPMVNVYEKFVATRFGNNLESFSQIPSDKIIKAIQSITDTGIQMILENHLNNYKEVVDGKPKFDTENAFSSDGVKELNKNIVALNKGKHHHPIYKVRTSDAMGTKFSISEGGQKSTKFVVTAAGSNSFCGFYQKGIDRKFYIPTLRESVESLKQGFEPCPLINPEDSDFKLIFVLNPSDLVYVPTEEERDGSVLIDFNNLRKEQMHRIYKFTDGSGTTMNFVPANVASLLFNMSNKEQEKAEIKLSIQNELGLGSPQSKNQNTVDGIQVKSVCLKLKVDRLGNISKA

SEQ ID NO: 6928 - protein, 1669 aa, synthetic construct
  REGION 1..1669: note = Synthetic
MAKNILGLDLGTNSIGWALIEIDHENKIVKIKGLGSRILTMDAAEIAKFESGAKIESGAAKRTTLRSPRKLNERYLLRRDRLHCVLNLLNSLPQHYKLSIEFENEKGKRSGKFKKGAEEKLAYYKDDNRKFQFLFKDAYYQMENDFKKKYPEMFYQRKNGNETKIPYDWTLYYLRHKAVTDKDFELTKEQLAWITLSFNQKRGYEKVIGQDEKMQKEGELTDNFVGKVQSITKIENEEAYLIVLVDNNNEAIELFKYKEETKIPITEIGDLKEVEIVSKYDDEGTIDSKKTEYIINEVREFLITDVRNTGRKIKENFIFEVELETGWIKEQQSKFTPKWKDTNRDFIIKTKYDENGIRIPKGADKGRNINIPKEEDWTLMKLKTETSLTSFNTKNNTKGVASFVYYNLLQNPKQKIKADLITVIERDYYREELDVIYKNQEKFHPELKNRDLYEQAIQLLYPNNPNHQKTIKELDFNHLIKEDILLYQRDLKSKKSLIANCIYEKENFERTDEKTGKKYKNPLKAIHKANPLYQEFRLWQFIKRLKIIKKEEVINEEIKINLDITSQLLTNELKEELYAFLNERESVTEKDILGFLNKKYKDLDINTENYKWNFASEKEPCNPTRYNFILRTKRIKGFDYRTFLTPENEYSLWHFFYSVKKKDEFTKGLTNIISRLLDKSGLSKEFHEDLVKNFSSFGGYTNDYGTYSEKAIKKMLPFLRLGKYWNSKDIENILSKTNHEVKQKVLDKEEINGEIKDFQGLWVSSACYLVYGRYSEVGEVQFWQSPYDIENYLKNEFKQHSLNNPTVEKILVETLHVVKDIWKYYGEEIGKDEEEKIIYNKLFDRIHIELGREMKKNNKQKERDDKQNKENRKANERIVELLRELKQNNSSLQEKSPFQQEKLRILEESLLSSIEYDKDNTEYQLSNGKITKKEIKEITTKELSKVSRSDFERYKLWLDQRYQSPYSGRFIKLSDLFDRKKYEIEHIFPQERITLNALYNKVICETEINKEKKASTGYGFISNAKSKKVFCSAHDSEIEIIGIKDYEDLVNNNFSGRKREILLSKEIPEEFTNSQLNNSQYISKMAMKLLSNIVREKGEDTFRSKNVLATNGTITTTLKRHWQLNDAWNEIISPRFKRLNKLTNTNLFGDYREINGHKVFINTVPEETNKNFDSKRIDHRHHALDALIIALTTENHVNYLNNISSQESSEEKLNTRKGIKFQLTNSRRGFNDEKEWYFLPPAQIKTKDGIDEFEYQFKDIKSKVFKDIAQNALENTIASFKQKNRVIRQRWNKYLKSEDGKLNIIKQDGLKEVVNYNVRKRLHEDTFYGKVKLQDKITTIGLEKALIEKYDLVDDELIKEIEGLKNIDGKSLKEIIGLLKSKHPKVSVYEKFVATRFGNNLETFASVPSDKIIKAIHSITDTGIQKILENHLNNYKEVVDGKTKFDVENAFSSDGVKELNKNIVELNNGKVHCPIYKVRTSDAMGTKFSVSEEGQKSTKFVVTAAGSNSFCGFYQKNTERKFYIPTLRESVESLKQGFEPCPATHPEDSEFKLIFVLNPSDLVYVPTDEEKENPKLIDFNNLKKEQFSRIYKFTDGSGTTMNFVPANIASLLFNMSNKEQEKTEIKLSIQNELGLGSPQSKNQNTVDGIQVKSVCLKLKVNRLGNISKA

SEQ ID NO: 6929 - protein, 1686 aa, synthetic construct
  REGION 1..1686: note = Synthetic
MKKILGLDLGTNSIGWALIEIDHENRIVRILGLGSRILTMDAAEIAKFESGAKTESGAAKRTTLRSPRKLNERYLLRRDRLHCVLNLLNALPEHYKLSIEFENAKGKRSGKFNKGTEQKLAYYKDDNGKFQFLFKDAYHQMENDFRKKYPEMFYQKKNGNQTKIPYDWTLYYLRHKAVTDKDFELTKEQLAWITLSFNQKRGYEKVIGQDEKVQKEGELTDSFVGKVQSINKIENEDAYEIILVDNNNDAIELFRYKEETKIPITEIGDLKEVEIVSKYDDEGTIDSKKTEYIINEVREFLITDVRNTGRKIKENFVFEIELETGWIKEQQSKFTPKWKDTKRDFIIKTKYDESGNRILKGADKGRNINIPKEEDWTLMKLKTETSLTSFNTKNKTKGIASFVYYNLLQNPKQKIKADLITVIERDYYREELDIIYKNQEQFHPELKNRSLYEQAIQLLYPNNNSHQNTIKELDFNHLIKEDILLYQRDLKSKKSLIADCVYEKENYERTDEKTGKKYKNPLKAIHKANPLYQEFRLWQFIKRLKIIKKEDGSGELNIDVTSQLLTNNIKEELYNFLNDKENVTEKNILDFLNIKHKELEINSGNYKWNFASEKEPCNPTRYNFILRTKRIKGFDYRAFLTPENEYSLWHFFYSVKKKDEFTKGLSNIFSRLLDKSGLSKEFHADLVRNFSSFGGYTNDYGTYSEKAIKKMLPFLRLGKYWNEKDVEAILSKANQEVKQKVLDKEEINGELKDFQGLWVSSACYLVYGRYSEVGEVQFWQSPYDIENYLKNEFRQHSLNNPTVEKILVETLHVVKDIWKYYGEEIGTDEEGRVIYNKLFDRIHIELGREMKKNNKQKEKDDKNNKENRKANERIVELLRELKKSNSSLQEKSPFQQEKLRILEEGLLSSIEYDKDTTEYKLSNGKITKKEIKDITSKELSKISRSDFERYKLWLDQRYQSPYTGKFIKLSDLFDRKKYEIEHVFPQERITLNALYNKVICETEINGAKKAFTGYAFIANAKSKSVFCSAHDAQVEILSIDSYEELVKSNFTGRKRDILLSKEIPEEFTNSQLNNSQYISKMAMKLLSNIVREENDDDNYRSKNVLATNGTITSTLKRHWQLNDAWNEIISPRFKRLNELTNSNLFGDYREINGHQVFINTVPEEANKNFDPKRIDHRHHALDALIIALTTENHVQYLNNISSQEENDEEKLKTRKGIKFQLTNSRKGFNDEKEWYFLPPAQIKNKDGIDVFEYQFGETKSKVFKDIAQKALENTIASFKQKNRVIRQRWNKYLKPIDGKIKIETQEGLKEVVNYNVRKRLHEDTFYGKVKLQNRIITISLEKALIEKFDLVDAAITKEIENLIQNEGTSTQKIIEALKIKYPKVNVYEKYVATRFGNELESFASIPSDKIIKAIQSITDTGIQRILENHLDKYKEVIDGKTKFDTENAFSSDGIKELNKNITELNNGKFHHPIYKVRTSDAMGTKFSVSEEGQKSTKYVVTAAGSNAFCGFYQNGKDRKYYIPTLRETVESLKQGLEPCSATHPENSEYKLIFVLNPSDLVYVPTEEEIENPNLVDFSKMKKEQMNRIYKFTDGSGSTMNFVPTNIANPIIDIKAEEHKKIKDNLLFWEESNETKKGIVKKTKPLFNEVGLGSENKTKSQNTFDREQIKSICWKLKVDRLGNILKA

SEQ ID NO: 6930 - protein, 1697 aa, synthetic construct
  REGION 1..1697: note = Synthetic
MKKILGLDLGTNSIGWALVEVDHEKKIVKIIGLGSRILPMDAAEIATFETGGKLPSSAAQRREKRSPRRLNERYLLRRDRLHCVMNLLQSLPEHYQLSIEFENEKGKRSGKFKKGIEEKFAYYKDDNGKYQFLFMDAYQEMENEFRQQHPNLFYVKNNSKQTKIPYDWTLYYLRKKALQKTNNELTKEELAWITLSFNQKRGYEKVIGQDEKEQKDGILLETFTGKVKNVIKIEDKDLYEIVLVEFNNEENELYRYKEESKVQITFKNDLKEIEIISKYDDEGNVDSEKAEYIINEIRESLLVLNVRNTGRRNKENFIFEIELETGWIKEQQSRFTPDWKGTSRDFIIKTKYDKDGNRIPRGQDKGRSISIPKEEDWSLMKLKTETSIHSFNTKYNTTGVAPYIYYNLLQNPNQKVKAGLVTVIEREFYEKELEAIYNSQEKYHPELNNRELYRQAVQLLYPNNKTRRDALINLDFKNLISTDIMFYQRDLKSKKSLIADCDYEKRNYFNKEIGVVCKQPLKAIHAANPLYQEFRLWQFIKSLKIIKCEDVIGDEILINQDVSRELLTLDIKEKIFEFLNDRKEITQKQLLKKLSELHNEKTISSNNYKWNYPEYDDEDKKNEYKIICNPTRSEFIIRTKKIKNFYWDTFLSPENEYLLWHFFYSVKKKSEFSSGLNSLVEKLLKRAGLPADYKSNLVKSFSTFSGYKNDYGAYSEKTIKKLLPFLRIGKYWKREDVEQILENRPSDILEKVEIVLDKVVTKEEINGEITDFQGLWLSSACYLVYGRHSEVGDVKFWTSPYDIENFIRNEFKQHSLNNPVVEKVLIEMLQVVKDIWMYYGLKAGIDENGKFTYNKLFDRIHIELGREMKKNNKQKQSDDKKNSENRKTNNRIIELLKDLKKENPSIQEKSPFQQEKLKILEQGVLASIEYEKDNVSYELLNSSETISKKEIKELVSEDISKVSKGVFERYKLWLDQRYQSPYTGKFIKLSDLFDRTKYEIEHIFPQERLTLNSLENKVICETEVNKDKKANTGYEYILGANNKLIRCAAHGYKEIPILSVDDYKELVNRNFIGKKRDILLCKDIPDEFTNSQKVNMQYISKMAVKLLSNIVREKDEDTYRSKNVLATNGTITSTLKKHWQLNEIWSDLMSPRYKRLNKLTESTLFGDIRIMNGHEVFVNNNQIPQQINKNFDPKRIDHRHHAIDALIIALTTENHVNYLNNISSQDKGEDKLKTRKIIKYQLTDTKRGDNSTKEWYFLPPAQLKTKEGIINYNYEYKDISGNVFKDIAKTALEDTIASFKQKNRIIRQRWNKYSTLENGSIVIKEQEGLSGKENFSIRQSLHKSTFYGKVKLAYKTSNIKLEEAIFEDYDIVDNLLSKKIEDMKKQLSISEIVACLSVNYPTVRVYDKFVATRYGCKLESLATISSDKEVKKMIESITDTGIQEILQNHLKNYDSDPQTAFSYDGIRALNEAIVKPKHGLTKKGKPHKPIYKVRMADVMGAKFSVSEDGQKSTKYVVTDAGSNAFCGVYEIKKGERKFYIPTLKELLNNLKNGENPCPGSHPDFPEYNWIFNLCANDLVYLPTQDEIDNDNKTPVDIDSLDKSRIYKFTDGSGTTLNFVPVNFASLLYGFPKNVARKNAENLKKEHSLEYTDVLLQNELGLGSPQSKNQNSIDRIQIKKYCIKLDVDRLGNIKPLLP

SEQ ID NO: 6931 - protein, 1658 aa, synthetic construct
  REGION 1..1658: note = Synthetic
MKKILGLDLGTNSIGWALVEIDHENKIVKILGIGSRILTMDAAEIAKFESGTKLESTAAKRTTQRSPRKLNERYLLRRDRLHCVLNLLNALPEHYRLSIEFENQKGKRSGKFKKDTEEKLAYFKDQNGKFQFLFEEAYLKMENEFRSKYPEINDKKTKLPYDWTLYYLRHKAVTDKNFELTKEQLAWITLSFNQKRGYEKVVGQDEKAQKEGELTDTFVGKVKNVKKLENEDAYEIILVDNNNETIQLFKYKEESNISITEIGDLKEVEIISKYDDEGSIDSNKTEYIINEVREFKIVDVRNTGQKRKENFVFEVELETGWIKEQQSKYLPKWKDTKRDFIIKTKYDENGIRIPKGADKGRNINIPKEEDWTLMKLKTETSLTSFNAKHNTKGIASFVYYNLLQNPNQKIKGDLITVIEREYYREELDVIYRNQEKFHPELKNINLYEQAIQLLYTNNNSHQKTIKELDFNHLIKEDILMYQRDLKSKKSLIANCVYEKENFERKDEKTSKIFKNSLKAIHKANPIYQEFRLWQFVKRLKIIKKSDTSGNVNVDVTSHLLSNEIKEELFDYLNDKEFATEKDILGFVNKKHKDLVVNADNYKWNFTSEKEPCNTTRYKFILLSKRVLGAKYKEFLTRENEYLLWHFFYSVKKKDEFNKGLRKVIIKLLEKSKFPQDYLNDLIKSFSSFGGYANDYGTYSEKAIKKLLPFLRLGKYWNEKEVETILSKANQDVKQKVLDKEEINGELKDFQGLWVSSACYLVYGRYSEVGEVQLWKSPTDIENYLKNEFKQHSLNNPVVEKVLVETLHIVKDIWNHYGKGVESYFDNIHIELGREMKKNNKQKEKDDKNNKENRKANERIVELIKELKRSNSSLQEKSPFQQEKLRILEDGLLSSIEFDKDTTEYQLTNGKITKKEIKEITSKEISKISRSDFERYKLWLDQRYQSPYTGQFIKLSDLFDRKKYEIEHIFPQERITLNAMYNKVICESEVNKDKRAATGYGYVANAKCKEIFCAAHNKKVKVLSITQYEKLVNDNFIGKKKEILLSKDIPSEFTNSQLNNSQYISKMAMKLLSNIVRKKEEDTYRSKSVLATNGTITTTLKRHWQLNDTWNEIISPRFKRLNELTNSNLFGDYREINGHQVFINTVPDGTNNNFDPKRIDHRHHALDALIIALTSENHVQYLNNISSQNENEEQKLNTRKGLKNQLTNSRKGANEEKEWYFLPPAQIKTTLGIIEYEYQFRETKSEVFKEIAQKALEASIASFKQKNKVIRQRWNKYLKPIDGKIELVKQEGLIETKNYNVRKRLHEDTYYGKVKLQCKMITIAIEKAINEQFDLVDKNLANRIESLKLNDGKSNSEIIEEIGKKHSKIKVYDKFVATRFGNNLDTFALIPSDKIIKAIESISATSIQRILINHLGNYKTLINDKIIYDTENAFSTDGIKDLNNNIVKLNNGKFHHPIFKVRTIDAMGTKFPVSEEGQKSTKYVVTAAGSNAFCGFYQKGKERKFYIPTLRESVQSLKDGFSPCPASHPDDSDFKLIFFLNPSDLVYVPTEEEREVPNLVDFTNLSKEQINRIYKFRDGSINEKGSVQINFMPSNWASLIFKASKEGEKISLVTNQELKGEVTLTSDKDKSQNTIDDGVQIRSFCWKLKVDRIGNISKA

SEQ ID NO: 6932 - protein, 1780 aa, synthetic construct
  REGION 1..1780: note = Synthetic
MGKILGLDLGTNSIGWALVEIDHENKMVKILGLGSRILSMDAGEISTFESGGKLKSAASQKTTDKTARKLHERFLLRRDRLHCVLNLLKTLPTHYQVSIDFENEKGYRSGKFKKGTEVKLAYATDTNGKPRFLFMDSYNEMAKEFKAKNPLLFYKKRNGKETKIPYDWTLYYLRKKALKQEISKEELAWITLSFNQKRGYEKTIGQDEKEQKDGELSETFVGIVRSVTEVGEKDGLKLFEIVLIDEKNETELYRYNEESLFQITNKGDLKEFEIVSKFDEDGNINEKNTIYTVKEIRKIKVSDVKYTDEKKNENFVFEIYLQTGWIKKNQQSKYLPKWKDTERDFIIKTNYNKDGDRILKGTDEGRNINAPKEEDWTLLKLKTETELTSFNTKNRTVGIASFVYNALLEKPQQKIKGDLITVIERKYYRDELESIFECQRQFHPELEDPELYKRAINLLYPHNENHKRKLEGFLSKQPFSKLLTDDVILYQRDLKSKKSLIADCVYEKENYKRIDKKTGQEYHQPLKAIHKANPLYQEFRIWQFIKRLKIIQHEEVENDEILLNQDKSVLLLTNEIKEKLFEFLNNREHITQSVLLKHLGLSDKEYKWNYESDHKEPCNETRYNFILRLKRIKGFNWKAFLSPENEYQLWHFFYSVKKQDEFKTGINTLFEKLLVKSNISLELKADIVKNFISFGGYNNDYGTYSEKALKKILPFLRIGKYWEESKDKAISILGKIEHSVKVKVLTKENIQGEIIDFQGLWISSACYLVYNRYSEVGDVKYWTTPYDIERYLQNEFKQHSLNNPVVEKVLIETLQLVKDIWKTFAEQEGKDKNGNVVYKKLFDRINIELGREMKKNAKERKRESDQNNENKKTNERIIELLKELKRENNDVRPLSPFQQEKLKILEDDLLSSVEYDKDATVYKFSNNQYAITKKEIKDITTKDIAKVSKSDFERYKLWLDQRYQSPYTGKVIKLSDLFNREKYEIEHVFPQERITLNAFYNKVICETEVNKAKKAFTGYQFILNSQGTRKIKCSAHGNEEVTILSPEAYQKLVKDNFTDKKKQEILLSKDIPDEFTSSQLNNARYISKMAMKLLSNIVREEDEDSFRSKNVLPINGVITTKLKQDWQLNDAWNELIQPRFKRLNEITKSNLFGDYEKINGHEVFINRVPEELNNDFDKKRIDHRHHAMDALVIALATESHVNYLNNISAQNSKDKKFKERFDIKEKFMTSKKNDAGDKSRFFLPPAQFKQEGKVVEYSYGFTDNNSNVFKEIVLEALQNTIVSFKQTSRVIKQRTNKYQKWNEEKGKFELISQENLNKKEKYNIRLTLHKATYYGKVKLKQKTSNVLLIDAIGQVDSIVDNNLKEHIINLKEQKFQSHEIRNQLEKNHPKVEVFDDYVATRYENTLASLGVIASDKIITFIESITDIGIQKILLKHLAGYNSVEKSIKEAIQYVDIIANEEHQKVIKALLEKNFPFEEIEIDNKSISKTEVFTKGIELSIDEGKNLILNPQFAFSFEGINELNKNIKALNGGKEHKPIYKVRMFTPLGKKFPVSEDKEKGNKYVITAADSNIFCGFYTNEMGEREFFVPTLRETAENLKQGSNPCPEIIFKDNAKYELLFILSPNDLVYLPTKDEIQTPSIVNYQKLNKEQKNRIYKFTDGNSQGVMNFAPYCVATPLIDVSKADYKKLQLGKLIFTEVSKSGKDSKTKELVNEIGLGSTQSKNQNSLDSEQIKSICWKLKVDRLGNIKLATQIEVHENKTPGHPAKMMQKGDIEPANEH

SEQ ID NO: 6933 - protein, 726 aa, synthetic construct
  REGION 1..726: note = Synthetic
MEKAIKNTTRVILGLDLGVGSIGWSLIEVDEAGKPLRIIDMGVRCVPLTTDQSDGFVKGNGKSVNQGRTECRTARKGYDRYQLRRADLNEAITELGMAYGAELVALPPLTLWKLRADSATTGCRMALPEIGRVLMHINQKRGYKHAKSDLGDKKQTEYVASVNKRYKEIQDAGLTVGQAIYARLKESAVTGENGKVQCTYRAKGEVFPRAAYEAEFDAVMTAQQPFYPDILTDEVIERLRNIIFYQRPLKSCKHLVSICDFEKRKYVNAQGAVVYDGPKVTPRTSPLAQLCSIWESVNNIVLKSRRNTSTGSLFDTAAEGRYELSIDEKRDIVAFMNTHEKLTLTDLLKILGLSKKHGFSAGESVGKGLKGNTTYCRLKKALGNYRGAEDLLRFEVHDVDTGKVDEETGEIIVETSNDLMEQPMYKLWHTVYSINDKEELRAALSKRFGIDDDEVVERLYAIDFTKDGFANKSARFMRRLLPYLERGLMYSEACKYINVNHSNSLTSEENLKRELKSRLEALKKNELRQPVVEKILNQMINLVNAVFDKYGTVDEVRVELARELKRSKDERNDMWIKNSKRERENKQYAELILEHNIAPSKSRIKKYRMWWKESGKLCMYCGQPVNFKEFGEGNGAEIEHILPKSLFFDNSFSNVVCACRKCNQDKGNMTAYDYVKKMLPDKLESYVEKVEELYNKHDISKTKHDRLLMSQSDIPTDFLNRDLRET

SEQ ID NO: 6934 - protein, 1154 aa, synthetic construct
  REGION 1..1154: note = Synthetic
MKNILGLDLGSSSIGWSVIRENSEEQELVAMGSRVVSLTAAELSSFTQGNGVSINSQRTQKRTQRKGYDRYQLRRTLLRNKLDTLGMLPDDSLSHLPKLQLWGLRAKAVTQRIELNELGRVLLHLNQKRGYKSIKSDFSGDKKITDYVKIVKTRYDELKEKRLTIGELFFRRLTENAFFRCKEQVYPRQAYVEEFDCIMNCQRKFYPDILTDETIRCIRDEIIYYQRPLKSCKYLVSRCEFEKRFYLNAAGKKTEAGPKVAPRTSPLFQVCRLWESINNIVVKDRRNEIVFISAEQRAALFDFLNTHEKLKGSDLLKLLGLSKTYGYRLGEQFKTGIQGNKTRVEIERALGNYPDKKRLLQFNLQEESSSMVNTETGEIIPMISLSFEQEPLYRLWHVLYSIDDREQLQSVLRQKFGIDDDEVLERLSAIDLVKAGFGNKSSKAIRRILPFLQLGMNYAEACEAAGYTHSNNYTKAENEAHALLDRLPAIKKNELRQPVVEKILNQMVNVVNALMEKYGRFDEIRVELARELKQSKEERSNTYKSINKNQRENEQIAKRIVEYGVPTRSRIQKYKMWEESKHCCIYCGQPVDVGDFLRGFDVEVEHIIPKSLYFDDSFANKVCSCRSCNKEKNNRTAYDYMKSKGEKALSDYVERVNTMYTNNQISKTKLQNLLTPVDKISTDFIDRQLRESQYIARKAKEILTSVCYNVTATSGSVTSFLRHVWGWDTVLHDLNFDRYKKVGLTEVIEVNHRGSVIRREQIKDWSKRFDHRHHAIDALTIACTKQAYVQRLNNLRAEEGPDFNKMSLERYIQSQPHFSVAQVREAVDRILVSFRAGKRAVTPGKRYIIRKNRKRISVQSVLIPRGALSEESVYGVIYVWEKDELGHVIQKQRAVMKYPITSINREMLDKEKVVDKRIHRILSGRLAQYNDNPKEAFAKPVYIDKECRIPIRTVRCFAKPAINTLVPLKKDDKGNPVAWVNPGNNHHVAIYRDEDGKYKERTVTFWEAVDRCQVGIPAIVTQPDTIWDNILQRNDISENVLESLPDVKWQFVLSLQQNEMFILGMNEEDYRYAMDQQDYALLNKYLYRVQKLSKGDYNFRYHTETSVEDKYDGKLNLELSRQMGKLKRVSIKSLLGLNPHKVHISVLGEIKEIS

SEQ ID NO: 6935 - protein, 1153 aa, synthetic construct
  REGION 1..1153: note = Synthetic
MKNILGLDLGSSSIGWAVIRENSEEQELVAMGSRVVSLTAAELSSFTQGNGVSINSQRTQKRTQRKGYDRYQLRRTLLRNKLDTLGMLPDDSLSHLPKLQLWGLRAKAVTQRIELNELGRVLLHLNQKRGYKSIKSDFSGDKKITDYVKTVKTRYDELKEKRLTIGELFFRRLTENAFFRCKEQVYPRQAYVEEFDCIMNCQRKFYPDVLTDETIRCIRDEIIYYQRPLKSCKYLVSRCEFEKRFYLNAAGKKTEAGPKVAPRTSPLFQVCRLWESINNIVVKDRRNEIVSISAEQRAALFDFLNTHEKLKGSDLLKLLGLSKTYGYRLGEQFKTGIQGNKTRVEIERALGNYPDKARLLQFNLQKESSSMVNTETGEIIPMISLSFEQEPLYRLWHVLYSIDDREQLQLVLRQKFGIDDDEVLERLSAIDLVKAGFGNKSSKAIRRILPFLQLGMNYAEACEAAGYTHSNNYTKAENEAHALLDRLPAIKKNELRQPVVEKILNQMVNVVNALMEKYGRFDEIRVELARELKQSKEERSNTYKSINKNQRENEQIAKRIVEYGVPTRSRIQKYKMWEESKHCCIYCGQPVDVGDFLRGFDVEVEHIIPKSLYFDDSFANKVCSCRSCNKEKNNRTAYDYMKSKGEKALSDYVERVNTMYTNNQISKTKLQNLLTPVDKISTDFIDRQLRESQYIARKAKEILTSVCYNVTATSGSVTSFLRHVWGWDTVLHDLNFDRYKKVGLTEVIEVNHRGSVIRREQIKDWSKRFDHRHHAIDALTIACTKQAYIQRLNNLRAEEGPDFNKMSLERYIQSQPHFSVAQVREAVDRILVSFRAGKRAVTPGKRYIRKNRKRISVQSVLIPRGALSEESVYGVIYVWEKDEQGHVIQKQRAVMKYPITSITREMLDKEKVVDKRIHRILSGRLAQYNDNPKEAFAKPVYIDKECRIPIRTVRCFAKPAINTLVPLKKDDKGNPVAWVNPGNNHHVAIYRDEDGKYKERTVTFWEAVDRCRVGIPAIVTQPDTIWDNILQRNDISENVLESLPDVKWQFVLSLQQNEMFILGMNEEDYRYAMDQQDYALLNKYLYRVQKLSKGDYSFRYHTETSVEDKYNGKPNLKLSMQMGKLKRVSIKSLLGLNPHKVHISVLGEIKKIS

SEQ ID NO: 6936 - protein, 539 aa, synthetic construct
  REGION 1..539: note = Synthetic
MKILGLDLGVGSIGWALIETDTNDNLLDITGIGCRIVPLTPDETNGFTSGNGKTKCQERTVARTIRKGMDRYQMRREQLSEALKRLQILDPQHTLTNLPPLELWGLRAKAASEKVTLKELGRVLMHINQKRGYKHAKSDMGDSSKSDYVARVNQNFADILAENMTVGQHFYHKLKDSKAIGSKGGEFVSFRIKENVFPRKAYEQELDTIMQVQQASYPDILTDAIVAELKNIIFYQRPLKSCKHLVSICEFEKREFKNREGKPVTVGPKVAPRTSPLAHTTAIWEAVNNIRLSNPHNRNKATELTGSLFDKGNQLPRQARLLQRDFLLTPEEKRTVFDFLNIHEKLTVTDLLKLLGLKKADGFKPDKAVGKGIKGNTTFVALEKALEGMPDAEKHLQFDLSLIEKVDPETGEIVQVIDPAYTQQPLYRLWHTVYSVSDKDELAKALEKIGITDPDIVERLYALDFVKPGYSNRSAKFMRRILPHLMQGHDYFESCQAIGINHSGSITTVENDSRPLLDHLENLKKTNFANLSSRRFLIR

SEQ ID NO: 6937 - protein, 510 aa, synthetic construct
  REGION 1..510: note = Synthetic
MKNILGLDLGLSSIGWSVIRENSEEQELVAMGSRVVSLTAAELSSFTQGNGVSINSQRTQKRTQRKGYDRYQLRRTLLRNKLDTLGMLPDDSLSYLPKLQLWGLRAKAVTQRIELNELGRVLLHLNQKRGYKSIKSDFSGDKKITDYVKTVKTRYDELKEMRLTIGELFFRRLTENAFFRCKEQVYPRQAYVEEFDCIMNCQRKFYPDILTDETIRCIRDEIIYYQRPLKSCKYLVSRCEFEKRFYLNAAGKKTEAGPKVSPRTSPLFQVCRLWESINNIVVKDRRNEIVFISAEQRAALFDFLNTHEKLKGSDLLKLLGLSKTYGYRLGEQFKTGIQGNKTRVEIERALGNYPDKKRLLQFNLQEESSSMVNTETGEIIPMISLSFEQEPLYRLWHVLYSIDDREQLQSVLRQKFGIDDDEVLERLSAIDLVKAGFGNKSSKAIRRILPFLQLGMNYAEACEAAGYNHSNNYTKAENEARALLDRLPAIKKNELRQPVLRRSSIKWLMW

SEQ ID NO: 6938 - protein, 648 aa, synthetic construct
  REGION 1..648: note = Synthetic
MKNILGLDLGSSSIGWSVIRENSEEQELVAMGSRVVSLTAAELSSFTQGNGVSINSQRTQKRTQRKGYDRYQLRRTLLRNKLDTLGMLPDDSLSHLPKLQLWGLRAKAVTQRIELNELGRVLLHLNQKRGYKSIKSDFSGDKKITDYVKIVKTRYDELKEKRLTIGELFFRRLTENAFFRCKEQVYPRQAYVEEFDCIMNCQRKFYPDILTDETIRCIRDEIIYYQRPLKSCKYLVSRCEFEKRFYLNAAGKKTEAGPKVAPRTSPLFQVCRLWESINNIVVKDRRNEIVFISAEQRAALFDFLNTHEKLKGSDLLKLLGLSKTYGYRLGEQFKTGIQGNKTRVEIERALGNYPDKKRLLQFNLQEESSSMVNTETGEIIPMISLSFEQEPLYRLWHVLYSIDDREQLQSVLRQKFGIDDDEVLERLSAIDLVKAGFGNKSSKAIRRILPFLQLGMNYAEACEAAGYTHSNNYTKAENEAHALLDRLPAIKKNELRQPVVEKILNQMVNVVNALMEKYGRFDEIRVELARELKQSKEERSNTYKSINKNQRENEQIAKRIVEYGVPTRSRIQKYKMWEESKHCCIYLNPEKRNEPSCKNEVVQNLQKRSVQKSTSAQYKKSTEKTYFFGAFLLLCLLAISPKITNFKQ

SEQ ID NO: 6939 - protein, 744 aa, synthetic construct
  REGION 1..744: note = Synthetic
MKNILGLDLGLSSIGWSVIRENSEEQELVAMGSRVVSLTAAELSSFTQGNGVSINSQRTQKRTQRKGYDRYQLRRTLLRNKLDTLGMLPDDSLSYLPKLQLWGLRAKAVTQRIELNELGRVLLHLNQKRGYKSIKSDFSGDKKITDYVKTVKTRYDELKEMRLTIGELFFRRLTENAFFRCKEQVYPRQAYVEEFDCIMNCQRKFYPDILTDETIRCIRDEIIYYQRPLKSCKYLVSRCEFEKRFYLNAAGKKTEAGPKVSPRTSPLFQVCRLWESINNIVVKDRRNEIVFISAEQRAALFDFLNTHEKLKGSDLLKLLGLSKTYGYRLGEQFKTGIQGNKTRVEIERALGNYPDKKRLLQFNLQEESSSMVNTETGEIIPMISLSFEQEPLYRLWHVLYSIDDREQLQSVLRQKFGIDDDEVLERLSAIDLVKAGFGNKSSKAIRRILPFLQLGMNYAEACEAAGYNHSNNYTKAENEARALLDRLPAIKKNELRQPVVEKILNQMVNVVNALMEKYGRFDEIRVELARELKQSKEERSNTYKSINKNQRENEQIAKRIVEYGVPTRSRIQKYKMWEESKHCCIYCGQPVDVGDFLRGFDVEVEHIIPKSLYFDDSFANKVCSCRSCNKEKNNRTAYDYMKSKGEKALSDYVERVNTMYTNNQISKTKWQNLLTPVDKISIDKSGKTKRTFLQKRNGSKLAKTKRSKIDKRTVQKSTEKNIFLRCFFIARLLAISPKITNFKQ

SEQ ID NO: 6940 - protein, 1135 aa, synthetic construct
  REGION 1..1135: note = Synthetic
MEASDNYILGLDIGSNSIGWAIIATEKKKPAKIVQTGVRVFEAGMEGDIEKGREESRNKARREARHIRRQLWRHARRLKKLLHILQREKLLPEGYAAKVFEGKEGLDQKFLENYSKNLSENEKHKLAQVLPYYLRKRALDEKLELYELGRALYHLAQRRGFKSGRKAPKEKEGEEEKSKVKKEISDLAKEMDEKGARTLGEYFTNLDPTDPNKRRIRERWTSRKMYEDEFEKIWKAQKKHHPNTLTDELKKEVWKTIFFQRPLKPVQDTIGDCQFEKGKKRAPWALPSAQRFRYLQKLNDLRIISPKKTKDEAREPRLTDEERKNVIYELERNEEISFQRIRDILGLKRNYKFNFVKEESGETEEVESKTTFPGNATSAQLLNVFGEERWSQLSDPERDQIVEEILKLREKIASHYWEHSNEKDVIETMPKIEDELKQLCTRWKSDEAKAHELAKIELEDGYCNLSREALTRVLPEMEKGKSYATVVKDIYQKDLAEEQESAVSMAELLGKLRNPVVARALSQLHKLVKAIIKEHGVPEKIRVELLREMKKNRIQRENVSHINELNRTQREGKGKILKEMGLKPTKDNINKLLLAEECKERCPYCGKKVESRNHLFNGAFEIDHIIPYHRSYDDSFLNKTLICEKCNNKKLDQTPYEWKGTTPEWGDILDRVEHFKSTTISFTSRVKNREGKKVEVRLAAVREKLKRFKLHDEELKKFLEGFSNAQFNNSAWASRKARELITCSIGKEREKKIESLAGGVTAQMRNELQLNSILADGVKKDEVKEKKRIDHRHHAVDAVAIALTEPKTVEMLSNAYKQSKKEKKKKKWQFWQDFVKKVAWDNFLHQVKCSIYETVASHQVSRKIPGKLHEETYYGKVNEIDEKKNIRELFRVRRRLGTGRGCLKKTEVQDIADKNVKRAVIEKMHQLGTDDPGQAFANPQNHPYLKDKRGNPKSIIHKVRIDVKKKPEKKLKAGWVKTEDNHHAEVWEKGDGTYDGNVLSTFDAMDRTRRKKRGENSSHIQIPAGTKLVFSIHKYDTVAIKDTDGQPGYYVVKSIAAGPDILLVHVNDARKLTEVQKPGVRLSFKIWKRLREKRESVPVRAPFRVWRVTNWDFLRQMNCQKLDILPLGDEKRRND

SEQ ID NO: 6941 - protein, 1079 aa, synthetic construct
  REGION 1..1079: note = Synthetic
MNKYVIGLDLGINNVGWSVVDAENNSILKSGVRLFSVANTAVDRRNFRSVKRRKKRRHNRVRDILSLFSSIGFTNTNTCDSELLEKRVLGLNKKISEQDIVNICCFIATHRGYIPFGDEERNLVDLGDLYPCEYLSQLKINTGRYRALEDVVIDNKDLIKEVEKILDTQVTFYPSLKNISKILIEIINRKRKFYEGPGSENSRTDYGRFKTEEYKNRTGKTEDLEYLYDDLSSKCSICVGEKAAPMGNYYYEVFNLLNDFINTSIVKTDNLIDQSAVELDNKSGYYKLTSESLEKIITYCKETKNVKYDKLYKELFGLKKEDLTGYRVEKDYKPLFSTMNYYRSIRDAFEGFPNEWLKDVEQYNELIRILTVSPGIVETKNMLEKSLVINKEFSEEELEILKNVANKLKSKTAFSYGSLSEKALKRAISDMLSTRMNFMQVSREFNYDEEMTKDFIDRYKETDGILLMDDQFVDEIIASPQVKKSLRQSIKVINSIILENGCYPEVIAVESTHEMNGSKKRNQIEREQKKNEELRNEAEQFLIREFGNEYVSEKNIMKVMLFNELDGRCPYCNESLNGINQIINGGLEVEHILPLSKSYNDSYNNKTLSCVECNQKKINNTPYMWMGPERFEEFSDRIKKMKFSDEKKLNFLETKDLDKYNTRFFNRNLRDTAYATSELINQINIFNKYLDNKLKDFNKIKTLSTPGQITSKIRDNIGLDKNRDIGRFHHAVDASIVASIALDDKLGKILIESQNDSSFWKRKKYLGERIDYMMLNFKESVLDGELRKIKSDDDIKISDQVIKDPNKSIANANVYKYLKLDGEYYKVDQISDIYSENIKDELLKKLFDDCNTGFNLMIKDNNKKMYEKLKSIYFEYKDRGSSTNPFVNYCLEVNDITKEKFNYIEHGIKQENGPVIKKLRYYTNVNDPNLLEKSNLKMKSNTYIGLDSVGQAYTKVYWDNDVKKFIFLPIYTTSVDLNTHKLNKKDKTYQLFYDKYLRGKNYTFVADLYNGNYIEVEKKDGIIKGFISGYDKDGNRITLKKKNNNQKSPDRFSASDKSLKVYDVDYLGNKKIRLTWPSK

SEQ ID NO: 6942 - protein, 1399 aa, synthetic construct
  REGION 1..1399: note = Synthetic
MSQKILGIDLGTNSIGLSLRNVDNGNQLKDQLEYFSSSIFQSGVGKNEKDKKNPEYSFAAERTTYRMTRRRLRSRHRRLWATLQLLIDNDCCPLSKESLEEWKEYKKGGEGHRYPIDDIPFNNWIKLDFDADGKPDYTSPYQLRKSLAEEQLDFKQKQNRYKLGRALYHIAQRRGFKSSKGESLDNIDSEDDSIDVISLMKESESKKSSKLSAYMKEHGLATPGQAFANLEREGVRVRGSEFQAVQSQLKEEITYIFKFQHQLSTNSDFYQHLVSEKKGEGTIFYRCPLRSQKRLVGKCTLEPRKYRCSLSHPEYETFKAWSLINNIKIRRSQGDDLEQLDLSLRQEIYNKLFISKVRDYFPFKEIRTEIQSKLGGITLKYDQDKKQQTINYADDYSVDGCPVTRRLIILLGDDWRHATLKSDKMRKGHHSSMHQVFYSASDLWNVCLSADEESEIIAFAKERLGWCEEDKQTKKLVSLYSSVSKHSQYGMLSLKAIMNINSMLVRGLKYSDAVMMAKIPNIMPVSEKQIGELAYYFEHHLSPQVKYQRMVARLANKLIADYKSLNVEYRFADHNTDYQLQDSDMKDIVNVIKDYMGTYEYDALNMEERDRIKNDVARLYQFFFHSSNRDYIKVPIVKELWAKYLHELYPSVPEERWGELYHPSQINYFHQKDGRLGSPNLGAIKNPVALRTLNILRSKINSLLEDGIISPDDTRIVVETAREMNDANMRWAIRTWNKQRELENKEIEKLLSEFHKRADDINKDKLRFALEQSDFDKYDAKDKEYKINVAKYKLWREQECRCIYTGKVISLSKLFDGHSFNIEHTLPQSLSLDNSDCNRTICDAYYNQHIKGTLLPSALPNYEKNQVIDGKEYSAIKPRIEKWEEKLKHLEDRVNYWRWRARHAQTKDNKDFCIRQMHLWNFDAEYWRKKVETFKVTEIKEGFRHSQLVDTRIITRYAALYLRSLFSNVDVQKGEVTSVFRKILGIQDENQQKDRSNNAHHAIDATMLTLMPVPAKRERMLQLFYQKQEKRKVGLDTQYEDNELKEEIKGLNIGKDAHNIATYIKNHILVEHPKHRDALAPSSHIVIEKKNGKKYRKVATEKNVIREQLHEQTYLGVITQWKKGKNGAIIKDSQGKPLVDLNNKLLVYRMPLRFKSNANEKGFKNWDDLYNNIVNKDLIPMMRKQFKEGTLFKEACERGIYMLNKKGEKVNRIRTVRINRKISLNGAPIIKTQTYKSAKDYKNYFRARVGKLYAGSEYSNGKETEFRVYSLMDVANNRRKHQEDIPKSIIGKHGDVLELKRVLKVGDTVLLYQKSANELWRLGNKELGKRLYVISAFEGDDRIHFKRSSYDGKPGKGLAIKDFNYLQDLIRTSYSKVKYLIEGYEFTLKNGKINFNKDV

SEQ ID NO: 6943 - protein, 1287 aa, synthetic construct
  REGION 1..1287: note = Synthetic
MFSQRIMDPYCELITFVWCKYIKNFYFYKKTTAMEKKILGIDLGVASIGWALVKLDTENQANNEILKMGVRIVPIDSNDVQKYSEGTGETPAHKRTMKRGMRRMFARYVMRRKNLTQKLHQLGMFDASLFSLEKLSLWGLRSRAVNEQISLKELGRVLYHLLQKRGYKSNRRESSKEKKDTDYVQQVKGRYQQIKDLQLTIGQYFYSELTQNPYFRIKEKVFPRGAYEEEFWAIMRKQQTFYPEILTNEVVDDFYQIIYYQRPLRSQKGLVKICEFEGKWVVKNGREMFFGPKVAPRSSPLFQIEKIWESIHNIRLKNRDGDLYKLSLEEKHKIFQYLNNNERLTGPKLLELLGKGKNDGWYYNKLIDKGIQGNLTLVKIKKALGDYPDAENLLRFNLEFITQGEEALLVDQETGEILESYVKKEVSPSIENEPLYQLWHVLYSIHQPEECVKVLKSKFSLPEEIAIRLAELDFTAGGYSSKSHKMIRKILPYLMEGFDNAQACKKAGYNHSNSLTGEENLARQLKDKIALLPKNSLRQPIVEKVLNQMIQIVNEIIDESNGLVTREERLTNRFEIRIELARELKQNKQDRAETFKRIKAIERENEKYTKELENYGIKASRNNIVKMRLFNETSVDEDGRINAMCLYCGKMFGKEQALKGEEVDVDHIIPRSLIYDDSQQNKILVHRKCNATKGDMTAYDFMASKGEEALNEYKERVKRLFDKKLITRGKRERLLTAQSKIDSEFIERQLNETRYIGKKAREILTAVSFNVHATSGMLTARLRHLWGWDNVLLNLQQERFEYLCKEKLSEAKEEEIPEIIARMKEEFSKRIDHRHHAIDALTIACTRQGFIQRLSTLHAQHTRDELYRLLNNESGEREDINPEIQERLNLVDKYFISQKPFATYQVQEKAAEIFVSFKPGKKVAVKGRNIVHLQGGKTYVQRGVIVPRGPLSEESVYGKIRFHDKPQPLKYLLEHPDLIVNSRIRDLILKFKQDHPEASPKDYPKILKKEPILLPSGEPLTEALCYAEDYVIRKPLDVNNFKKIDDFKWIVDKGIRERIIKHVEEYGGNIKEALAHPVYYDKEKTRPIRSVRIFTSLNAVVPIKYNSDGQPMGYVKPGNNHHVAIYEDAEGNLHEHVCTFWHAVERYKYGLPVIIKDTTQVWDEILKSSKEYPQTFLGQLPETGWKLKLSMQMNEYFLMFLDPEKAREAVENKDLKTIAFHLFRVYQLSSTDYNFVYQYYAKNPGTVFDRIEFKSLRIKSIKALMNAIPQKINIDLLGNLPIAFNGK

SEQ ID NO: 6944 - protein, 1250 aa, synthetic construct
  REGION 1..1250: note = Synthetic
MVKKILGIDLGVASIGWALIKEDEENCQNNEILAMGVRIVPIDSTDVQDYSKGTGETPSHKRTVKRGMRRMYARYVMRRKNLTRKLIQLEMFDSSLFELDKMSLWQLRAKAVNEQIGLKEIGRVLYHLVQKRGYKSNRRQSSKEREDSNYLQEVKGRHQHIRDLGLTIGQYFFHELSQNPFFRIKEKVFPREAYEEEFWAIINRQKVYYPQVLNEQVIQDLYQIIYYQRPLRSQKGLVKICEFEGKWIVRNGRELFIGPKVAPRSSPLFQIEKIWESIHNIRLKNKYGEEYQLTQTDKQKIFEYLNVNDKLTGPKLLELLGLSKNDGWYYNKSVEKGIQGNLTLTRIKKALTGYPMTDDLLKFELVIEDKENEGLLVDSDTGEILQTVRKKEISPAIEKEPLYQLWHLLYSIHEHEECVNALIKKFNLPEDVANRLADLDMTAGGYSSKSNKMMRRILPYLMEGYDFAHACQIAGYNHSNSLTVDENLARRLKDKITLLPKNSLRQPIVEKVLNQLISIVNEIIDEHNGLVTREERITNRFEIRIELARELKQNRQDRADTWKRQNRIEQENKRYIEELDGLGIKFSRSNIIKMRLFNETSVDENGRVNAYCLYCGKMFGKHQALAGNEVDVDHIIPRSLVYDDSQQNKILVHRSCNASKGDMTAYDFMASKGEDALEEYIARVDLLYKNKAITKGKRDRLLLGQSKITGDFIQRQLNETRYVARKAREILYSVCYNVRPTPGILTSRLRHLWGWDKVLLDLQIERFKYLVDNKLSEASEENYSQILEEIEKEYSKRVDHRHHAIDALTIACTRQGFVQRLSTLHAQVTRDELFRIINQDETSSIEDLNIEISERLNLLDKYFVASRPFTTKQVKEKAAGILVSYKPGKKVAVKGRNIVHLPDGKIYVQKGIIVPRGALSEESVYGKIKFHDSPKPLKYLLEHPDLIVNPIIRERVVQFIEKHKDVPVKEYPKILKKEPILLPSGQPLQEALCYAEDFVIRKPLDANNFKELKDFDIIVDKALIELIKRRVAEKGNIKEALAQGIYMDEEKLRPIRSVRVFTGLNAVVPVKYDSEGRPVGYVKPGNNHHVAIYQDSEGNLVEHVCTFWHAVERYKYGLPVIIDDTSQLWDSILTSSQVYPQTFLDQLPESGLRLKMSMQINEYFLMFLEPEKAKEAIQNDDYPLLSKHLYRVFSLSSHDYNFSYQYNTFIPRNKFDRINFKSIRIQSIKSLFDALPIKITVDLLGRLKQV

SEQ ID NO: 6945 - protein, 1096 aa, synthetic construct
  REGION 1..1096: note = Synthetic
MKEKKYIIGLDLGINNVGYSVIDEESKKILKKGVRLFNTADKAEERRIARNTRRRLKRRSNRVDETLKLFKSIHFPDEITIEPDLLQKRVKGLHEKLESQEIVNIICYFMMHRGYIPFGDEERTLVELNELFPCEYYLKKWREIGKYRALEEVVNHQDLKREMIALLENQMKYYPELSQIVGNEEKGLLWIFSRKRKFWEGPGSTRSFSEYGRFKNEEDVLKYQELKKEGKEKYLFEDLIGHCKIYVNEKCAPKANYYAEEFNLINDFLNIRVINRENILKESYVHQDTSKAYHLTTDAIEAIIEYCKNFTGKILSYNKVLKDVLGLTKEDIAGYRIDKDGKPLFSLLNAYRSIKKNYEEKNLDSSWLINDLENYNRLINILAVAPGKVEIAKMLENIHKFTQEELDVIGKIQEKLKKDRFLDYHALSEKALTRAIQDMKATCLNFMQVSKKFDYEKEACEYYLKNYGTGEGTLLMTSKFIDEIVASPQVKKTLRQAIRMINAIIEEQGNYPSVIAIESAKEMNGEEKIKEIERVQKIQEKLRKDAKTILENTVSDDKVTDNMIERVILFEEIDGHCPYCGKAININDVISNTAEVEHIIPISQSADDSLENKTIACRDCNSKKKNKIPFSYMSSTEFEEFTKRVLQLNISEKKRQNLLTTDDPNKYQTRFFNRNLRDTAYATKELVTQVRLFNEYLKANLKGEKIEIKTLSTPGQLTHKVRRWWDLDKNRDIGKFHHAVDASIVAGIATTPIGKRIVEAQNNSQFWIKEKDKVKSIPKLLEKFTMYDMKEEISKIQSDEDIFISMQVNKEANRSIANSNIYSYIKKEEEYYKIDQISDIYAPDLFKKNESLLNELFDETKTTKILLCQEKDPKLFRYLREIYYKYQDGKTNPFRNYCEELMEDKSKKFNERTDGIFTPSKNGIGVLVKKLRYMQRATDPFVLNKKTINKKENTYIGLDNVAIYCTKLYWDKDEKKILFFPIYLPVLKFDKKKGNDQHPKINDQHPLYQLYYNKLLKGKRVEHIVDLYNGNFIKIEKNKKAPTFEYVSTFDKNSGNVRCKLLNGKNGSRISSKDKFTLYDVDILGNKKKRLTWPKE

SEQ ID NO: 6946 - protein, 1099 aa, synthetic construct
  REGION 1..1099: note = Synthetic
MNSTETVFAFDCGLASLGEAVRQGQSFPLVESWLIPDKFAETKSAAMRRRMMTTRDAHKERELWLLKTFEDLGIEVLRGKEVSKTPAGWTVTRKADPRLTREFPKPGDDTCYTSCLLRIKLLRGEKLAPWQIYKAIRSAIQKRGYDPDIPWKNREEKQQKKEEEEEAAAVLFDEKLLRKTVGDNPDWLYPCYLDAFRMGLWNPAHPTQLGMRIDHKAQSTRKTIMLRALVEKELRDLLHQAAQQLPALAGKEEFVLYGPNGKYTSSSVRAGALAQKVPRFDNRIIDKCALIPRLNVCKIRMEGTQPHPASQIIFEITFLQKLKNMRVQGSAGIRGLTPAEIALAAFSQKNSLPPKAWAAFCEECGLHPVPAFKKLVFKDISPVLAPEVFRSALLEKLASVSVLDSGKRVRNLTDDERAALLALMQKPRDSFSITASKWADFCGDLGVSPLPGHEEVKPPKAAGRARFCRPAAQILKRLILSGQAPAAFHAAEILNLGGNADPRKGLVAADLDFLLHMGDSWDAIRIPDGKLDAIADQYTDADEAIRKLIGSQNNPVVRHRLGVFAQRLRELKRRFGVPDQVVLEFVREDFMGDKARMELKKFQNDRAKARAEARARVAELGISEKNSLRYELWKAQGGRCLYTDDPLAATELDNYHVDHIVPRAKGGPDSRLNYVLTLNQTNDDKADRTPYEWLSGNPARWLAYVNRVESRLKAADGISRKTAQLLTLPNAVELAERYTALAETAWISRLAQKIADLSFGWRNGIDAAGQKRTVVVSGGLTARIRRKYGLNRILNPGAASEEEAEKKNRSDKRHHALDAMTISFIPQWARDPDKTGFFRFPKAIRDNPLPFFQARIDAVVPRQLCYEKAPLAETIYGLRKTPEGNQVVKRTDLRDLAYQTVNMKTVFNIDYAVKNGIPKILDERIQSALLEFARSKPTEEEWNRFAADFAPFGSRVRRVRLVETALPPDTMGEFKNMSKDGTAMLRKPLKANKGQYVFTEPDGKIKVCPVHSFESPFQIRTLLLAKEPGRVIQGFYQTGCLVALERDMEAGKHKIPKGVYRLSTIRADAFVGIFNTHGNLLGPVGIQHLLRAGFKRIDG

SEQ ID NO: 6947 - protein, 1070 aa, synthetic construct
  REGION 1..1070: note = Synthetic
MSHEMTSQPPVPPETEVHYVLGIDLGTNSVGWAAVQLTKTGKPNGILRVGSRIFSAGTEGDITSGRDKSRNLERREARQSRRMIERRKRRKLKIFNMLQNADLLPQGPEIHEVLTGLDRTIREQYSAELGQNGPDINHRLPYLLRTWALDRQLSPHETGRALYHLAQRRGFQSNRKATPKKDEEIGKVKLGILELEQKMEETGSRTLGEYFASIDPVEERIRQRWTSRAMYKVEFDAIWSVQSKYRPDIFTEDFRLGISNAIFYQRPLKSQSGLIGQCELEKGRKRAPRALLESQKFRIVQTVNNIRVRVVESDGSYETRRLTDDERALLIQALDSGSGTLDKKGMVGPSGIKKILKLPTNSKINLGDDDAKIHGNITAFRLRSIFENKWDELSQAEKCHVVEDVLTIENSEALVRRAERVWKLSKSQAEQLAECTLEPGYISLSRQALSKVMPHLEEGLTYAEARYQAFPDIGKSVDSLDFLPPLDKSTLQSLATIRNPVVTRSLTELRKVVNSVIREYGKPDFIRIELARDLKNSRKSREEITKKNASNEKLRIAAKERILKEAGIMEPSRSDVERVLLAEECGWQCPYTGRVISMTGLLGGEFEIEHIIPYSVSFDDSFANKTLCYGQENRRKNNRSPFDSYSHTAEWPNILARAEKFQVKTGRVGERKARRFQWTPTQVEERYKDFSERQLNDTRYASRLAADYLGLLYGGRVDSAEKTGMKRKIQVGQGQVTARLRDAWDLNGILNDGGVKTREDNRHHSVDAIVIALTSPGILKEFSQQAQRAEYVKNGRLAVTIPPPWQSFTQQARDAIGEVTVSHAVSARVRGGLHEGTNYSPVIGEIGPDGLLRGTRHVRKKVFELSWGQVESIVDPKIREIVKEKIEEIGGKSQIKKLDGNFPILRAHNGVPIPVKRVRISIPGTKVIAVGAGPRERHVEPGSNHHIEIFEVQKPAGEILWEARVVTLLEAIQRRRLQQPIVDREWDGQHRFLFSLTQGDTIRYNNDLWIVKTWMGDPSKPQFKLALIQDARLAGEIPLSGRQPSLSNLQKDGCKKLKITPIGNVLAAND

SEQ ID NO: 6948 - protein, 1472 aa, synthetic construct
  REGION 1..1472: note = Synthetic
MGKKILGLDMGTNSLGWAIVEQHNRRFELVDKGVKIFPLGVNRDKSGESSKASERTQKRSSRRLKARKRYRKYFTLKALIEHDPPLCPLSPDELTAWKKSGYKAYPMEEAFLSWQRTDALQQEHPYAYRDLFSRETQDWRNKPELAFKLGRAFYHLAQRRGFASNRKDAGADEPLEAAKLQYEELLRDPLVAEDALLLKDKLRDLADIHLESDDKTVKAFARKIRKVAGGNETDADAVIAVTESLLTDKENMGLVKKSITELSEAIEAADCETLGQYFHQLMQQDRSLYENRIRGRYTERESHYEAEFNLIADKQQLPDELRKQLHRAIFFQRPLKSQKGSVGKCPFEPSKSRCPITHPLFEEYRMRSFLNNIAVQTADDLHMRPLSEAEKSEVEPLFYRVSKPSFPVSDIFDRLFGKDTYCYRKDHRAAEYSVKVNYNPATTVSGCPFTGRLMQVFKNSPDEHLHWKTLIVNRWTGKSLSENDIITRYWQALYFADTAGDRSSFTDVTRESALRRFADTFTSLTAQETARFTKIPPFRNDYANLSLKAIKLILPWLREGLIYSHAVFLAKLPEIIKPEIWENAANQAEITEQLISIIDGHDELQQLYFAVNEIVRNVRDGKMTEPENPHWVRAELEHKLSFKFGKKTWQEHPHQQSLISQAVSIFNAAMKTDRDEPVFQRTARLEDRIEKALKGKKIGEVAVVASPKMLKKLYHPSAIERFVPEVILRKGEPLMKDGKPLYGLPNPLKSSLKNPVVMRSLQQLRQLINHLLAEELIDEKTSIHIELARELNDANKRKAIENYQRKRQNERSEYRDEIIRLYKEQKNQTIEPTETDIQKYQLWKEQNGICLYTGDKIGLSDFIGDDPKYDIEHTLPRSRTLDNSMMNKTLSERTFNRDVKRNRMPSELENYDDYVQRIRHWVEKADALEDRINRLSRRTKAATTKDQKDKLIMQRHELSMERDYWRGKVKRFTATEIPEGFKISQKVDTGIITRYAKDFLGSLFKNRRGNPNVFPINGEMVAHFRKAWGLQDFFNDETGLWEMAPKNRSNHAHHAIDAVTIACITRDSHNRLSHAWRLQEEGQLAAMREVLRETKPWDTFTTDMQQLHEDLIVVHTDTDKPKKQVRKILRKRGVKQRKHHKPEEFIYQQGDTARGALHEETFYGRIMNPHEPEKSKDMFVVRKSIDGMDVKDATKIIDPNIREIVLRDIPRQKALNDRLKALQKEAKDAEAASKATLEAEIKSVENEISRLFHIPPKKGKTVWTPIRKVRIKAKLTEPLPGFKQHRDQSKHAYKQQLYVNNKENYAMAIYRDDKGRHDYALINLMEATQHLKASQRDFRREQDLVAPEMNGKSFFGLIRKNTLVCFYLESPDELTELSEKELTDRLYKAVNLEKDGRMKFQYFQESRGKIQFKSDFENANGKSPEKLMISGYSKYKASIEPLPYYHIGSKNYQFLIQDYHFTIDEKGGITFI

SEQ ID NO: 6949 - protein, 1154 aa, synthetic construct
  REGION 1..1154: note = Synthetic
MAKILGLDLGTNSIGWALIDDVQNKILGIGSRIFPMGVENLGEGEGREMSKNAGRTGSRGVRRQFFRRRLRKRILLKALSEHKMCPMIALDFEDWKKTKEFPSEKLANWFALNPYELRYKALHQKLSLEEIGRIFYHLIQRRGFLSNSRKGGTDDGTIFKGNPKEGKIGITETQESIHDKTLGSYLFEIYPKENQPFQGGLERIRNRYTTRKMYVDEFELIWNKQSQFYSELNEDLKTLFGGRKLDGYKEDGILFHQRPLRSQKHLVGNCAFEPTKTKCPISAIPFEQFRVWQWVNTVEYNGKKISQEEKEKIVEFLYSNEKPEFKKIRKVIGKESAEFKFNYKDEDKIVGTHTISNLSNKKYFGKKWFELSEKEQEDIWHVLYFFDSKSNLKEYAIKNWNFTEEQAESISKFNVKDGYSSLSRKAISNILPFLKLGFTYDVAVVLGGIKNVFGSDWDNLSDDKRNFLIDNMEGIVRSKTKGGFIDIIKDILRNDYNISDNQLRKLYHHTATIDVSELLEKLPIGKEADKEIQAIRNPIVISALFELRKLVNELIEDYGKIDEIKVEMARDLKISKSQRNKIRKEQNRLERENDRVKDRLIENNIRITHDNILLYKLWEECKKTCPYTGNPISVTQLFSGEVQIEHIHPWSRSLNDSFSNKTLCYADENRKKGNKTPYEFYGNDEANWSAIKERALKLFSDTKEYPNAYQKFKRFVQQKFDDDFSSRQLNDTRYISKEAKNYLSKVCKNVIVSPGQATSNLRQKWGLNHILNDENVKTREDHRHHAIDALVMACTKLSYVQELSKWNQYKKTHEMKNFPLPWETFNYDAEKAVEKILISHKRVSNDITIRYKTIEKNGKKHTNKGVAARGQLHLETVYGQNKNCKSDEYVYRVDINNLSFSQLTSIVDLNLKQIILNEIFKKLEFAEIEFFNMMNSKVKNLDKTQQKKIKEKIDKILKETSFFMPNEGKRYARLNKIEPNDIKRVPVPIKKVRIKKVLGKAERVNDKIKQFVDPNKNHHVLIYKDEKGNLKEEVVTFWTVVERKRTGQSAYQLPLDGKEMVTTLHINDMFLLGINNDEINWENPDFEVLKKNLYRVQKLSSKFYEFRLASEASIQNNFQPFYIRIQSFGEGKTGWDTFNPIKVKISVSGKIKKA

SEQ ID NO: 6950 - protein, 1151 aa, synthetic construct
  REGION 1..1151: note = Synthetic
MRKTVKGVIIFSVTLKILKRQIIMAKILGLDLGTNSIGWALIDDKLNKIIGMGSRIFPVGVDNLGDGEGELSKNASRTGARGTRRQFFRRRLRKRVLLKELASLNMCPLSNEDFENWKTTKKFPTQELASWFALNPYELRHRALNEKLSFEEIGRVFYHLIQRRGFLSNSRSAGKDDGAIFKGNAKEGKIGIDETREQIENKTLGSYFYEIAPKENQPFVDGLERIRNRYTTRQMYVDEFEQIWEHQKVYHSNLTHDIKEKIGGRKSDEGYKEDGILFHQRPLRSQKHLVGNCTFESNKTKCQLSAIPFELYRLHQWINTVEYNGHKLHADERKLVFNFLIEKEKPSFKDIRKAINKLDTIYKFNYKDEDKIVGTHTISNLCSKKFFGKKWFGFTEKEQEDIWHVLYFFDSKDKVKEYAIKNWGFDETQAEAISKFNLKDKYASLSRKAINNILPFLEMGFQYDIAVVLGGIKNAYGQNWETLDSGDKGLILDNIYEIVRSNMKGGFIEPLKHFLKTDLHLTEKQLTKLYHHSANIEETVLLDKLPVNANADKEIQAIRNPVVITALFEIRKLVNEIVDEYGKPDEIKVELARNLKASKSGRNEERKRQQKLERENDRVKVELNNLGKHISQDNLLLYKLWEECKHTCPYTGRSISVTQLFSGEVQIEHIHPWSKSLNDSFMNKTLCFADENRAKGDRTPFEFYSLQGENKWHEVKERALKLFSDTAQYPNSYQKFKRFVQQKFDDDFASKNLNDTRYISKEAKNYMSKICEKVSVSPGQMTANLRQKWGLNAVLNPEDKTKTREDHRHHAIDALVMACGTVEHLKKLSEWNRYDRKPENKNFPMPWDGFVKDAEVAVDKILVSHKKLNNIITVRTHKTEKNGHVHRNVGVAARGQLHKETVFGKRNFNGEEAYHVRKPIESLTTEKQIDKVVDESTRLLILKRVQELGGFEKDKVPANTFFVVDENGINQPQIFLPNKNGAPVPIKKVRMKESIGRAERLKEDINQYVNPRNNHHVIIYNDEKGNLKEDVVTFWTVVERKRQKQTVFQLPADGTSIVTTLQINDMFLLGLKEEEINWENPDCEVLKNHLYRVQKLSSKFYEFRLSKEASIQNNFQPYYVRIQSFGEGKTGWLSFNPIKVKISVSGKIEKL

SEQ ID NO: 6951 - protein, 1150 aa, synthetic construct
  REGION 1..1150: note = Synthetic
MRKAIKQGFNFCLYLTIVKKNQIIMAKILGLDLGTNSIGWALIDDRLNKILGIGSRIFPMGVENLGDGDNEISKNASRTGARGIRRQFFRRRLRKKILLKALSENKMCPLNIDDFERWKKTKNFPSEVLAEWFALNPYELRNKALNEKLSLEEIGRLFYHLIQRRGFLSNSRKAGSTDGAIFSGNAKEGKIGITETQHKIENKTLGSYLYEIYPKQNQPFQEGLERIRNRYTTRKMYVDEFEMIWEKQMQFHSGLNEDLKQVFGGRKLDGYKEDGILFYQRPLKSQKHLVGNCSFEPSKTKCPVSAIPFELFRVWQWVNTIEYNGSKISQGEKQKIVDFLCANEKPDFKKIRKVIGKESAAFKFNYKDDDKIVGAYTISNLSNKKYFGAKWFSFSEKEQEDIWHVLYFFDSKSNLKEYAIKNWNFTAEQAESISKFNVKEGYASLSRKAISMILPFLQMGFTYDVAVVFGGIRNAFGSDWEKLSDAKRNFLLDNIEGIVRSGAKGGFIEIIKDILRNDYTLSDNRMRKLYHHSAAIGVKELLTKLPVGKEADRQIQTIKNPIVITALFELRKLVNELIEEHGNLDEIKVEMARDLKLSKSQRNKIRRDQKRLERENDRVKNRLTEEGIRITHDTLLLYKLWEECRKTCPYTGKPISLSQLYSGEVQIEHIHPWSRSLNDSFANKTLCYANENRRKGDKTPYEFYGIDETHWSGIKERALKLFSDTKEYPNAYQKFKRFVQQKFDDDFSTRQLNDTRYISKEAKDYLALVCRKVNVSPGQMTSNLRQKWGLNHLLNTENNAKSREDHRHHAIDALVMACGKTSYLQELSKWNRYDRKPELKRFPLPWEGFNFDAEKAVEKILISHKKVSNDITIRTHKTEKNGVVYQNVGVAARGQLHKETVFGKRNFNGEEAFHVRKPIESLTTLKQIEKVVDASTRNLILKRIQELGGFVKDKVPANAFFIVNENGVRQPQIYLPNKNGAPVPILKVRMKENISGAEKLKDNINQWVNPRNNHHVLIYKDQKGNLKEEVVTFWTVVERKRTGEPVYKVPIEGKEIVTALHINDMFLLGLNEEEINWENPNYEVLKEHLYRVQKLSSGDYFYRKHLSSTVTDDNYKQIRGFGSGKTGWFNFSPVKVRISVLGKIQKAVNI

SEQ ID NO: 6952 - protein, 1135 aa, synthetic construct
  REGION 1..1135: note = Synthetic
MSTILGLDLGTNSIGWALINNTTSKIIGVGSRVFSEGVVDLGGGEGKEMSKNASRTVARGVRRQLFRRRLRKRYLLKELAKHQLCPIAPEALENWNQTTVFDTEVLKKWFQLNPYELRAKAIKAPISLHEIGRIFYHMIQRRGFLSNSRSAGAATKETSAIFKGDLKQEKVGIASTQQSIAQSITLGSYLHTIQPKEHAPYVKKVARIRNRYTTRQMYIDEFEMIWEFQKQFHAVLTNSLKTHLGGRKKDGYKKDGILFHQRPLRSQKHLVGNCTLEPKKTKASISSIPFEYFRIYQWINTLACDFNGNHHPISQKERHQIITLLLSAEKVAFKKIRKAIGKTEKEYQFNYKDDAIIYGTHTISNLSNKKFFGKQWFNFTQEEQENIWHILSFFDDREKLKNYAMTHWQFTEEKAIKISKFNLKEGYANLSRKAINGILPFLKEGFMYDVAVALAGVKNALGNTWQTHQEFVKNNVPEIVRANIKGGYLAPLKKMLAATLACTPTQLKKLYHHSSAIKATTIAPKLPVGDIADKEIQKIKNPIVIKALFEVRKLVNELITTYGKPDEIKIELARDLKTSKKNRYEIRKQQQFLEKENNRIQKELENLAQRATPTNILKYKLWEECNHTCPYTNTKIPIHKLFTGEIQIEHIYPWSRSLNDSFMNKTLCYANENRAKKNKTPYEFYHDEQGEEKWAQVKQQALACFKNKYPNYPNAYNKFKHFVQKKREEDFVSRQLNDTRYISKEAKNYLSKISNNVLVASGQATAALRHHWGLNSILNEVENAKTRHDHRHHAIDALVMACITAGHVQALSQWNRYDRNYELKDFAMPWPSFRVDAAVAIAGILVSHKKEKKLLTVRKHTVIKNGQPYTNKGIAARGLLHKESVYGKRKAPGKEEAYHIRKPIESITTEKKLEKVVDPTIKNLIFKRIQKLGGFVKGKIPSETFYKLAENGQRVPQIFLPNKNGAPVPIKKVRIREVIGKAVPLKNTVNQYVNPKNNHHILIYKNAKGIMEEEVVSFWEAVERKKQEIDVFKMPKKGKEKLAILQKNDMFVLGLDIETVEEAWQDNSLLKEHLYKVQKISSKDYNFRKHSDARPDEAAKKEYIRIRSLGEGKKGWEAMNPIKVKLNSIGKIVKA

SEQ ID NO: 6953 - protein, 1134 aa, synthetic construct
  REGION 1..1134: note = Synthetic
MAKTLGLDLGANSIGWALIDDVDNKILGIGSRIFQEGVVNLGEGEGREASKNASRTDDRGTRRQFYRRRLRKRYLLRELAKHNMCPLDYKAVKIWNQKEIFGNESIQAWLRLNPYELRAKAIKEELTLEELGRVFYHMIQRRGFQSNSRSVGADNNEKSVIYKGDSKIGKIGIAETSESIKHAETLGTYLNEIYPKENAPFVGGLERIRNRYTTRQMYIDEFETIWEHQKQYHKALTDNLKTIFGGRKKDGYAEDGVLFHQRPLRSQKHLVGNCTFEPKKTKCPISAIPNEQRRVYEWVNTLKCDLAGEPVRITDADREKIVKLLFSKEKVKFKEVRKAIDKLDRHYQFNYKDDDPVVGTHTISNLSNKKFFGKQWFDLTEKEQEDIWHVLYSFDDRDKLKQYAIEHWGFDDGRAEKISKFNLKEGYANLSRKAINNILPFLQLGFTYDVAVALGGVKNVLGNDWETHKAFVLDNVPEIVHSNLKGGYIDPLKAVLKKECNVSDKALKKLYHHSSAIDTNVLLERLPLGVDADKEIQNIKNPVVITALFEIRKLVNEIIDDYGKPDEIKVEMARDLKISKSKRNDIRREQKRLERENDRVKAELDYIGQRHTHDNILKYKLWEECNKTCPYTGRNIEVNQLFSGEVQIEHIHPWSKSLNDSFMNKTLCFADENRAKGDKTPYEFYSKQGEQKWNDIKLQALSCFKNKPPNYPNAYKKFKQFVKQKHDNDFISRQLNDTRYISKEAKNYLSKICDKVMVAPGQMTSNLRHHWGLNTILNQDDNVKTRADHRHHAIDALVMACATRGHLQELSKWNRYDRRYDLEHFPKPWTTFREDAEQAIEQILVSHKKQKSILTVRTHTTKKGNKTYKNIGVAARGQLHKETVFGKRQAPNSEEAYHIRKPIDSLTTEKQLEKVVDETIKQLIFKRIHFLGGFEKGKIPSETFFVVDENGLKQPQIFLPNRKGNPVPVLKVRMKENIGGAEQLKDDTNQWVNPRNNHHVIIYKNESGKLQEDVVTFWTVVERKRKGFSVYQLPADGKDIVTTLQINDMFLLGLSEDDVDWQEPNYDLLKSHLYRVQKLSSKFYEFRLNTEASIQNNFQPYYVRIQSFGDGKTGWLTFNPIKVKVSVTGKLEKV

SEQ ID NO: 6954 - protein, 1134 aa, synthetic construct
  REGION 1..1134: note = Synthetic
MARILGLDLGTNSIGWALIDDEKKEILGIGSRIFPEGVVNLGEGEGRETSKNASRTEDRGVRRQFFRRRLRKRYLLRELAKHDMCPIDYNMVKVWNQKEIFSNKNLQEWLRLNPYQLRAKAINEEVSLDELGRIFYHMIQRRGFQSNSRSAGAETNEKSVIFKGDAKAGKIGIAETANSIEDHQTLGSYLNQIYPKENAPFTDELERIRNRYTTRQMYIDEFEAIWEHQKQYHSELTDELKTIYGGRKKDGFPEDGVLFHQRPLRSQKHLVGNCSLEPKKTKCQISAIPNEQRRIYEWLNTLKCDLAGEKVKINSEEREKILDLLFSKEKVKFKEIRKAIGKLDGHYQFNYKDDDAIYGSHTISNLSNKKFFGKAWFDFSDKEQEDIWHVLYSFDDRDKLKAYALERWEFNEEKAEKISKFNLKDGYANLSRKAISNMLPFLKLGFTYDIAVALGGVKNALGIKWEPQEDFMLNNVPEIVRSNLEGGYIAHLKEMLKKESQLSDKELAKLYHHSSNIEITKLLDRLPVNPEADKEIQSIKNPVVITALFEIRKLVNEIIDDYGKPDEIKVELARDLKISKSKRNDIRKEQQRLERENDRVKAELDYIGQRPTHVNILKYKLWEECNRTCPYTGRNIEVNQLFSGEVQIEHIYPWSRSLNDSFMNKTLCFVDENGAKGDLTPFEFYGKLGEQKWEAIKLQALSCFKNKAHYPSAYFKFKQFVKQKHDSDFISRQLNDTRYISKEANNYLSKICSKVMVAPGQMTSNLRHHWGLNSVLNLEDDTKTRDDHRHHAIDALVMACSTRGHLQELSKWNRYDRSYDLNNFPKPWESFREDAEKAVDGILVSHKKSKSILTVRKHITEKNGERYTNKGVAARGQLHKETVFAKRQAPNSDEAFHVRKPIDSLTTEKQLEKVVDITIKQLIFKRINVLGGFVKGKIPLETFFTVDENGNKQPQIFLPNKNGNPVPVLKVRMRENIGGAEQLKDDLNQWVNPRNNHHVLIYKDDEGNLKEDVVTFWTVVERKSKGFPVYQLPPDGIEIITAMQINDMFLLGLNEDEIDWENLDYVFLNDYLFKVQTLSSNFYEFRLNRDATQIKDTNSNVFRRIQSFGKGKTGWLTFNPIKVKVSVSGKIVKI

SEQ ID NO: 6955 - protein, 1133 aa, synthetic construct
  REGION 1..1133: note = Synthetic
MTKILGLDLGTNSIGWAVVDDQQNEIADIGTRIFPMGVENLGDGDREMSKNAARTGARGIRRQFFRRRLRKKILLKALSENRMCPMTDADFEDWKKTKQFPSEKLTDWFVLNPYELRQKAVNEKISLEELGRILYHLIQRRGFLSNSRKGGSDDGAIFKGNVKEGKIGIEDTLESIEGKTLGGYLYEIYPKENQPFQYGLERIRNRYTTRKMYVDEFELIWNKQAQFHTDLNEDLKTLFGGRKQEGYKEDGILFHQRPLRSQKHLVGNCSFEPAKTKCPLSAVPVEQFRVWQWVNTIEYNGKKITQQEKEKIVTFLYANEKPEFKKIRKVIEKESAEFKFNYKDDDKIAGTHTISNLSNKKFFGKKWFEFSDKEQEDIWHVLYFFDSKSNLKEYAIKNWKFTEEQANNISRFNVKDGYASLSRKAINNILPFLQQGYTYDVAVVMAGIKNVFGAKWQNDTPENNVKQLTLIDNIEGIIRAKISGGFIDTVKDLLRKDFGLGDNELKKLYHHSAAITVTQILEKLPVGKAADKAIQAVRNPIVITALFELRKLVNELIDKHGAIDAIKIEMARDLKISKSQRNKIRREQKRLERENDRIRQEVEKYTRVTQDNILKFKLWEECKKTCPYTGVTIPVNKLFTGEIQIEHIHPWSRSLNDSFNNKTLCWADENRKKGDRSPYEFYGNDEANWSAIKERALKLFSDTKEYPNAYQKFKRFVQQKFDDDFTSRQLNDTRYISKEAKNYLAQICKNVMVSPGQMTANLRQKWGLNTVLNDANAKTREDHRHHAIDALVMACSKISYLQELSKWNRHNRNYDLKDFPLPWETFRYDAEKAIEKILVSHKKTSNAITVRTHKVEKNGKTYKNVGVAARGQLHKETVFGKRKFNGEEAFHVRKPIDNLETAKQIDKVVDETIRSLILKRINELGGFVKDKIPANTFFIADEKGVKQPQIFLPNKNGNPVPVLKVRMKETINKAKQLKKDENQYVNPRNNDHVLIYENYEGKLDKDVISFWEVVERKRQGTNHIQLPFDGKRIVQTFKENEMFILFKNEKDIDWNNVEINDLADYIYKVQKIAGADYFMEICFRKHNDSREDKYAKSDYTYLKGFGEGKTGWHTLNPIKIVISVTGNIKRYNY

SEQ ID NO: 6956 - protein, 1130 aa, synthetic construct
  REGION 1..1130: note = Synthetic
MSKILGLDLGTNSIGWALIDDVQNKILGIGSRVFPMGVDNLGDGDNEMSKNASRTGARGVRRQFFRRRLRKKKLLKALSKHHMCPLKDSDFEIWKKTKQFPSAKLAIWFAQNPYELRHKALHEKLSLEEIGRVFYHLIQRRGFLSNSRKGGTDDGAIFKGNTKEGKIGITETTESIKEKTLGSYLFEIHPKEHQPFQCGTERIRNRYTTRKMYVDEFESIWKQQSQFHTVLNDELKTLFGGRKLEGYKEDGILFHQRPLRSQKHLVGNCSFEPTKTKCPISAIVFEQFRVWQWVNTVECNGAKISQEDKGKIVDFLYSIEKPVFKRIRKVIGKESAEFKFNYKDDDKIVGTHTISNLSHNKYFGKKWFDFTQKEQDDIWHVLYFFDSKSNLKQYAIKNWNFTEAQAETISKFNVKDGYANLSRKAISNILPFLQQSYTYDVAVVMGGVKNVFGDTWQNDSLENNKKQLELIDNVEDIVRTKIKGGFIDTIKELLRKDFGFNNRQLKKLYHHSASINNDTLLEKLPVGKEADKEIQSIRNPIVITALFELRKLVNELIEDYGEIEDIKVEMARDLKSSKSQRNKVRRNQKRLERENDRIKTEVEKYVRISHDSILKFKLWEECKKTCPYTGRAISVTDLFSGEVQIEHIHPWSRSLNDSFGNKTLCWADENRKKGNKTPFEFYGNDEVHWATVKERALKLFSDTKEYPNAYQKFKRFVQQNFDDDFTSRQLNDTRYISKEAKGYLSKICGKVTVSPGQITSNLRHKWGLNHILNNENSKSREDHRHHAVDALVMACTKVSYVQELSKWNGYNRKSESKVFPMPWKTFRYDAEQAIDTILVSHKCIKNDITVRTHITDKNGKKHKNKGIAARGQLHKETVFGKRKAPFSEEAFHVRKSIDSLTTSKHLDKVVDETIKTLILKRIQQLGGFDKGKIPANTFFIVDEHGVKQPQIFLPNKNGDPVPVLKVRMKENFSGAEQLKDDVNQWVNPRNNHHVLIYKDEKGELKEDVVTFWTVVERKRQGASIYQLPSGGEEIVTTLHINDMFLLGLDEDEINWDTPDYKVLREHLYRVQKLSSKFYEFRLNSEASIQNNNNPYYVRIQSYGEGKTGWLTFNPIKVKVLVSGKIKRFNY

SEQ ID NO: 6957 - protein, 1130 aa, synthetic construct
  REGION 1..1130: note = Synthetic
MIKKLGLDLGTNSIGWALIEEGRIIKLGSRIFPEGVVNLGDGEGREQSKNSSRTEARGRRRQFFRRRLRKRYLLKELAKNGLCPLTSEQVKLWNQSGFFETQELKSWFALNPYELRVKAIHEEVTLHELGRIFYHMIQRRGFLSNSRSASAELNEKSVIFKGDDKVGKIGIAKTLDDISEHKTLGAYLATIAPKENEPFKNGQERIRNRYTTRQMFIDEFEIIWEAQKKYHTALTDELKSIIGGRKKDGYKDDGVLFHQRPLRSQKHLVGNCSFEPKKSKALKSTIYFEQFRVYQWVNTVECNGKRLSKEDREVLADQLFLKESVTFKALRKSLKKLDAYYQFNYNDDDKVVGTHTISKLSNKKFFGKEWFDYSEDTQEKIWNVLYFFDDRDKLKQYAIEHWGFDHEKAEAISKFNLKDGYANLSLKAIKNILPFLKSGFQYDVAVGLGGVKNALGEQWEENKAFVLDNVPEIVRSNLKGGYIEPLKQTLQTEFNLSNKQLLKLYHHSTSIATTSLLEKLPLGKEADREIQNIKNPVVVTALFELRKLVNELIDTYGKIDEIKVEMARDLKASKSQRNKVRLEQRRLERENDRVKDRLEKEGIRITHDNMLKYKLWEECNRRCPFTGKNIAIEQLFSGDIQIEHIFPWSRSLNDSFMNKTLCYADENRAKGNQTPYEFYSAQGEEKWAQIKQQALSCFSFKKEYPNAYKKFKHFVRKTHDSDFISRQLNDTRYISKEAKNYLSKICNNVTVSPGQATAKLRYHWGLNGILNEENAKVRTDHRHHAIDALVMACTTRGHLQELSKWNSYNRSYETKDFIVPWEGFLQDATKEVDNILVSHRRDKNLLTVRKHFTKKDGKVYSNIGVAARGQLHKETVYGKRTAPDTLEPAFHVRKPVVSLTPPEITKIVDSKIREIVYENIQNAGLLINSKDKKPVVKTPEEKKTFEKVLSEGFYLPNKKGEPVPIRKVRIRKRFTKVEPLKGDVNQWVDLQNNHHVLIYKDEEGNLKEDVVTFWLAVERKRQKQPVIQLPSDGFEIVTTLQINDMFLLGLKEDEINWENPDYNMIRRHLFRVQSASSFYYEFRMSTNTESQNKKEPYYFYIRSFGNGKTGWNTLNPIKVRVSSIGSIFKI

SEQ ID NO: 6958 - protein, 1130 aa, synthetic construct
  REGION 1..1130: note = Synthetic
MAKILGLDLGTNSIGWALIEDKQNKILGIGSRIFPMGVENLGDGDGEVSKNASRTGARGVRRQFFRRRLRKKVLLKALSENKMCPIDTKDFDDWKKTKQFPSEKLATWFALNPYELRQKALHEKLSLEEIGRIFYHLIQRRGFLSNSRKGGSDDGAIFKGNAKEGKIGIDDTLESIEGKTLGSYLYEIYPKDNQPFQYGLERIRNRYTTRKMYVDEFEMIWNKQCQYHFVLNDSLKELFGGRKQDGYKEDGILFHQRPLRSQKHLVGNCSFEPSKTKCPISAIPVELFRIYQWVNTVEYNGNKITQDEKSKLIEQLLSHDKIEFKKLRKAIGKESAEFKFNYKDDDKIVGTHTISNLSNKKFFGKQWFDFTEKEQEDIWHVLYFFDSKSNVKEYALSKWNFTEEQAEAISKFNVKDGYASLSRKAIGNILPFLKQGYTYDVAVVMAGIKNVFGDKWQNDTAENNQKQLDVIDNVYDIVRSKISGGFIDVIKELLRKEFGLNEKQLKKLYHHSATIDVKELLDKLPIGREADKEIQAIRNPIVITALFELRKLVNELIEEHGQLDEIKVEMARDLKISKSQRNKIRRDQKRLERENDRVKAEVEKYIKVTNDNILKFKLWEECKQTCPYTGVAIPVNKLFTGEIQIEHIHPWSRSLNDSFNNKTLCWADENRRKGDKTPFEFYGSDEQNWSAIKERALKLFSDTKEYPNAYQKFKRFVQQKFDDDFSSRQLNDTRYISKEAKEYLSQICSKVTVSPGQMTANLRQKWGLNTVLNDENAKTREDHRHHAIDALVMACGKTSYLQELSKWNRYSRNYDLKDFPMPWETFRFDAEKAVDKILISHKKVSNDITVRYKTVEKNGKKYTNKGVAARGQLHKEFVYGKRKAPFSDEAFHIRKPIESLLTEKHIEKVVDITIRNLIFKRVNEMGGFDKDKIPANTFFIVDENGVKQPQIFLPNKNGKQVPILRVRIQETINKAKQLKNNSNQFVNPRNNDHVLIYETIEGKLEKDVVSFWEVVERKKQGIDKIKLPIDGKKIIQTFKENDMFILFKNEDEINWDANNDLSDNLYKVQKIAGADYFMEICFRKHNDSRDDKNAKADYVYIKGFGEGKTGWFTFNPIKVKISVSGKIQKV

SEQ ID NO: 6959 - protein, 1130 aa, synthetic construct
  REGION 1..1130: note = Synthetic
MTMARILGLDLGTNSIGWALIDDKLNKILAIGSRIFPMGVENLGDGDNEISKNASRTGARGVRRQFFRRRLRKKILLQKLSENNMCPMDAQDFEDWKKTKLFPTAKLVKWFALNPYELRHKALNEKLSLEEIGRIFYHLIQRRGFLSNSRKGGIDDGAIFKGNQKEGKIGIDDTLASIEDKTLGAYLFEIYPKENRPFQNGLERIRNRYTTRKMYVDEFELIWSKQAQFHTNLNEELKILFGGRKLDGYKEDGILFHQRPLRSQKHLVGKCSFEPTKTKCPINAIPFEMFSIYQWVNTVEYNGKKVSKEEQEKLIEQLLSFEKIEFKKLRKAIGKESAEFKFNYKDDDKIVGTYTISNLSNKKFFGKKWFEFSDKQQEDIWHVLYFFDSKSNLREYAVKNWSFTEEQADTISKFNVKDGYASLSRKAIGNILPFMRQGYTYDVAVVMGGVKNAFGDKWQNDTVENNQRQLDLIENIEGTIRSKNSGSFIDTVKDLLRKEFEFDDKQLKKLYQHSVADDVTSLFEKLPIGKKADKEIQAIRNPIVITALFELRRLVNELIDDHGQLDEIKVEMARDLKISKSQRNKIRRDQKRLERENDRVKAEVEKYTRVSHDNILKFKLWEECKQTCAYTGIPIPITKLFTGEIQIVHIHPWSRSLNDSFNNKTLCYADENILKGDRTPFEFYGNDESNWPSIKERALKLFSDTKEYPNAYQKFKRFVQQKFDDDFSSYQLNDTHHISKEAKDYLSLVCKKVNVSPGQLTSNLRQKWGLNHILNTDNDAKSREDHRHHAIDALVMACVKTSYLQELSRWNRYDRKSELKNFPLPWVGFNFDAEKAVDKILISHKKLNNIVTIKAHRVKKNGVVFKNIGVAARGQLHKETVFGKRNFNGEEAFHVRKAIDSLTTEKQLEKVVDQTIKKLIHKRIQELGGFVKGSIPSNTFFNVDENGIKHPQIFLPNKNGSPVPILKIRMKENIGGAEQLKDDLNQWVNPRNNHHVLIYKDEKGILKEEVVTFWTVTERKRKGLPIYQLPADGSEIITTLHINDMFLLRLNEEAIDWEYPDYENLKENLFRVQKLSSKFYEFRLSSESSIQNNFQPFYVRIQSFGDGKTGWETFKPIKVKVSVSGKIQKV

SEQ ID NO: 6960 - protein, 1130 aa, synthetic construct
  REGION 1..1130: note = Synthetic
MSKILGLDLGTNSIGWALIDDGNKKILGMGSRIFPEGVVNLGEGEGRETSKNASRTEARGIRRQIFRRRLRKRYLLRELAKNGLCPLDYTLVKVWNEKEIFKNTQLQEWFKLNPYDLRSKAIKEKISLVELGRIFYHMIQRRGFQSNSRSAGTDNNEKSVIFNGDSKIGKIGIAETAQSIKSNKTLGSYLHSISPKENTPYSGELERIRNRYTTRQMYIDEFETIWEYQKKYHSVLTQNLKTIFGGRKKDGYAEDGVLFHQRPLRSQKHLVGYCAFESKKTKCPISAIPNELRRVYEWVNNLKCDIAGESVKFTSEERKKIIDLLLSKEKVRFKQIRKTINKLESYHQFNYKDDDYIIGTHTISNLSNKKFFGEKWFDFTEKEQEDIWHILSFFEDREKLKQYAIEKWGFDEEKATLISKFNLKDEYANLSRKAISNILPFLKLGFQYDVAVGLGGVKNTLGSKWEENKQFILDNVPEIVRSNLKGGYIEPLKMMLKNEFHLSDKQFGKLYHHSSSIKTVKLLDKLPVNLKADTEIQSIKNPVVITALFEIRKLVNELIDTYGKSDAIKVELARDLKASKKNRYETRRKQQQLEKQNDRVKDELEKLGQRINHTTILKYKLWEECDKRCPFTGKNIEVNELFSGEIQIEHIFPWSRSLNDSFMNKTLCFADENRAKGNLTPYEFYSKLGEEKWEEIKLQALSCFKTKPNYPNAYHKFKQFVKKKHDDDFISRQLNDTRYISKEAKNYLSKICNNVQVAPGQMTATLRHHWGLNSILNKDDDTKSRDDHRHHAVDALVMACSTRSHLQELTKRNRYQKNHELKDFEMPWLYFRQDAEKSVEQILVSHKKTNNVLTIRTHKTKKHGIVYKNTGVAARGQLHKETVYGKRTAPDGVEAFHVRKPIDSLTTKKQIDKVVDETIRFLILKRVDELGGFIKGKVPDGAFYAVDEGGNKLAQLFLPNKNGNPVPIKKVRMRENIGGAEPLKETINQHVNPRNNHHVLIYKDFDDNLREQVVTFWTAVERKRQKQSVFQLPEDGKEVVTTLQINDIFLLGLKSDDIDWEQPNYEILKKHLYRVQKLTSKDYFFRKHNSSTITDDDYKQIRGFGEGKTGWLTFNPIKVKISVSGKIEKI

SEQ ID NO: 6961 - protein, 1130 aa, synthetic construct
  REGION 1..1130: note = Synthetic
MAKILGLDLGTNSIGWALIDDKLNKILGIGSRIFPMGVENLGDGDNEMSKNASRTGARGVRRQFFRRRLRKKILLQKLSENKMCPMDAKDFEDWKKTKLFPTEKLAKWFALNPYELRQKALNEKLSLEEIGRIFYHLIQRRGFLSNSRKGGNDDGAIFKGNAKEGKIGIDDTLESIEGKTLGSYLYEIYPKQNQPFQDGLERIRNRYTTRKMYVDEFELIWSKQAQFYSNLNEELKTLFGGRKLDGYKEDGVLFHQRPLRSQKHLVGNCSFEPTKTKCPISAIPFEMFRIYQWVNTVEYNGKKIAQEEKDKIIEQLLSSDKIEFKKLRKAIGKESAEFKFNYKDDDKIVGTYTISNLSNKKFFGKKWFDFSDKEQEDIWHVLYFFDSKSNLKEYAVKNWNFTEEQAVAISKFNVKDGYASLSRKAIGSILPFMQQGYMYDVAVVMGGIKNAFGDSWQNDTVENNQKQLDLIDNVEGIVRSKTSGGFIDIVKDLLRKEFGFNEKQLKKLYHHSATIDVAALLEKLPVGKEADKEIQAIRNPIVITALFELRKLVNELIDEYGQFDEIKVEMARDLKISKSQRNKIRRDQKRLERENDRVKKEVEKYTRVSHDNILKFKLWEECKQTCAYTGIPIPIAKLFTGEVQIEHIHPWSRSLNDSFNNKTLCYADENRRKGDKTPFEFYGNDESNWSSIKERALKLFSDTKEYPNAYQKFKRFVQQKFDDDFSSRQLNDTRFISKEAKNYLTQICNKVSVFPGQMTANLRQKWGLNTVLNDENAKTREDHRHHAIDALVMACGKASYLQELSKWNRYNRNYDLKDFPMPWETFRFDAEKAVDKILISHKRLNNIVTIRTHKVEKNGKTYINKGVAARGQLHKETVFGKRNFNGEEAFHVRKTIDSLTTEKQLEKVVDETIKELIHKRIQELGGFVKGSIPLNTFFIVDENGIKQPQIFLSNKNGSPVPVLKIRMKENIGGAEQLKDNLNQWVNPRNNHHVLIYKDEKGNLKEEVVTFWTVVERKRKGFPTYQLPADGSKIITTLHINDMFLLGLNEDEINWENPDFDLLKEHLYRVQKLSSKFYEFRQGSQASIQNNFLPFYRRITGYGEGIGGWLTHNPIKVKISVSGKISKYNFI

SEQ ID NO: 6962 - protein, 1129 aa, synthetic construct
  REGION 1..1129: note = Synthetic
MAKILGLDLGTNSIGWALIEDAENKILGIGSRIFPMGVENLGEGEGREMSKNAGRTGARGVRRQFFRKRLRKKILLKALSENKMCPMLTTDFEDWKKTKQFPSEKLANWFALNPYELRQKALNEKLSLEEIGRIFYHLIQRRGFLSNSRKGGNDDGAIFKGNEKEGKIGITKTQESIQDKTLGSYLFEIYPKENQPFQDGLERIRNRYTTRKMYVDEFELIWNKQAQFHSSLNEDLKTLFGGRKLDGYKEDGILFHQRPLRSQKHLVGNCSFEPTKTKCPISAIPFEQFRVWQWVNTVEYNGKKISQEEKEKMVEFLYANEKPEFKKIRKVIGKESAEFKFNYKDDDKIVGTHTISNLYNKKFFGKRWFEFSEKEQEDIWHVLYFFDSKSNLKEYAIKNWDFTEEQANDISKFNVKDGYSSLSRKAIFNILPFLKQGYTYDVAVVMGGIKNVFGSKWQNDSDTNNQKQLEIIDNVEGIIRSKTKGGFIDIIKDILRNDYNVSDNQLRKLYHHSATIDVTELLEKLPLGKEADKEIQAIRNPIVITALFELRKLVNELIEEHGKIDEINVEMARDLKISKSQRNKIRKEQNRLERENDRIKARLLEEGQRITHDNILLYKLWEECKHVCPYTGKTISVHQLFSGEVQIEHIHPWSRSLNDSFSNKTLCYAKENTLKGNKTPFEYYGNDEAHWSAIKERALKLFSDTKEYPNAYQKFKRFVQQKFDDDFSSRQLNDTRYISKEAKNYLSKICNKVIVSPGQATSNLCQKWGLNSVLNVENAKTREDHRHHAVDALVMACTKVTYVQELSKWNRYNRKPELKEFPMPWQTFRYDAEKAVENILVSHKRVSNDITVRTHITEKNGKKHINLGIAARGQLHKETVFGKRTFNGEEAFHVRKPIDSLTNEKQLEKVVDETIKLLIIKRIQVLGGFVKGVIPNNTFFIVDENGIKQPQIFLPNKNGEPVPILKVRVKENIGGAEKLKDNVNQWVNPRNNHHVLIYKDEKGNLKEEVVTFWTVVERKRTGESVYKLPIDGKEIITTLHINDMFLLGLKEEEINWENPDYEVLKEHLYRIQKLSSKFYEFRLNTEASIQNNFQPFYVRIQSFGEGKTGWDTFNPLRVKVSVSGKIKRA

SEQ ID NO: 6963 - protein, 1128 aa, synthetic construct
  REGION 1..1128: note = Synthetic
MTKILGLDLGTNSIGWAVVDEKKEKILGMGSRIFPEGVVNIGEGEGRETSKNASRTDARGTRRQFFRRRLRKRYLLRELAKKGLCPINYTLVKEWNEAQIFKNKQLQEWFKLNPYELRSKAIQEKISLEELGRIFYHFIQRRGFQSNSRSAGVDNIEKSVIFKGDTKTGKIGISETLESIKNTKTLGSYLHTIYPKQNKPYSGHKERIRNRYTTRQMYIYEFETIWEYQKQFYSELSNELKTVLGGRKKDGYKEDGILFHQRPLRSQKHLVGYCSFEPKKTKCQINTIPFELFRIYQWVNTVDCNEKVTSEDRGKMVELLLSKEKVSFKEIRKVINKSDGYYQFNYKNDDKIVGSYTISNLSNKKFFGKKWFDFSDKEQEDIWHVLSFFDDRDKLKQYAIKYWGFNEEKAVKISKFNLKEGYSNLSRKAIHNILPFLKLGFMYDVAVGLGGVKNALADKWIENEQFILDNVPSVVRSNFKGGYIEPLKQMLKYEFDVSDKQLLKLYHHSSAIETTELLKKLPINSEADKEIQSIKNPVVITALFEIRKLVNEIIDTYGKFDEIKVELARDLKASKSKRYDTRREQLRLEKENDRIKIELENLGQRINHITILKYKLWEECDKRCPFTGKNIEVNELFSGEVQIEHIFPWSRSLNDSFMNKTLCFADENRAKGNKTPYEFYSEQGEQKWEEIKIQALSCFKNKPNYPNAYQKFKQFVKKKHDEDFISRQLNDTRYISKEAKNYLSKICNNVQVAPGQMTATLRHKWGLNTILNKDDDTKTRDDHRHHAIDALVMACSTRSHLQELSKRNRYQKDYEFKDFPMPWQFFRQDAEKSVEQILVSHKKLNTILTVRTHKTKKNGVVYKNIGVAARGQLHKETVFGKRTAPDGIEAYHVRKPIESLSTHKHINKVVDETIRLLILKQVNKLGGFVKGKIPEGTFYNTDENGNKQPQIFLPNKNGNPVPIKKIRLRENIGGAEQLKSTVNQHVNPRSNHHVLIYKDFDDNLKEKVVTFWTAVERKKQKQAVFQLPENGKEIVTTLQINDMFLLGLKDDEINWEHPKFTLLKEHLYRVQKFTSGDYYFRKHIESNLNGELGKAYQYIKGFGEGKTGWKTFNPIKIKVSVSGKIEKV

SEQ ID NO: 6964 - protein, 1127 aa, synthetic construct
  REGION 1..1127: note = Synthetic
MAKILGLDLGTNSIGWALIDDVQNKILGIGSRIFPMGVENLGDGDNEMSKNASRTGARGVRRQFFRRRLRKKILLQKLSENNMCPMNSDDFEDWKKTKLFPTDKLSKWFALNPYELRKKALNEKLSLEEIGRIFYHLIQRRGFLSNSRKGGNDDGAIFKGNAKEGKIGIDDTLESIEGKTLGSYLYEIYPKANQPFQDGLERIRNRYTTRKMYVDEFELIWDKQAEFHSVLNYDLKTIFGGRKQDNYKEDGILFHQRPLRSQKHLVGNCSFEPTKTKCPVSAVPVEMFRIYQWVNTVEYNGKKISQEEKDKLIEQLLLSDKIEFKKLRKAIGKESAEFKFNYKDDDKIVGTHTISNLSNKKFFGKKWFEFSDKEQEDIWHVLYFFDSKSNLKEYAVKNWNFTEEQAIAISKFNVKDGYASLSRKAIGNILPFMQKGYTYDVAVVMGGIKNTFGEKWQNDTSENNQKQLDLIDNIEGIVRSKISGGFIDTIKDLLRKEFQFNDKQLKKLYHHSATIDVASLLEKLPVGKDADKEIQAIRNPIVINALFELRKLVNELIDEHGQLDEIKVEMARDLKISKSQRNKIRRDQKRLERENDRVKTEVEKYVRVSHDNILKFKLWEECKQTCAYTGVPIPIAKLFTGEVQIEHIHPWSRSLNDSFNNKTLCYADENRRKGDKTPFEFYGNDELDWIARKERALKLFSDTKEYPNAYQKFKRFVQQKFDDDFSSRQLNDTRYISKEAKNYLTQICNKVAVSPGQMTANLRQKWGLNTVLNDENAKTREDHRHHAIDALVMACGKTSYLQELSKWNRYNRNYDLKDFPMPWETFRYDAEKAVDKILISHKRLNNIVTVRTHKVEKNGVIHKNIGVAARGQLHKETVFGKRNFNGEEAFHVRKSIDSLTTEKQLEKVVDETIRKLIHKRIQEIGGFVKGTIPANTFFVVDENGVKQPQIFLPNKSGAPVPILKIRMRENIGGAEQLKDNLNQWVNPRNNHHVLIYKDEKGNLKEEVVTFWTVVERKRKGFPTYQLPLDGKEIVTTLHINDMFLLGLNEDEVNWENPDYEILRDSFYRVQSLSSKYYEFRQSINAESQNKVSPIYEQIRGFGSGKTGWDSFNPIKVKVSVSGKISKM

SEQ ID NO: 6965 - protein, 1127 aa, synthetic construct
  REGION 1..1127: note = Synthetic
MAKILGLDLGTNSIGWALIDDKLNKILGIGSRIFPMGVENLGDGDNEMSKNASRTGARGVRRQFFRRRLRKKVLLKSLSENKMCPISSKDFEDWKQTKQFPSASLATWFAMNPYELRQKALKEKVSLEELGRIFYHLIQRRGFLSNSRKGGSDDGAIFKGNAKEGKIGIDDTLESIEGKTLGSYLYEIYPKENQPFQDGLERIRNRYTTRKMYIDEFELIWEKQSEFHSVLNYDLKTIFGGRKQDNYTEDGILFHQRPLRSQKHLVGNCSFEPSKTKCPISAIPVEMFRIWQWVNTVEYNAKKISEEEKAKLVEQLLSFDKIEFKKLRKAIGKESAEFKFNYKDDDKIVGTHTISNLSNKKFFGKKWFDFSDKEQEDIWHVLYFFDSKSNLKEYAIKNWEFTEEQAIAISKFNVKDGYASLSRKAIGNILPFLQHGYTYDVAVVMGGIKNTFGDKWQNDTVENNQRQLDLIDNIEGIVRSKISGGFIDTIKDLLRKEFQFSDKQLKKLYHHSATIDSSVLLEKLPIGKGADKDIQAIRNPIVITALFELRKLVNELIQEHGQLDEIKVEMARDLKISKSQRNKIRRDQKRLERENDRVKKEVEKYTRVSHDNILKFKLWEECKQTCPYTGVVIPVTKLFTGEVQIEHIHPWSRSLNDSFNNKTLCYADENRRKGDKTPFEFYGNDELDWVARKERALKLFSDTKEYPNAYQKFKRFVQQKFDDDFSSRQLNDTRFISKEASSYLKQVCKKVNVSPGQMTANLRQKWGLNTVLNDENAKTREDHRHHAIDALVMACGKTSYLQELSKWNRYNRNYDLKDFPMPWETFRFDAEKAVDKILISHKRISNDITIRYTKVEKNGKTYTNKGVAARGQLHKETVFGKRNFNGEEAFHVRKAIDSLTTEKQLEKVVDEVIRKLIYKKIQELGGFVKGVIPANTFFIVDENGVKQPQIFLPNKNGNPVPILKVRMKENISGAEKLKENINQWVNPRNNHHVLIYKDEKGNFKEDVVTFWTVVERKRIGDSVYKLPMEGKEIVAILHINDMFLLGLNEEEINWEKPDYEVLRDHLYRVQSLSSKYYEFRQSVNAQSQNKVSPIYEQIRGFGLGKTGWDFFNPIKVKISVSGKISKI

SEQ ID NO: 6966 - protein, 1127 aa, synthetic construct
  REGION 1..1127: note = Synthetic
MAKILGLDLGTNSIGWALIDDTLNKVLGIGSRIFPMGVENLGDGDNEMSKNASRTGARGVRRQFFRRRLRKKILLQKLSENSMCPMDSKDFENWNKTKLFPTVKLAKWFALNPYELRQKALNEKLSLEEIGRIFYHLIQRRGFLSNSRKGGNDDGAIFKGNPKEGKIGIDDTLESIEGKTLGSYLFEIYPKENQPFQDGLERIRNRYTTRKMYVDEFELIWNKQAQFYSNLDLELKTLFGGRKLDGYKEDGILFHQRPLRSQKHLVGNCTFEPTKTKCPISAIPFEMFRIYQWVNTVEYNGKKISQEEKEKIIELLLSFDKIEFKKLRKAIGKESAEFKFNYKDDDKIVGTYTISNLSSKKFFGKRWFDFSEKEQEDIWHVLYFFDSKSNLKEYAIKNWNFTEDQAIAISKFNVKDGYASLSRKAIGNILPFMQQGYTYDVAVVMGGIKNAFGDKWQNDTFKNNQKQLELIDNIEDIIRSKISGGFIDSIKNIICKEFGFEDKQLKKLYHHSIVIDVKRLLDKLPTDKEADKEIQAIRNPIVITALFELRKLVNELIDEHGQFDEIKVEMARDLKISKSQRNKIRRDQKRLERENDRVKTEVEKYSRVSHDTILKFKLWEECKQTCPYTGASIPIAKLFTGEIQIEHIHPWSRSLNDSFSNKTLCYANENRLKGDRTPFEFYGNDESNWSSIKERALKLFSDTKEYPNAYQKFKRFVQLKYDDDFTSRQLNDTRFISKEAKNYLAQICNKVVVSPGQMTANLRQKWGLNNVLNEENIKTRADHRHHAIDALVLACGKTSYLQELSRWNRYNRNYDLKKFPLPWETFRYDAEKAVDKILISHKRLKNIVTVRTNKTEKNGNTHKNTGVAARGQLHKETVFGKRNFNGEEAFHIRKAIDSLTTEKQLEKVVDETIKKIIHKRIQELGGFVKGTIPLKTFFIVDPNGVKQPQIFLPNKNGNPVPILKVRLKENIGKAEQLKDDLNQWVNPRNNHHVLIYKDEKGNLKEEVVTFWTVVERKRKGFPVYQLPIDGIEIITTLHINDMFLLNLDEDEINWSDLDYERLNNNLFRVQKLSSKFYEFRLSSESSIQNNFQPFYIRINSFGDGKTGWKTFKPIKVKVSVSGKIQKM

SEQ ID NO: 6967 - protein, 1125 aa, synthetic construct
  REGION 1..1125: note = Synthetic
MAKILGLDLGTNSIGWAIVDDKFNKILGIGSRIFPMGVENLGDGDNEMSKNASRTGARGVRRQFFRRRLRKKVLLKSLSENNMCSMSLKDFEDWKQTKQFPSEKLATWFAMNPYELRQKALNEKLSLEEIGRIFYHLIQRRGFLSNSRKGGSDDGAIFKGNAKEGKIGIDDTLESIEGKTLGSYLYEIYPKENQPFQDGLERIRNRYTTRKMYIDEFELIWEKQAQFHSGLNDDLKTIFGGRKQDNYEADGILFHQRPLRSQKHLVGNCSFEPTKTKCPISAIPVEMFRIWQWVNTVEYNGKKINQIEKEKLIEQLLSFDKIEFKKLRKAIGKESAEFKFNYKDDDKIVGTHTISNLSNKKFFAKKWFDFSEKEQEDIWHVLYFFDSKSNLKDYAIKNWNFSEEQAIAISKFNVKDGYASLSRKAIGNILPFLQQGYTYDVAVVMGGIKNTFGDKWQNNTAENNQKQLDLIDNVYDIVRAKISGGFIDTIKDLLRKDFQFDDKQLKKLYHHSVTIDVTALLEKLPVGKNADKEIQAIRNPIVITALFELRKLVNELIEEHGQLDEIKVEMARDLKISKSQRNKIRRDQKRLERENDRVKSEVEKYTRVSHDNILKFKLWEECKQTCPYTGVTIPVSKLFTGEVQIEHIHPWSRSLNDSFNNKTLCYADENRRKGDKTPFEFYGNDELDWIARKERALKLFSDTKEYPNAYQKFKRFVQQKFDDDFSSRQLNDTRFISKEASSYLTQVCKKVNVSPGQMTANLRQKWGLNTVLNDENAKTREDHRHHAIDALVMACGKTSYLQELSKWNRYNRNYDLKDFPMPWETFRFDAEKAVDKILISHKRISNDITIRYTKVEKNGKTHINKGVAARGQLHKETVFGKRNFNGEEAFHVRKSIDSLTTEKQLEKVVDEAIRKLIFKRIQELGGFVKGTIPANTFFIVDENGVKQPQIFLPNKNGAPVPILKVRMKESIGRAEKLKDNVNQWVNPRNNHHVLIYKDEKGNLKEDVVTFWTVVERKRQGLLVYQLPIGGKELVTTLHTNDMFLIGLSEEEINWENIDYNILNEHLYRVQKTSKKEKSFEFNFRASIASSLDNKNQEVSIQSFKKWIEVNPIKVKISVSGKISKM

SEQ ID NO: 6968 - protein, 1124 aa, synthetic construct
  REGION 1..1124: note = Synthetic
MAKILGLDLGTNSIGWALIDDKLNKIIGIGSRIFPMGVENLGDGDNEISKNASRTGARGVRRQFFRRRLRKRILLRSLSENNMCPMVAHDFEDWKITKQFPSEKLAVWFALNPYELRQKALTNKLSLEEIGRIFYHLIQRRGFLSNSRKGGSDDGAIFKGNAKEGKIGIDDTLESIEGKSLGSYLFEIYPKENQPFQDGLERIRNRYTTRKMYIDEFELIWDTQAKFHFVLNNDLKTLFGGRKQDNYKEDGILFHQRPLRSQKHLVGNCSFETSKTKCPISAIPVEIFRIWQWVNTVEYNGTKISKHEKDKLIDLLLLSDKIEFKKLRKVIGKESAEFKFNYKDDDQIVGTHTISNLSNKKFFGKKWFEFSEKEQEDIWHVLYFFDSKSNLKDYAIKNWYFNEEQAIAISKFNVKDGYASLSRKAIGNILPFLQLGYTYDVAVVMGGIKNTFGDKWQNDSSENNQIQLDLIDNVEGIVRSKISGGFIDTIKELLRKDFLLNEKQLKKLYHHSATIDVTALLDKLPVGKDADKEIQAIRNPIVITALFELRKLVNELIEEHGELDEIKVEMARDLKISKSQRNKIRRDQKRLERENDRVKSEVEKYTRVSHDNILKFKLWEECKQTCPYTGVTIPVSKLFTGEVQIEHIHPWSRSLNDSFNNKTLCYADENRRKGDKTPFEFYGNDELDWISRKERALKLFSDTKEYPNAYQKFKRFVQTKFDDDFSSRQLNDTRFISKEASTYLKQICKKVNVSPGQMTANLRQKWGLNTVLNDENAKTREDHRHHAIDALVMACGKTSYLQELSKWNRYNRNYDLKDFPMPWETFRFDAEKAVDKILISHKRIAKDITVRYTKVEKNGVTHINKGVAARGQLHKETVFGKRNFNGDEAFHVRKSIDSLTTEKQLEKVVDEAIRKLIHKRIQELGGFVKGTIPANIFFIVDENGVKQPQIFLPNRNGAPVPILKIRMKENIGGAEKLKDNVNQWVNPRNNHHVLIYKDEKGNLKEEVVTFWTVVERKRTGQTAYQLPPDGKEIVATLHINDMFLLGLKEEEIDWKNPDCDILKECLYRVQKLTAGDYFFRKHKSSTITDDDYKQIRGFGEGKTGWFSFIPIKVKISVSGKISKI

SEQ ID NO: 6969 - protein, 1124 aa, synthetic construct
  REGION 1..1124: note = Synthetic
MAKILGLDLGTNSIGWALIDDVQNKILGIGSRIFPMGVENLGDGENEMSKNASRTGARGIRRQFFRKRLRKKILLKALSENNMCPLVEMDFIDWKKTKQFPSEKLAVWFALNPYELRQKALIEKLSLEEIGRIFYHLIQRRGFLSNSRKGGSEDGAIFKGNVKDGKIGITETQEKIENKTLGAYLFDIYPKENELFQDGLERIRNRYTTRKMYVDEFEVIWESQKQYHSSLNENLKTLLGGRKIDGYKEDGIIFHQRPLRSQKHLVGNCSFETSKTKSPISAIAFEQFRVWQWVNTVEYNGSKISQEQKEIVVGFLYANEKIDFKKIRKVLGKESAEFKFNYKDDDKIVGTHTISNLSNKKFFGKKWFEFSEKKQDDIWHVLYFFDSKSNVKEYAIKKWNFTAEQAEAISKFNVKDGYANLSKKAINNILPFLQIGFTYDVAVVMGGIKNTFGADWEKISHEKRNFLIDNIEGIVRSKTKGGFITIIKDILLNDYNLTENQMKKLYHHSATIDVSKLLEKLPLGKDADKEIQAIRNPIVITALFELRKLVNELIDDNGQIDQIKVEMARDLKISKSQRNKIRRDQKRLEKENDRVKTEVLKYTNLSHDNILKFKLWEECKKTCPYTGNAISVKQLFSGEIQIEHIHPWSRSLNDSFSNKTLCYADENREKANKTPFEFYGSDENNWSAIKERALKLFSDTKEYPTAYQKFKRFIQQKFDDDFTSRQLNDTRYISKEAKNYLTKVCKKIIVSPGQATSNLRHKWGLNTILNDENIKSREDHRHHAIDALVMACTKTAYVQELSNWNRYNRNSVLKEFPMPWETFRYDAEKAINSILVSHKRISNDITVRTHISEKNGAKYKNVGIAARGQLHKETVFGKRNFNGEEAFHVRKSIDSLETAKQIDKVVDKTTRFLILKRVQELGGFVKGKVPVNTFFVVDENGINQPQIFLPNKNGDPVPILKVRVKENIGGAEKLKENINQWVNPRNNHHVLIYKDEKENLKEEVVTFWTVVERKRTGESAYKLPTDGKEIVTTLHINDMFLLGLNDDEINWENPNNEIFKEHLYRIQKLSSKFYEFRLCSQSSLDNNYQPYYNSIRGFGAGKTGWFTFNPIKVKISVSGKITKI

SEQ ID NO: 6970 - protein, 1123 aa, synthetic construct
  REGION 1..1123: note = Synthetic
MAKILGLDLGTNSIGWALIDDVQNKILGVGSRIFPMGVENLGDGDGEISKNASRTGTRGVRRQFFRRRLRKKVLLKALSENNMCPMITSDFDNWKKTKQFPSEKLASWFALNPYELRNKALSEKLTLEEIGRIFYHLIQRRGFLSNSRKGGTDDGAIFKGNPKEGKIGITDTQESIQDKTLGSYLFEIYPKENQPFQNGLERIRNRYTVRKMYVDEFEMIWEKQAQYYSNLNEDLKTLFGGRKLDGYKEDGILFHQRPLRSQKHLVGNCVFEPNKTKCPISAIPFEQFRVWQWVNTVEYNGKKISQVEKEKIVEFLYANDKTDFKKIRKAIGKESTEFKFNYKDDDKIVGTYTVSHLSNKKYFGKKWFEFSEKEQEDIWHILYFFDSKSNLKEYAIKNWNFTEEQAESIAKFNVKDGYSSLSRKAISNILPFLKLGFTYDVAVVLGGIKNVFGHEWEKLSDEKRNFLIDNVEGIVRSKTKGGFIDVIKDILRNDYNISDNQLRKLYHHSATIYVAELLEKLPVGKEADKEIQSIRNPIVITALFELRKLVNELIDDFGSIDEIKVEMARDLKISKSQRNKIRREQKRLERENDRVKARLLEEGQRITHDNILLYKLWEECKKTCPYTGNPIPLYKLFTGEIQIEHIHPWSRSLNDSFANKTLCYADENRKKGDKTPYEFYGNDESNWSAIKERALKLFSDTKEYPNAYQKFKRFVQHKFDDDFSSRQLNDTRYISKEAKNYLSKICKKVAVSPGQATSNLRQKWGMNNILNDENEKTREDHRHHAIDALVMACTKISYVQELSKWNRYNRNAELKKFPLPWETFWSDANRAVDKILISHKKVSNDITGRTHISEKNGKKYKNVGVAARGQLHKETVYGKRTFNGEEAFHVRKTIDSLTTEKQLEKVVDESIKLLIKKRVQELGGFVKGAIPANTFFVVDENGIKQPQIFLPNKNGAPVPVLKVRMKENIGGAEKLKENVNQWVNPRNNHHVLIYKDEKGNLKEEVVTFWTVVERKRTGQSAYQLPFDGKEIVTTLHINDMFLLGLNEEEINWENPDYEVLKEHLYRVQKFTSGDYYFRIAKTSSIQNAIEKQQINSFGFGKNGWSTHNPIKVKISVSGKISKV

SEQ ID NO: 6971 - protein, 1123 aa, synthetic construct
  REGION 1..1123: note = Synthetic
MSKILGLDLGTNSIGWALIDDNQNRILGVGSRIFPMGVENLGDGDGEVSKNASRTGARGVRRQFFRRRLRKKVLLKALSEHNMCPMVTIDFEDWKKSKQFPSEKLSNWFSLNPYELRHKALSEKLTLEEIGRILYHLIQRRGFLSNSRKGGSDDGAIFKGNPKEGKIGITETQESIQDKSLGSYLFEIYPKENQPFEGGLERIRNRYTIRKMYVDEFELIWNKQSQFHSSLNDDLKTLLGGRKLDGYKEDGILFHQRPLRSQKHLVGNCSFEPTKTKCPISAIPFEMFRIWQWVNTLEYNGKKITQEEKEKIVEFMCANEKPDFKRIRKVIGKESAEFKFNYKDDDKIVGTHTISNLSNKKFFGKAWFDFSEKEQEDIWHVLYFFDSKSNLKDYAIKHWNFNEAQASDVSKFNVKDGYSSLSRKAISNILPFLKLGFTYDVSVVLGGIKNVFGSEWEKLSEEKRNYLIDNVEGIVRSKIKGGFIDVIKGILRNDYSISDNQLRKLYHHSATIDAVELLDKLPVGKEADKEIQAIRNPIVITALFELRKLVNELIDEHGKLDEIKVEMARDLKISKSQRNKIRREQKRLERENDRVKDRLVENNIRITHDNILLYKLWEECKKTCPYTGKPISVTQLFSGEVQIEHIHPWSRSLNDSFSNKTLCYADENRKKGNLTPFEFYGSDETNWSAIKERALKLFSDTKEYPNAYQKFKRFVQVKFDDDFSSRQLNDTRYISKEAKNYLSRICKNVIVSPGQATSNLRQKWGMNNILSDENEKTRDDHRHHAVDALVMACTKVSYVQELAKWNRYNRNSELKNFPLPWETFRFDAEKAVEKILISHKKVSNDITVRTHITEKNGIKYKNVGVAARGQLHKETVFGKRTFNGEEAYHVRKSIDSLETAKQIEKVVDETIKQLILKRVNELGGFVKDKVPANTFFIVDEKGIKQPQLFLPNKNGQPIPVLKVRVKESVGRAEQLKANVNQWVNPRNNHHVLIYKDEHGNLKEDVVTFWTVVERKRTGQSIYQLPINGKEIITSLHTNDMFIIGLNEDEINWELIDFNLINHHLYRVQKTSKKEKSFEFNFRLGIASSLDNKSQEISIQSFKKWIELNPIKVKISVSGKIQKV

SEQ ID NO: 6972 - protein, 1122 aa, synthetic construct
  REGION 1..1122: note = Synthetic
MAKILGLDLGTNSIGWALIDDVQNKILGIGSRIFPMGVENLGDGDNEMSKNASRTGARGIRRQFFRKRLRKKILLKALSENNMCPLVEMDFIDWKKTKNFPSEKLSSWFALNPYELRQKALLEKLTLEEIGRIFYHIIQRRGFLSNSRKGGSEEGAIFKGNAKDGKIGITETQEKIGGTTLGSYLFDLYPKKNEPFQNGLDRIRNRYTTRRMYVDEFEVIWESQKQYHSSLNQNLKTLFGGRKIDGYKEDGIIFHQRPLRSQKNLVGNCSFEPSKNKCPISAIAFEQFRVWQWVNTVEYNGNKISQEQKEIIVDFLYAHEKPDFKKIRKVLGKESAEFKFNYKDDDKIVGTHTISNLSNKKFFGKEWFEFSEKEQEDIWHVLYFFDSKSNLKEYAVRKWNFNEEQAQAISKFNLKDGYASLSRKAILNILPFLQMGFTYDVAVVIGGIKNAFGLVWEKLSEEKRNFLIDNVEGIVRSRTKGGFINIIKDILRNDFNISDNQMKKLYHHSAKIDASELLEKLPINKDADKEIQAIRNPIVITALFELRKLVNELIDDHGKIDEIKVEMARDLKISKAQRNKIRRDQKRLEKENDRVKVEVLKYTNISHDNILKFKLWEESKKTCPYTGKAISIEQLFSGEIQIEHIHPWSRSLNDSFSNKTLCYADENRKKGNKTPFEFYSSDENNWSAIKERALKLFSDTKEYPTAYHKFKKFVQQKFDDDFTSRQLNDTRYISKEAKNYLAKVCKNIIVSPGQATSNLRRKWGLNTILNDENIKSREDHRHHAIDALVMACTKTVYVQELSKWNRYNKDSVLREFPMPWETFRYDAEKALENILVSHKRVSNDITVRTHISEKNGNKYKNVGVAARGQLHKETVFGKRDFNGEEAFHVRKSIDSLETPKQIDKVVDKTTRFLILKRVQELGGFVKGKVPLNTFFVVDENGIKQPQIFLPNKNGNPVPILKVRMKENIGGAEKLKENINQWVNPRNNHHVLIYKDERENLKEEVVTFWTVVERKRTGESAYKLPTDGKEIVTTLHINDMFLLGLNDNDINWEDLDYEILKEHLYRVQKLTSGDYFFRKHVSSTVTDANFIQIRGFGEGKTGWVRFNPIKIKLTVSGKVSKQI

SEQ ID NO: 6973 - protein, 846 aa, synthetic construct
  REGION 1..846: note = Synthetic
MGKILGLDLGTNSIGWAIIEDKEKKIIGMGSRIFHEGVVDLGMGQREISKNASRTNARGIRRQIFRKKIRKLYLLKILSKNKLCPLDTNEVKTSNSEIFKNKELTEWFKINPYELRAKAVNEKIELNELGRIFYHMIQRRGFQSNSRSAGKEEGKIYEGDDKEGKIGIIKTQEKISNNTLGTYLYSLYPAENYPFKNRNERIRNRYTTRKMYIDEFETIWERQKQYHPELTTELKTLIGGRKKDGYPEDGVLFHQRPLRSQKYLIGKCTFEHKKTKCPKSAIPFELFRIHQWVNTIEYNDKKLSKEEREKVVNLLLRSEKIEFKKIRKAINKLDSYYQFNYKDDDKIMGAHTISHLSSKKFFGEQWFAFPEKQQEEIWHVLFFFEDKDKLKQYAMSKWGFNEEQAEQISKFNLADGYANLSRKAINNILPFLKKGYTYDIAVALGGIKNAFNKKWNTLDDDHIRLIEDNVVSIVRGRWKGGFIEKLREFLKDEFELQEEELKKLYHHSSNIEVKTILEKLPTGKEADKEIQNIRNPVVIAALFELRKLINEIIDLYGKPDEIKIELARDLKISKTKRGEIRREQKRLEVENDRIKKELTNLGKEFTHDNILKYKLWEECNGTCPYTGRKIGLSQLFNGDVQIEHIHPWSRSLNDSFMNKTLCFADENRAKGDKTPYEYYFNEYGEEKWNLVKAQALSCFKNKPNYPNAYNKFKQFVKQTFDDDFISRQLNDTRYISREARTYLSKICDKVMVAPGQMTANLRQKWGLNSILSDEDKKTRGDHRHHAIDALVMACSTVSHLQELSRWNRYRRSSELKDFPMPWQTFLEEARYSVFNILVSHRKADIY

SEQ ID NO: 6974 - protein, 1122 aa, synthetic construct
  REGION 1..1122: note = Synthetic
MAKILGLDLGTNSIGWALIDDVQNKILGIGSRIFPMGVENLGDGDGEISKNASRTGARGVRRQFFRRKLRKKVLLKALAENKMCPMVTQDFEDWKKTKEFPLEKLANWFALNPYELRQKALNEKLSLEEIGRIFYHLIQRRGFLSNSRKGGSDDGAIFKGNPKEGKIGITETQESIQDTTLGSYLFEIYPKENQPFQDGLERIRNRYTTRKMYVDEFELIWNKQSQFHSQLTNELKTLFGGRKLDGYKEDGILFHQRPLRSQKHLVGNCSFEPSKTKCPISAIPFEQFRVWQWVNTVEYNGKKISQDEKEKIVEFLYANEKPEFKKIRKAIGKESAEFKFNYKDDDKIVGTHTISNLSNKKYFGKKWFEFSEKGQEDIWHVLYFFDSKSNLKEYAIKNWNFTEEQAESIAKFNVKDGYSSLSRKAISNILPFLKLGFTYDVAVVLGGIKNVFGSDWEKLSEEKRNYLIDNVEGIVRSKTKGGFIDIIKDILRNDYAISDNQLRKLYHHSATIDVAELLEKLPVGKEADKEIQATRNPIVITALFELRKLVNELIDEHGKIDEIKVEMARDLKISKSQRNKIRREQKRLEKENDRVKARLLEEGQRITHDNILLYKLWEECKRTCPYTGKPISVTQLFLGEVQIEHIHPWSRSLNDSFSNKTLCYADENRKKGDKTPFEFYGNDEANWSAIKERALKLFSDTKEYPNAYQKFKRFVQIKFDDDFSSRQLNDTRYISKEAKNYLSRICKNVIVSPGQATSNLRQKWAMNNILNDENEKTREDHRHHAIDALVMACTKVSYVQELSKWNRYNRNSELKNFPLPWETFRKDAEVAVDKILISHKKVSNDITVRTHKCEKNGKTHVNVGVAARGQLHKETVYGKRTFNGEEAFHVRKSIDSLTTEKQLDKVVDGFIKLLIRKRIQELGGFVKGNIPANTFFVVDENGIKRPQIFLPNKNGAPVPVLKVRMKENIGGAEKLKNKVNQWVNPRNNHHVLIYKDQKGNLKEEVVTFWTVVERKRTGQSAYQLPLDGNEILTTLHINDMFLLGLNEDEINWEKPDYEVLKEHLYRVQKLTSGDYFFRKHKSSTVTDDDFKQVRGFGDGKTGWFTHNPIKVKISVSGKIEKV

SEQ ID NO: 6975 - protein, 1123 aa, synthetic construct
  REGION 1..1123: note = Synthetic
MAKILGLDLGTNSIGWAVVDDKNNKISGMGSRIFPMGVENLGDGDNEVSKNASRTGARGVRRQFFRRRLRKKILLKALSENKMCPLKEDDFKDWKNTKMFPSIKLKEWFALNPYELRNKALTEKLNLEEIGRIFYHLIQRRGFLSNSRKGGSDDGAIFKGNAKEGKIGITETQDKIQNKTLGSYLYEIYPKENQPFKDGLERIRNRYTTRKMYVDEFELIWDKQKDFQPTFTDELKQLFGGRKLDGYKEDGILFHQRPLRSQKHLVGNCTFEPTKTKCPISAIPFEQYRVYQWVNTVECNGKKITQEEREKIANFLFENDKPDFKRIRKVIGKESAEFKFNYKNDDKIVGAYTISNLCNKKFFGKKWFDFTDKEQEDIWHVLYFFDSKSNLKEYAIKNWGFDEKSAIAISKFNVKDGYSSLSRKAINNILPFLKQGFVYDVAVVLGGIKNVFGNKWELLSEEKRNFIVDNVEDIVRSKIAGGFIETIKDLLKKEYGLSDKELEKLYHHSATIEANEVLEKLPVGKEADKQIQAIRNPIVTTALFELRKLVNELLDEHQKFDEIKVEMARDLKISKSQRNKIRRDQKRLERENDRIKAEVLKYTNLSHDNILKYKLWEECKQTCPYTGKPININDLFSGEVQIEHIHPWSRSLNDSFANKTLCWADENRRKGDKTPFEFYGNDDVNWSIIKERALKLFSDTKEYPNAYQKFKRFIQQKFDDDFSSRQLNDTRYISKEAKNYLAQICKKITVAPGQMTSNLRHKWGLNNILNEENQKTREDHRHHAIDALVMALSKVSYLQELSRWNRHNRTHELKNFPMPWETFQQDAAKATEQILVSHKRLKSILTIRTHKAKKNGKSFKNIGVAARGQLHKETVFGKRTAPFSEEAFHVRKPIESLTTEKQVEKVVDETIRKLIFKRVNELGGYDKGKIPANTFFVADENGINQPQIFLPNKNGNPVPILKVRMKENIGGAEQLKNDVNQWVNPRNNHHVLIFKDENDNLKEEVVTFWTVVERKRKGFPVYQLPIRGKEIVTTLHINDMFLLGLKEEDINWETPNYELMKEYLYRVQKFTSGDYYFRVVKTSSINNPEEKQQINSFGLGKNGWETHNPIKVKISVSGKLIKA

SEQ ID NO: 6976 - protein, 1128 aa, synthetic construct
  REGION 1..1128: note = Synthetic
MAKVLGLDLGTNSIGWAIIDDSQNKILGIGSRIFPMGVDNLGDGDNEMSKNASRTGARGVRRQFFRRRLRKKKLLKALSNYNMCPLHDQDFETWKKTKQFPSKKLAPWFALNPYDLRQKALHEKLSLEEIGRIFYHLIQRRGFLSNSRKGGADDGAIFKGNAKEGKTGITETAARIKEKTLGSYFFEIYPKENQPFQSGLERIRNRYTTRKMYVDEFELIWARQAPHHDILNDELKTLFGGRKLDGYKEDGILFHQRPLRSQKHLVGYCPFEPTKTKCPLSAIVFEQFRVWQWVNTVECNGTKINQEEKQKIAHFLFSIEKPTFKRIRKVIGKENAAYKFNYKDDDKIVGTHTISNLSHKKYFGKKWFDLTQKEQDDIWHVLYFFDSKSNLKAYAIKNWDFNEVQAEAISKFNVKDGYASLSRKAISNILPFLQQGYAYDVAVAMGGIKNTFGSKWQNDSLENNKKQLELIDNVEDIVHSKIEGGYIDVIKKQLKKDFGFSDKQLKKLYHHSATISKQQLLKKLPLGKEADKEIQSIKNPIVITALFELRKLVNELIGDYGAIDEIKVEMARDLKSSKSKRNQIRRNQKRLERENDRIKSEVEKYARITHENLLKFKLWEECKKTCPYTGKAISVIDLFSGEVQIEHIHPWSRSLNDSFINKTLCWADENRRKGDKTPFEFYGGDESNWAAIKERALKLFSDTKEYPNAYQKFKRFVQRNFDDDFTSRQLNDTRYISKEAKNYLSKICNKVTVSPGQLTAKLRQKWGLNHVLNTENSKSREDHRHHAIDALVMACTKASYVQELSKWNRYNRKPELKDFPMPWGTFRYDAEKVVDNILVSHKCVKNDITVRTHITEKNGKRYKNKGVAARGQLHKETVFGKRNAPFSDEAFHVRKPIDSLTSAKHIDKVVDKTIRLLILKRIQQLGGFEKGKIPVSTFFIVDKHGVKQPQIFLPNRNGDPVPVLKIRMKENFSGAEQLKNHVNKWVNPRNNHHVLIYKDEDGNLKEDVVTFWTVVERKKQGASIYQLPFGGKEIVTTLHINDMFLLGLDEDEIDWDNPNHKVLREHLYRVQKLSSKFYEFRLNSEATIQENYSPYYIRIQSHGEGKTGWLTFNPIKVKVLVSGKIRKI

SEQ ID NO: 6977 - protein, 1126 aa, synthetic construct
  REGION 1..1126: note = Synthetic
MSKILGLDLGTNSIGWAVVDDSHQKILGMGSRIFPMGVDNLGDGEGREMSKNASRTGARGVRRQFFRKRLRKKVLLKALSENKMCPLDSKDFEDWKRTKEFPSIKLATWFALNPYELRQKALNKKITLEELGRIFYHLIQRRGFLSNSRKGGKDDGAIFKGNVKEGKIGITETQEKIQEKTLGSYLYEIYPKENHPFQEGLERIRNRYTTRKMYVDEFELIWNKQAQFYLGLTNELKILFGGRKLDGYKEDGILFHQRPLRSQKHLVGNCSFEPTKTKCPISAIPFEQFRVWQWVNTVEYNGNKISQDEKEKIIDFLYANEKPDFKRIRKVIGKENAQFKFNYKDDDKIVGTHTISNLSNKKYFGKKWFEFSEKEQEDIWHVLYFFDSKSNLKDYAIKKWNFTEEQAEAISKFNVKDGYSNLSRKAISNILPFLQLGFTYDVAVVLGGIKNVFGTDWEKLSDEKRNYLIDNVEDIVRSKTKGGFIDIIKNILRKDYNISDKQLKKLYHHSAKIDVKELLEKLPLGKEADKEIQAIRNPIVITALFELRKLVNELIDEHGNFNEIKVEMARDLKISKSQRNKIRRDQKRLERENDRIKDRLNEEGIRITHDTILLYKLWEECKKTCPYTGKPISVAQLFSGEVQIEHIHPWSRSLNDSFSNKTLCWADENRKKGDKTPYEYYGDDEANWSAIKERALKLFSDTKEYPNSYNKFKRFVQQKFDDDFSSRQLNDTRYISKEAKNYLSRICENVTVSPGQATSNLRQKWGLNHILNYENAKTREDHRHHAIDALVMACTKGSYVQELSKWNRYNRKPELKYFPMPWETFNYDAEKAVENILVSHKKVSNDITVRTHITEKNGKKHKNIGVAARGQLHKETVFGKRTFKGEEAFHVRKPIESLETAKQIDKVVDETIRMLILKRVNELGGFVKDRVPANTFFIIEENGIKKPQIFLPNKKGEPVPILKVRVKENIGGAEKLKENINQWVNPRNNHHVLIYKDEKGNLKEDVVTFWTVVERKRIGDSVYKLPTDGKEIITTLHINDMFLLGLNDEEINWENQDYEMIKDHLYRVQKLSSKFYEFRLNTEASIQNNFQPFYIRIQSFGDGKTGWKTFNPIKVKISVTGKIEKL

SEQ ID NO: 6978 - protein, 1126 aa, synthetic construct
  REGION 1..1126: note = Synthetic
MARILGLDLGTNSIGWAIVDDMDNKILGMGSRIFPMGVENLGEGEGREISKNAGRTGARGVRRQFFRRRLRKKILLKALSENKMCPMIASDFEDWKKTKQFPTEKLANWFALNPYELRQKALNRKLSFEEIGRIFYHLIQRRGFLSNNRKGETDDGAIFKGNEKEGKIGITKTQESIQDKTLGSYLFEIYPKEYQPFQNSLERIRNRYTTRKMYIDEFELIWNKQSEFHSNLNEDLKTLFGGRKLDGYREDGILFHQRPLRSQKHLVGNCSFEPTKTKCPKSAIPFEKFRVWQWVNTVEYNGNKISLEEKEKIITFLYTNEKPNFKKIRKVIGKESAEYKFNYKNDDKIVGTHTISNLSNKKYFGNKWFDFSEKEQEDIWHTLYFFDSKSNLKEYAVKNWNFTEAKAEAISKFNVKDGYSSLSRKAIHNILPFLQLGFTYDVAVVLGGIKNTFGTDWEQLSNKKRNFLINNVEDIVRFKSIGGFIGVIKDILRKEYNLSDSQLRKLYHHSADITIKELLEKLPVGKDADKEIQSIKNPIVITALFELRKLVNELIDEHGKIDVIKVEMARDLKISKSQRNKIRSEQKRLERENDRVKDRLNEVGIRITHDNLLLYKLWEECKKTCPYTGEPISITKLFSGEVQIEHIHPWSRSLNDSFSNKTLCYADENRKKGNKTPYEYYGNDNANWSAIKERALKLFSDTKEYPNAYQKFKRFVQQKFDDDFSTRQLNDTRYISKEAKNYLSKICKNVIVSPGQATSNLRQKWGLNSVLNIENTKIREDHRHHAVDALVMACTKVSFVQELSKWNRYNRNSELKNFPMPWETFRYDAEKAVDKVLVSHKKVSNDITIRIHITEKNGKKYDNTGVAARGQLHKETVFGKRNFNGEEAFHVRKPIDGLTTVKQIEKVVDETTRLLILKRINELGGFIKDKVPANTFFVVDENGVKQPQIFLPNKNGEAVPIFKVRVKENIGGAEKLKENVNQWVNPRNNHHVLIYKDEQGNLKEEVVTFWTVVERKRTGDSAHKLPIDGKEIVTTLHINDMFLLGLKEEEINWENPDYEVLKEHLYRIQKLSSKFYEFRLNTEASIQNNFQPFYVRIHSFGEGKTGWLTFNPIKVKISVSGKIQKV

SEQ ID NO: 6979 - protein, 1137 aa, synthetic construct
  REGION 1..1137: note = Synthetic
MAKILGLDLGTNSIGWALIDDVQNKILGIGSRIFPMGVENLGDDDGEISKNASRTGARGTRRQFFRRRLRKKILLKALSEHKMCPLNNSDFEEWKKTKQFPTEKLAHWFALNPYELRNKALNEKLSLEEIGRIFYHLIQRRGFLSNSRKGGSDDGAIFKGNAKEGKIGITETQESIQDKTLGSYLFEIYPKENQPFQSGLERIRNRYTTRKMYVDEFELIWNKQAQFHSELNEELKTLFGGRKLDGYKEDGILFHQRPLRSQKHLVGFCSFESKLKDEKGKYIRKGLTKCPISAIPFEQFRVWQWVNTVEYNGNKISQEEKEKIVEFLYANEKPEFKKIRKVIGKESAEFKFNYKDDDKIAGTHTISNLSNKKYFGKKWFEFSEKEQEDIWHVLYFFDSKSNLKEYAIKNWNFDEDQAEAISKFNVKDGYSSLSRKAISNILPFLKLGFTYDVAVVLGGIKNVFGADWEKLSDEKRNFLIDNVEGIVRSKTKRGFIDIIKDILRNDYAVSDNQLRKLYHHSADIEVKELLKKLPIGKEADAAIQSIRNPIVITALFELRKLVNELIDEHGKIDEIKVEMARDLKISKSQRNKIRREQKRLERENDRVKDRLVENNVRITHDNILLYKLWEECKKTCPYTGKPISVTQLFSGEVQIEHIHPWSRSLNDSFSNKTLCYADENRKKGDKTPFEFYGNDEANWSAIKERALKLFSDTKEYPNAYQKFKRFVQQKFDDDFSSRQLNDTRYISKEAKDYLSKICKNIVVSPGQATSNLRQKWGLNHILNTDSDAKSREDHRHHAIDALVMACTKVSYVQELAKWNRYNRSYDVKQFPLPWETFRFDAEKAVEKILVSHKRVSNDITIRTHITEKNGKKYKNVGVAARGQLHKETVFGKRKAPFGEEAFHVRKPIDSLVTAKQIDKVVDETIKLLILKRINELGGFVKDKVPADTFFVVDESGIKQPQIFLPNKNGESVPILKIRMKENFGGAEKLKSEVNQWVNPRNNHHVLIYKDEKGNLKEEVVTFWTVVERKRTGQPAYQLPAGGKEIVTTLHINDMFLLGLNEDEINWENPDYELLKEHLYRVQKFTSGDYYYRIALTSSIQNAEEKQQINSFGFGKNGWSTHNPIKVKISVSGKIVRI

SEQ ID NO: 6980 - protein, 1130 aa, synthetic construct
  REGION 1..1130: note = Synthetic
MNKILGLDLGTNSIGWALIENNIILGMGSRVFPEGVVNLGEGEGRETSKNASRTEARGVRRQIFRRRLRKRYLLKELAKHNLCPISPTLIKDWNGTDIFKNELIIQWFQLNPYELRAKAIQEEITLIELGRIFYHMIQRRGFLSNSRSAGADVKETSTIFKGDAKIGKIGISDTLKSIEQNKTLGSFLHSIQPKENEPFSGELERIRNRYTTRQMYIDEFETIWEFQKQYHSELNSNLKTILGGRKKDNYKEDGVLFHQRPLRSQKHLVGFCSFEPKKTKCKLSAIPFELFRIYQWVNTLSYDVNGVRQKITQEERKKIIDLLLSKEKPSFKEIRKAIGKLDGSYQFNYKDDDKIVGSHTISNLSNKKFFGNKWFDFSEKEQENIWHILSFFDDREKLKEYAIKNWSFDEERAVKISKFNLKDGYSNLSRKAILNILPFLQKGFMYDVAVGLAGVKNTLSVNWEEHEQFVLDNVPEIVRSNLKGGYIEPLKNMLKNEFNCNDKQLEKLYHHSSAIETENILDRLPVNLHADREIQKIKNPVVITALFEIRKLVNEVIDTYGKPNEIKVELARDLKASKSNRLEARKRQKDLEKQNDRVKLELENLNQRSNHINILKYKLWEECNHTCPFTGQIITISQLFTGEVQIEHIFPWSRSLNDSFNNKTLCFADENRAKGNKTPYELYSEQGDQKWEAIKLQALSCFKTKANYPNCYNKFKHFVKKKHDEDFISRQLNDTRYISKEAKNYLSKICSNVLVAPGQMTATLRHHWGLNSILNLEDDTKTRDDHRHHAIDALVMACSTRSHLQELSKRNRYNKNYDLKDFPDPWQNFRQDAENAVAQILVSHKKSKSLLTVRTHKTIKKGVEHKNIGVAARGQLHKESVYGLRKAPNSNKAFHIRKPLESLTTEKQLEKIVDDSIRLLILKRINIIGGFIKGKIPKETFFVVDENGIKQPQIFLPNRNGNPVPIKKVRIRENIGGAEKLKENTNQYVNPRSNHHVIVYEDSNGGLKDDVVTFWTAVERKRQGQDVFKLPNDGEKIVSTLQINDMFLLGLNDDDIITLTSKELKKHLFKVQTLSSSFYEFRLSTDSTQNKNTNSTVFRRIQSFGMGKTGWKAFNPIKVKLNSIGEVKII

SEQ ID NO: 6981 - protein, 1126 aa, synthetic construct
  REGION 1..1126: note = Synthetic
MTKILGLDLGTNSIGWAIVDDTQNKILGIGSRIFPMGVENLGDGEGREISKNASRTGARGVRRQLFRRRLRKKILLKALSNAKMCPLQPEDFEEWKNTDQFPESKLKSWFAINPYELRNKSLNEEISLEEIGRIFYHLIQRRGFLSNSRSAGKDDGAIYKGKPKEGKIGIDETRESIKGKTLGSYLFEIYPKENEPFSNDTERIRNRYTTRQMYVDEFELIWEKQVQYHSELSPELKTIFGGRKSDGYNEDGIIFHQRPLRSQKHLVGNCSFEPTKTKCPISAIPFELFRIYQWVNTVEYNGNKLNEIERIKMIDVLLQREKPSFKDLRKAIGKISAEFKFNYKDDDKILGTYTISNLSSKKFFGNKWFDFTEKEKEDIWHVLYFFDSKDKVKEYAINNWSFNEEQAIAISKFNLKDGYSNLSRKAINNIFPFLKTGFVYDIAVVLGGVKNIFGEDWEQLEKNNKDFIIDNIPAIVRTKITGGFIETIKEVLKKEYNFTDTQLKKLYHHSATIETKTILKSLPVDNNADKSIQSIKNPIVITALFEVRKLVNELIEQYGKLDEIKVEMARDLKASKSQRNNVRNEQKRLERENDRVKARIEEEGQRVTHESLLKYKLWEECKKTCPYTGAAIPLHKLFTGEIQIEHIHPWSRSLNDSFANKTLCYADENRLKGDKTPFEFYGNDEANWSAIKERALKLFSDTKEYPKSYQKFKRFVQQKFDDDFSSRQLNDTRFISKEAKNYLSQICEKVTVAPGQMTANLRQKWGLNFILNEDDGEKTREDHRHHAVDALVMACSKTSYLQELSKWNRYNRNYELKNFPMPWEGFNSDAENMIHKILVSHKKVSNTITLRNHTTKKNGEIYKNIGVAARGQLHKEFVYGQRIAPFGAEAFHIRKPIDTLVTEKQVNKVVDEAIKNLILKQVNALGGYVKGNVPDNVFFVADENGIKQPQIFLPNKNGKPVPVLKVRIKENIGGAEQLKDNTNQWVNPRNNHHVLIYKDIKDDLNEEVVTFWTAVERKRQKQEVYQLPINGKEIVTALHINDMFLLGLNDDEIDWENLNYSVLKEHLYRVQKFTSGDYYFRINKTSSIKNSSEKQQINSFGLGKNGWLTHNPIKVKISVSGKIKKV

SEQ ID NO: 6982 - protein, 1123 aa, synthetic construct
  REGION 1..1123: note = Synthetic
MARILGLDLGTNSIGWALIDDAQNKILGIGSRIFPMGVENLGEGEGREMSKNAGRTGARGVRRQFFRRRLRKKILLKALSENKMCPMVVADFEDWKKTKEFPSDKLANWFALNPYELRQKALNEKLSLEEIGRIFYHLIQRRGFLSNSRKGGTDDGAIFKGNPKEGKIGITETQESIQGKTLGSYLFEIYPKENQPFQDGLERIRNRYTTRKMYVDEFELIWNKQSQFHSQLTNELKTLFGGRKLDGYKEDGILFHQRPLRSQKHLVGNCSFEPNKTKCPISAIPFEQFRVWQWVNTVEYNGKKISQEEKEKIVEFLYANEKPDFKKIRKAIGKESAEFKFNYKDDDKIVGTHTISNLSNKKYFGKKWFEFSEKEQEDIWHVLYFFDSKSNLKEYAIKNWNFTEEQAESIAKFNLKDGYSSLSRKAISNILPFLKLGFTYDVAVVLGGIKNVFGSDWEKLSDEKRNFFYDNVYEIIRSKNKGGFIDIIKDILRNDYNISDHQLRKLYHHSAAIEVSELLEKLPLGSEADKEIQQIKNPIVITALFELRKLVNELIDEHGKIDEIKVEMARDLKVSKSERYKTRRNQQRLERENDRVKAEVLKYTNLSHDNILKFKLWEECKRTCPYTGLSIPINELFTNKWQIEHIHPWSKSLNDSFSNKTLCLGTENIKKGNKTPFEFYGSDEANWSAIKERALKLFSDTKEYPNAYQKFKRFVQQKFDDDFSSRQLNDTRYISKEAKNYLSKVCKNVMVSPGQATSNLRQKWGLNHILNDENAKIREDHRHHAIDALVMAYTKLSYVQELSKWNRYNRTYDLKQFPLPWETFNYDAEKAVEKILISHKKVSNDITIRYKTVEKNGKKHTNKGVAARGQLHKETVFGKRTFNGEEAFHVRKPIESLETAKQIDKVVDETTRLLILKRVNELGGFVKDKVPANTFFVADENGVKQPQIFLPNKNRAPVPILKVRIKENIGGAEKLKDKLNQWVNPRNNHHVLIYKDEKGNLKEEVVAFWTVVERKRTGQSAYQLPIDGKEIVTTLHINDMFLLGLNEDEINWENPDYEILKEHLYRVQKFTSGDYYLRKALTSSIQNPEEKQQINSFGFGKNGWSTHNPIKVKITVSGKIQKL

SEQ ID NO: 6983 - protein, 1150 aa, synthetic construct
  REGION 1..1150: note = Synthetic
MAKILGLDLGTNSIGWALIDDKLNKILGIGSRIFPMGVENLGDGDGEISKNASRTGARGVRRQFFRRRLRKKLLLKALSENNMCPIDSNDFEDWKKTKLFPSEKLATWFALNPYELRQKALHEKLSLEEIGRIFYHLIQRRGFLSNSRKGGTDDGAIFKGNVKEGKIGIDDTLESIEGKTLGSYLYEIYPKDNQPFQDGLERIRNRYTTRKMYVDEFELIWNKQSQFHSVLNDDLKELFGGRKQDGYKEDGILFHQRPLRSQKHLVGNCSFEPSKTKCPISAIPVELFRIYQWVNTVEYNGKKITQDEKSKLIEQLLSHDKIEFKKLIKAIGKESAEFKFNYKDDDKIVGTHTISNLSNKKFFGKQWFDFSEKEQEDIWHVLYFFDSKSNVKEYALSKWNFNEEKAEAISKFNVKDGYASLSRKAIGNILPFLQQGYTYDVAVVMAGIKNVFGDKWQNDTAENNQKQLDVIDNVYDIVRSKISGGFIDTIKDLLIKEFGLNDKQLKKLYHHSTTIDVKELLDKLPVGKKADKEIQAIRNPIVITALFELRKLVNELIEEHGQLDEIKVEMARDLKISKSQRNKIRRDQKRLERENDRVKAEVEKYTRVTNDNILKFKLWEECKQTCPYTGVAIPVNKLFTGEIQIEHIHPWSRSLNDSFNNKTLCWADENRRKGDKTPFEFYGSDESNWSAIKERALKLFSDTREYPNAYQKFKRFVQIKFDDDFSSRQLNDTRYISKEAKEYLLKICNKVAVSPGQMTANLRQKWGLNTVLNDENAKTREDHRHHAIDALVMACGKTSYLQELSKWNRYNRNYDLKDFPMPWETFRYDAEKAVDKILISHKRISNTITVRTHTTEKNGVKYKNVGVAARGQLHKEFVYGKRTAPFSDDAFHIRKSIDSLTTLKQVDKVVDEATKKLINKRIQIRLHELNDEIFLSTNVKKDKEIEKEIENYEKKGILPSKVFFIVDENGIKQPQIFLPNKNGAPVPILKVRMKENFSGAEKLKENVNQWVNPRNNHHVLIYKDDKGNLKEEVVTFWTVVERKRTGDSVYNLPFDGKEIVTTLHINDMFLLGLKEEEINWDNLDYDVLNENLYRVQKLTSGDYFFRKHKSSTVTDDDYKQIRGFGEGKTGWFTFNPIKVKISVSGKIQKV

SEQ ID NO: 6984 - protein, 1129 aa, synthetic construct
  REGION 1..1129: note = Synthetic
MSKILGLDLGTNSIGWAYIDELNNKILGTGVRIFPMGVENLGQGDKEMSKNASRTSARGTRRQFFRRSMRKKLLLKALAEQKMCPLNPSDIKVWNFKEFEKDEIFSSWIRQNPYELRHKAISEKVTLLELGRIFYHLIQRRGFQSNSRSASKDAGKIFEGIPKDGKIGILETAEKIQNTTLGSYLNSLYPAESQSYTHIDERIRNRYTSRNMYETEFEEIWNNQVKYHSELTSKLKTIIGGRKKDGYSEDGILFFQRPLRSQKFLVGKCAFEPKKTKCPKSAIPFEYFRIYQWVNTVECNGSKLNAEDRNKLVKILLKKENPAFKELRKELKLTDSIYQFNYKDDDKISGSHTIRSLSSKKFFGEEWFDFSEKYQEEIWHDLIFYKDKDKLKQRAIEKWGFNEEKATAISKFNLVDGYANLSRKAINNILPFLKMGFTYNIAVALGGIKNAFGDSWETLDSEDKTLITDNIFDVLKTEKEGGYIQRLRNFLVQEFNLTETQLEKLYHHSANISAKELLDKLPVGKDADAEIRSIRNPIVIQALFELRKVSNDLIDRFGKPDKIHIELARDLKASKKKRHKIKQEQDRLKKENDRVKKELERLGRHISNDNILKYKLWEECNNICPYTGRKISVVQLFSGEVQIEHIMPWSRSLNDSFMNKTLCFADENRAKGNRTPYEFYFKEQGEAKWEQVKEQALTCFKTKINYPNAYAKFKQFIKKELDDDFVTRQLNDTRFISREAKAYLSKICDKIIVAPGQMTSNLRHKWGLNSILNDDDNKTRDDHRHHAVDALVMACSKVSYLQELSRWNRYERSYDLENFPMPWDSFRKDAEKSILSILVSHRKSNRVLNSRKYKVKKKGEVYVNTGVAARGQLHKEYVYGKRQSPNSEQGFHKRSPIESLKTEKQVNKVVDPFIRDLIHARVATLGGYVNGNIPEGTFFTSDENGNKIPMIYLPNKNGDKVPVKKIRIREVIGGAERLKEENQYVNPRNNHHVLIYEDMQGNLKEDVVTFWTVVERVKQKQPLFQLPFDGKRIIETLEINDMFLLGLHREEIDWENPDYTKLSNHLFRVQKFTSGDYYFRKHIESSLDGELGHAFQYIKGFGTGKTGWLTFNPIKIKLTESGKLSEISN

SEQ ID NO: 6985 - protein, 1125 aa, synthetic construct
  REGION 1..1125: note = Synthetic
MAKILGLDLGTNSIGWALIEDNQNKILGLGTRIFPMGVENLGDGEGEISKNASRTGARGVRRQFFRRRLRKQILLKALSENKMCPLEASDFQEWKRNKRFPIEKLATWFALNPYELRQKALIEKLSLEEIGRIFYHLIQRRGFLSNSRKGGSDDGTIFKGNPKEGKIGITETQKNIEDKTLGAYLFEIYPKENQPFQDGLERIRNRYTTRKMYVDEFELIWNKQAQFHAELTNELKTLFGGRKLDGYKEDGILFHQRPLRSQKHLVGNCSFEPRKTKCPISAIPFEQFRVWQWVNTVEYNGKKISQEEKEKIVEFLFANEKPEFKKIRKVIGKESAEFKFNYKDDDKIVGTHTISNLSNKKYFGKKWFEFTEKEQEDIWHVLYFFDSKSNLKEYAIKNWNFTEEQAESISKFNVKDGYASLSRKAISNILPFLKLGFTYDVAVVLGGIKNVFGSDWEKLSDEKRNFFYDNVYEIVRSKNKGGFIEIIKDILRNDYNISDNQLRKLYHHSATIDATELLEKLPVGKDADKDIQAIRNPIVITALFELRKLVNELIDEHGKIDEIKVEMARDLKISKSQRNKIRKEQKRLERENDRVKARLLEERQRVTHDNILLYKLWEECKHTCPYTGKPISVTQLFSGEVQIEHIHPWSRSLNDSFSNKTLCYADENRKKGNKTPFEFYGSDEANWSAIKERALKLFSDTKEYPNAYQKFKRFVQQKFDDDFSTRQLNDTRYISKEAKNYLSKICNKVTVSPGQATSNLRHKWGLNQILNDDNEKTREDHRHHAIDALVMACTKVSYVQELSKWNRYNRGYDVKDFPMPWLSFWKDAEKAVNQILVSHKKVSNDITVRTHTTEKNGKKHTNLGVAARGQLHKETVYGKRTFNGEEAFHVRKPIESLETAKQIAKVVDESIRLLILKRVNELGGFVKDKVPANTFFIVDENGVKQPQIFLPNQNGAPVPILKVRVKENIGGAVKLKTNVNQWVNPRNNHHVLIYKDEKGNLKEEVVTFWTVVERKRTGQSVYQLPIDGKEIVTTLHINDMFLLGLSEDEINWENPDYKVLKEHLYRVQKLSSKFYEFRLVSEASIQNNFQPFYVRIQSFGDGKTGWDTFNPIKVKISVSGKITKI

SEQ ID NO: 6986 - protein, 1133 aa, synthetic construct
  REGION 1..1133: note = Synthetic
MNKILGLDLGTNSIGWALIDTENDSILGMGSRIFPEGVVNLGEGEGRETSKNASRTEARGVRRQIFRRRLRKRYLLKELAKHNLCPISPTLVKDWNGTDIFNNEIIKEWFQLNPYELRAKAIHEKITLIELGRIFYHMIQRRGFLSNSRSAGADVKETSTIFKGDSKIGKIGISDTLKSIEQNKTLGSFLHSIQPKESEPFSGELERIRNRYTTRQMYIDEFETIWEFQKQFHSELNSILKTILGGRKKDGYKEDGVLFHQRPLRSQKHLVGYCSFEPKKTKCKISAIPFELFRIYQWINTLSYDVNGVRQKITLEERQKIINLLLSKEKPSFKEIRKKIGKLDGSYQFNYKDNDKIVGSHTISNLSNKKFFGHKWFEFSEKEQENIWHVLSFFDDREKLKEYAIKHWSFDEERAIRISKFNLKDGYSNLSRKAILNILPFLQKGFMYDVAVGLAGVKNALSINWEQHKQFVLDNVPDIVRSNLKGGYIEPLKSMMKNEFNCTDKQLEKLYHHSSAIETEKILERLPVNLHADREIQKIKNPVVISALFEIRKLVNELIDTYGKPNQIKVELARDLKASKSNRLETRKKQKELEKQNDRVKVELENLNQRINHINILKYKLWEECNHTCPFTGKVITISQLFTGEVQIEHIFPWSRSLNDSFNNKTLCFADENRAKGNKTPYEFYSEQGGQKWEAIKIQALSCFKTKANYPNCYNKFKHFVKKKHDEDFISRQLNDTRYISKEAKNYLSKICSNVLVAPGQMTATLRHHWGLNSILNKEDETKTRDDHRHHAIDALVMACSTRSHLQELSKRNRYNKNHDLKDFPDPWLNFRQDAENAVAQILVSHKNHKSLLTVRTHSTKKKGVVHKNIGVAARGQLHKESVYGLRKAPNSKEAFHIRKPLESLTTEKHLEKIVDDSVKQLIYKRILNIGGFIKGKIPKETFFVVDENGIKQPQIFLPNRNGLPVPIKKVRIKENIGGAEKLKENINQYVNPRSNHHVLIYKDIEGNLKEDVVTFWTAIERKRQGIDVIQLPKDGEEIVTTLQINDMFLLGLSENEINLNSSNYQLLNQYLYRVQKLSSKYYEFRLISESKIDKKSIPQYRRITGYGEGIGGWLTHKPIKIKVNSIGKIKRL

SEQ ID NO: 6987 - protein, 1122 aa, synthetic construct
  REGION 1..1122: note = Synthetic
MAKILGLDLGTNSIGWALIDDKQNKILGVGSRIFPMGVDNLGDGEGEISKNASRTGARGVRRQFFRRRLRKKVLLKALSENKMCPMVAQDFEDWKKTKEFPSDKLAVWFALNPYELRHKALSEKLSLEEIGRVLYHLIQRRGFLSNSRKGGSDDGAIFKGNPKEGKIGIDDTLESIEGKTLGSYLYSIYPKDNQPFQDGLERIRNRYTVRKMYVDEFELIWNKQAQYHTLLNEDLKQLFGGRKQDGYKEDGILFHQRPLRSQKHLVGNCSFEPSKTKCPISAIPVELYRIYQWVNTVEYNGKKISKEEKDKIIEQLLLSDKIEFKKLRKAIGKDSAEFKFNYKDDDKIVGTHTISHLSNKKFFGKKWFDFTEKEQEDIWHVLYFFDSKSNLKEYALKHWNFTDEQAEAISKFNVKDGYSSLSRKAIGNILPFLQQGILYDIAVALGGIKNAFGDQWETLSDDKKNFIIDNVPDIVRAKISGGYIDTIKDLLRKEFGFTDKELKKLYHHSASIDVQALLDKLPVGKDADKELQAIRNPIVITALFELRKLVNELIDDHGKIDEVKVEMARDLKISKMQRNKIRKEQKRLERENDRVKDRLKEEGQRISHDNILLYKLWEECKKTCPYTGNPIPLHKLFTGEIQIEHIHPWSRSLNDSFNNKTLCYADENRRKGDKTPFEFYGNDEQNWSSIKERALKLFSDTKEYPNAYQKFKRFVQIKFDDDFSSRQLNDTRYISKEAKEYLSQVCKNVIVSPGQATSNLRQKWGMNNILNDENEKTREDHRHHAVDALVMACTKVSYVQELSKWNRYNRATELKEFPMPWETFRRDAELAVEKILISHKRTTNDITVRTHTTEKNGVKYKNVGVAARGQLHKETVFGKRNFNGEEAYHVRKPIDSLTTEKQLDKVVDETIKTLILKRIQELGGFVKGSIPTNTFFIVNEKGIKQPQIFLPNKNGAPVPILKVRMKENIGGAEQLKDNVNQWVNPRNNHHVLIYKDEKGNLKEEISTFWTVVERKRQGLVVYQLPNDGKEIVTTLHINDMFLLGLNEEEINWDNLDYDLLNEHLYRVQKLTSGDYFFRKHKSSTVTDDDYKQIRGFGEGKTGWFTFNPIKVNISVSGKIQKL

SEQ ID NO: 6988 - protein, 919 aa, synthetic construct
  REGION 1..919: note = Synthetic
MYIDEFEMIWEFQKQFHAVLTNSLKTHLGGRKKDGYKKDGILFHQRPLRSQKHLVGNCTLEPKKTKASISSIPFEYFRIYQWINTLACDFNGNHHPISQKERHQIITLLLSAEKVAFKKIRKAIGKTEKEYQFNYKDDAIIYGTHTISNLSNNKFFGKQWFNFTQEEQENIWHILSFFDDREKLKNYAMTHWQFTEEKAIKISKFNLKEGYANLSRKAINGILPFLKEGFMYDVAVALAGVKNALGNTWQTHQEFVKNNVPEIVRANIKGGYLAPLKKMLAATLACTPTQLKKLYHHSSAIKATTIAPKLPVGDIADKEIQKIKNPIVIKALFEVRKLVNELITTYGKPDEIKIELARDLKTSKKNRYEIRKQQQFLEKENNRIQKELENLAQRATPTNILKYKLWEECNHTCPYTNTKIPIHKLFTGEIQIEHIYPWSRSLNDSFMNKTLCYANENRAKKNKTPYEFYHDEQGEEKWAQVKQQALACFKNKYPNYPNAYNKFKHFVQKKREEDFVSRQLNDTRYISKEAKNYLSKISNNVLVASGQATAALRHHWGLNSILNEVENAKTRHDHRHHAIDALVMACITAGHVQALSQWNRYDRNYELKDFAMPWPSFRVDAAVAITGILVSHKKEKKLLTVRKHTVIKNGQPYTNKGIAARGLLHKESVYGKRKAPGKEEAYHIRKPIESITTEKKLEKVVDPTIKNLIFKRIQKLGGFVKGKIPSETFYKLAENGQRVPQIFLPNKNGAPVPIKKVRIREVIGKAVPLKNTVNQYVNPKNNHHILIYKNAKGIMEEEVVSFWEAVERKKQEIDVFKMPKKGKEKLAILQKNDMFVLGLDIETVEEAWQDNSLLKEHLYKVQKISSKDYSFRKHSDARPDEAAKKEYIRITSLGEGKKGWKTMNPIKVKLNSIGKIVKA

SEQ ID NO: 6989 - protein, 1101 aa, synthetic construct
  REGION 1..1101: note = Synthetic
LCLPCSPCSSPRGAPHRGCVLLACFIVPHFCARSLRGGAVLANRGFARQLHLFQSEVSRQWAICREARINVWCAFILFNRQAYFSNRQTIRGAPMETSRPYLVLGLDPGIASCGFCLLDMTNHKILEMGSHLFDAPQEANKTKTSLAVTRRNARSARRNTLRTAMRMKHCLALLEGAGLIPEGADKTWLQSKKGDKPILKLRANGLDRQLTDREFAQVLYSLCGRRGYIPHGEGRLGETDDGEGKKVLSAIKANEATMKRGNYRTVGEMLYTNDGKSRNRGGDYSLCVYNSQIKDEVRKLFAAQRALGNSKASETFERNYVNCLEWEKKTVDHDTRIYELVGSCSYFPEEKRAADTDVSSELCRAYERLGHLVIVHEDGSEQSLTANQIDGYLNVLFSPSPLKGNKGCKVTYGTIRKDLDLSGKDVFKGVSQDKEKDEPFSPKSWRCLREALCEDHEDLLARMLEDRELGDDICEALTFASTEASLNERLDQLDITEEERTALCSSVPFTSKLFKGYGSRSRKALGILLGAFEEPEIRILTDAEKATGLLDLRLADRGIRAELLPPYNKYDPTCRNPVVLRAMGRMRHIVNAVIRIHGVPDKIHIELGRDLKMSKREKLTVSKNQRANEAANKKWAAKAAGILGCSPEEVPGRIVRKLAMREDQGEKDAYTGATIDLEHLVRDDRYCEIDHILPYSRTCDDSRANKVLVLSKSNQDKRGRTPYEWMTSGEPSAPDWDEYRNRVMATIKYARKRANLLNTDLGPEVQAQFLARNLNDDRYMSVAVKNYLEDCLLFPEDGRKKHVTAVAGGATGNLRWVWGLNFGQGNTKDRDDDRHHAVDAAIIAACSEGTVKKVAEASSKGRETFKQLRKSRLADTQPWPTFAEEVIARRAFVVPVRMANHGVTGRVFKDTLYHLEGFTDDKGKYPLVRAGEKTVKKGNVRISPDGSVKLIDGMAFLRLWLDPDARPNGKVKGKWYAEPVYYADIPAIKAGTHVPRACTIHVARNAWEPVPESAMRQRPVVLFFGDVLIAGGHVGRFTGININSCRLSITSLLTKDEVTDWPSLGSWGQDTQVRVLQEDCLGHCYDGLVINPDDSTFRLRE

SEQ ID NO: 6990 - protein, 1039 aa, synthetic construct
  REGION 1..1039: note = Synthetic
MRIIDYSSRGAAMGQQNQEMANARHYLVLGLDPGIASCGFCLLDMTDHKILEMGSHLFDAPQNPKSKQNLSVERRNARSARRNLKRTRDRQKKCLELLKQCGLSPSDADKQWLQSRKGDKPVIKLRASALDRTLTDRELAQVLYSLTGRRGYIPHGEGHLDDVDDAEAGKVLAAVRENQNQMAKKGYRTVGQMLYKEGRSRNRGGDYTLCVLNSQIIDEAKIILDEQRSHGNAILTKMSNGEFEQFTNSYIDCLTWEKKSTKHDERVYSLVGACTYFPEEKRAAEADLSSELCRAYERFGHLVMVDADGTEHRLSAKDRARYLQILFSPVPIRGNKDCKVTYATIRKDLDLSAHVSFKGIEAERENKEEPFSPRRWRKLRACGVPEGLLARMLEDRDLADSIGEALAYASTEESLRDKLSSLDLSDDEINQLAVNVPFAGKLFSGYGSRSLKALHMLLDMFEDESILTLDDAERESGLQALRLADKGHRSLNLPPYDIYDPTCNNPTVLRALGRMRRIVNAIIRIYGVPDEIHIELGKELKQSSKEKKSIAKSNLQNKKDNERIAKTIAELLGCSPDDVRGKQIRRFALREEQGCKDAYTGDSIDLMRMLTEDRYTEIDHILPYSRTCDDSRANKVLVLQKSNQDKKERTPWEWMSDDASKGAPDWEEFKARTLTNHRLSYKKRDHLLNQNLNGQEQSFIDRNLNDTRYMSVAVKDYLEKSLLFPDDGRKSHVIAVAGGATSALRHVWGLNFGADNTKDRSDDRHHAVDAAVIAACSQATVKKVADTSKLGHSEFKRKRESRLADTQPWPTFADEVIARREFVIPTRMANHGVTGSAFEDTIYRYEGIREGKDSLAVLSKSQGKDKPRAVKPSGNYRLDADGGAHLYDGIAFLRFWLDAEARPKGKVKGKWLIEPVYYADIPLIQCGRYIPKYIPAAHLARDQWVEIPESVLATDPVTVFFGDVLYVDGHIGRYSGFNINGLKLTMHSVISGESIAFPPVSSTWSKDSEVRIIEEDVLGRCWTPNIAKLVRLQEAASSS

SEQ ID NO: 6991 - protein, 1014 aa, synthetic construct
  REGION 1..1014: note = Synthetic
MDTSRPYLVLGLDPGIASCGFCLLDMTNNTILEMGSHLFEAPQNPKTKESHAVTRRNARSARRSTLRTSLRLKHCLKLLTKGGLVPDGADKAWLQSRKGDKPILTLRARGLDMLLSDRELAQVLYSLCSHRGYIPHGEGRTGETDDVEGRKVLNAVKRNSEVMASGRYRTVGEMLHAEGRSRNKGGDYTYCVYNSQIQDEIKALFRTQRRLGNEKASQKLENFYLECLTWEKEALEHDQRVYEMVGKCNYFPKLNRAAEADVSSELCRAYERLGHLVIVDEFGHETTLTKSWVNQYLAILFSPAPLKGNKDCKVRYSNIRKDLDLGGKSMFKGIAREQESKLEPFAPKTWRCLRSHGIPQEFLQRMLDDKELGDQVGEALTFASTEASLRTRLEFLDLTKNELEALCKLPFAGKLFKGYGSRSLKALGMLLDAFKDDSVRTLKDAEEASGLLALRLSDRSVRSRLLPPYAVYDPSCRNPVVLRAMGRMRRIVNALIRLYGVPDEIHIELGRELKQSKHEKKVISKRQKANEAANKKWAGVAAGVLGIEPEAVPKRIVRKLIMREEQSERDLYTGIPIPLETLIRDDRCCEIDHILPYSRTCDDSRNNKVLVFSKSNQDKRERTPYEWMNSGEDGIPSWDEYRNRIIATIKNPRKRANLLNTSLGDQKVQEGFLARNLNDSRYMSRAVKSYLEDSLAFPEDGRVKHVSAVAGGATGNLRWVWGLNFGKDGDKDRADDRHHAVDAAIIAACSDATVKKVAEVRALGRNSFKQMRESRLASTQPWPTFADEVIARRELVIPTRMVSHGVTGRVFEDTLYRLNDYTDDRGRYPIISVDKTINGKRQRKSIKAGNVFFNPDGSVKIIDGMAFLRLWLDPTARPNGKVKGKWYVEPVYYADIPAIKDGTYVPRACTIHVARVNWTPVPATALVSSPIVLFAGNSFIVDNHIGRFWSLDISGCRLDVRDIRDNQAPAPEFPVTPNSWGRETTVRILQEDCLGHCYDRITLRPDSSLFEVRR

SEQ ID NO: 6992 - protein, 1013 aa, synthetic construct
  REGION 1..1013: note = Synthetic
MNQERHKLVLGLDPGIASCGFALLDCDDHKILEMGSHLFDVPQRSKDKVSLAVVRRMARSVRRNTLRTSNRQKHCLELLQGAHLVPHDADKRWFQSRKGDLPLLQLRAEGLDRKLEARELAQILYCLSGRRGYIPHGEVAKRRTGPASQEGIGQDVADVESRKVLGAIANNEKLMHMEGYRTVGEMFFKTNRSRNKKGNYDLCITNAQVQDEVRQLFEAQRSLGNDIATTELEESYLVNLSWEHKDLDYDEKVYQRVGNCTYFSGEPRAARADLSSELCNAYERFGHLVMVHADGSETRLSAAQRRKFLDILFSPVALRGNKTCKVTYAAVRKDLDLSAHDVVFKGVGLEEESKDEVYVPKAWRRLRTLLPESLMGRLLKDRELADDICESLTYASTEESLRRRLTEHYRCDLSDEELDAVMGLPFSSQLFKGYARRSRKALAMLLDAFDSDEEGTVLTLDDAEANSGLRSFRASAERTQRGSFLPPYSRYDPSCNNPVVLRAMGRMRRIVNAIIRRYGVPDEIRIELGRDLKQSKHEKDLIARANRRRKDQNQAWRESIATLKGCGQDEVRGRDLLMMSLFEEQGGKDAYTGAPIDLCRLFDAQEQRYCEIDHALPYSRTCDDSHNNKVLVLSKSNQDKRERTPYEWMTSGEPGAPDWDRYSVLVRLNKRISPRKRRYLLNMNLDEKAQEEFLSRNLNDDRYMSVAVKNFIEDSLVFPEDGLKRHVYAVTGGATAQLRRVWGLNYGPHDKKDRDDDRHHAVDACIIAACSAATIKRVANASKLGRNTLKQVRKERFAQTQPWPGFADEVRVRREFVIPTRMADHGVTGQVFKDTNYRFLGITNDKKQLAMLCGGGKELKKGNVVIGKDGNAHIIEGMAFVRLWLDPAGKKGKGKWYVEPVYYVDIPLMRQGKYVPRFAVLRLARHAWPAAPDHLLKQTPIVMWRNDVLEVDGKLGRFSGMDIMNCSLEFAPLAKGMATNIPTLGRWNKKTKVRVIEEDCLGYCYDARTMGGV

SEQ ID NO: 6993 - protein, 1008 aa, synthetic construct
  REGION 1..1008: note = Synthetic
MTSAIRGEVKLGGAFMQNPYLVLGIDPGIASCGFCLLDTANGRILEMGAHLFDAPQEDKTGVSLATTRRNARSARRNIKRRSDRQKHCLKLLAEFGLVPQDATKKWFQSRKGDAPILSLRAKALDKLITDRELAQILYSLSAHRGYIPHGEGSLTGKGDVDAETGKALRAISANTKELNEGGWRTIGEMLSAQKRSRNKGGAYDLCVLNSQIVDEVHQVMRAQREFGNAHASSELEERYLEVLTWEKPSLGHDERVYNLVGSCSYFPEERRAANATLSSERCRAYERLGHLVIVNPDGSERVLSNYEREELLSILFAAKAIKGNKECKVTYAYIRKMLDLSAKCFFKGVDPDDEKKCEPYAPRAWRNMRSHGIPSALLERMLTNRDFADEIGEALTFASTEESLRMRLESLDLTDEEYESIAALPFNSKVYKGYGSRSLKALNLLLDAFEEEGIQTLTDAERASGLLSLRLAKSEARTTQLPTYDVFDPTCNNPVVLRALSRMRLIVNAIIRIHGVPNEIHVELGRELKQSNKEKAAIQKNNAANERDRRRWAGTLAEIMGISPDEVSNKLIRKCIMREEQGEIDPYTGDALELQRLIDDDRYCEIDHILPYSRTCDDSRRNKVLVLSKSNQDKQERTPYEWMTSGEVNAPSWDDFQKRVLNCKALLRKRNYLLNQSLGTDEEAKFLQRNLNDTRYMSRAVKNWLEKSLALPEGGRVVAVAGGATASLRHVWGLNTAPNNKKDRSDNRHHAIDAAVIAACSQGTLMKVAKARSLGAKTFRRMQESRLSDTQPWTTFASEVLARAEFIIPTRMVDHGLTGRAFEDTAYRYVGESNDANRRGVLYAKGKEIKKGNFHIGADGNARIVDGMAFLRLWLDVEGNAGAGKWYAEPVYYADIPHIMNGDYVPHVAPKAHVGRTLGWIELPESARTTAPIVVFRNDVLEVDGQMVRYTGFHVDGVRIEYEPIGKAAMQMAIPTLGKWNNNTRVRVFQEDCLGHCYQEFGYNKPTA

SEQ ID NO: 6994 - protein, 1001 aa, synthetic construct
  REGION 1..1001: note = Synthetic
MAEPYLVLGLDPGISSCGFALLDMNNHKILEMGSHLFDAPQESDKKVSLAVKRRNARSARRNNLRTKNRQKHCMELLKEADLVPQDATKQWFQSAKGDRPLLELRFAALERPLTNREFAQVLYALSARRGYIPHGEGRISKISDVDTSGTSDAETGKVLKAIGENNKLMAQGHFRTVGEMLYNQGKSRNKRGSYEHCVLNSQIVDEVRAIFQSQRSYQNPIATQELEDAYIENLTWEKRTLDHDAKVYALVGKCVYFSNDENRAARADLSSELCNAYERLKHLRIVNADGDETALAPEQVEAYIAILFSPEPLKGKKEKVTYARIRRDLDLSARLFFKGIDPEDEKDHEPYAPKAWRTMRKVLSPELMERLRSDRTLADAVGEALTYASTEDSLLYQLDNLDLSDEERNQILGLPFSGKIFKGYGSRSLKALDMLIDAFEEPEVTTLAEAEESSGLLGLRMSDSGTRYPLLPPYSTYDKENRNPVVLRAMGRMRRIVNAIIRIYGVPDEIHVELGRDLKRSKHEKDLINKRDRENERKNKQWRAQIAEAQGIDPDEVRPKLLKKIALWEEQDNFDIYTGHKIEFDRMISDDKYCEIDHVLPYSRTCDDSRNNKVLVLSKSNQDKRERTPYEWMTQDAQKGAPSWDEYQARVIANHHISPRKRRYLLNNNLGPDQERDFLSRNLNDDRYMSRAVKNYLEDSLIFPKDGRVRHVIAVAGGATGSLRHVWGLNFGANNTKDRSDDRHHAVDACVIAACSEATVQAVAKAHKLGVETYKHMREDRLKNTQPWPTFADEVIARREFIIPTRMVSHGVTGQAFKDTNYRFVGLTNDTKKLGVLYYKGKFTKEGNFVIGDDGNARLVDGMAFLRLWLDPTAKKGKGKWYAEPVYYADIPAIKNGTYIPKAGKRGVARIVWEPISQVARNTKPLVLFRGDVISMGGHTVRYWSFSINTLTLRTRDLITGAEYKGFPTINQWSRDSYPKKIQEDCLGHCYKGLVPSSLED

SEQ ID NO: 6995 - protein, 1000 aa, synthetic construct
  REGION 1..1000: note = Synthetic
MDVTRPYLVLGLDSGIASCGFCLLDMTNHKILEMGSHLFKAPQEDKTKTSLAVTRRKARSIRRNTARTAARLKHCLELLAGAGLVPADADKTWLQTKKGDKPILKLRAGGLDRLLTDREFAQALYSLCGRRGYIPHGEGRLGETDEDESRKVLGAIKKNQDAMAAGSYRTVGEMLNAQGRSRNRGGDYSLCVYNSQIQDEAKALFASQRARGNTKATRELEDSYLACLTWEKKSLDHDTRVYELVGPCSYFPGEKRAASADVSSELCRAYERLGHIVIVHEDGSEQALTASEIDDYLKILFSTAPIKGNKECKVTYGTIRKDLDISGKSVFKGIAQDREKDEPFVPKAWRSLRRVLPKGLLARMLEDRKLGDAVCEALTFASSEASLIERLSDLGLSDDERDAILAVPFTGKLFKGYGSRSLKALGLLLGAFEEPEIRILTDAEKVTGLLDLRLSDRGVRGQLLPPYDSYDPTCRNPVVLRAMGRMRHIVNAIIRIHGVPDEIHIELGRDLKMSNKEKSLVDKRNRENAASNKKWATTAAGILGCTPEEVPGRIIRKLILREEQGEKDLYTGDSIDLEHLVRDDRYCEIDHILPYSRTCDDSRANKVLVLSKSNQDKRERTPYEWMTSGEAGAPSWDSYRARIMAQVKNPRKRANYLNTDLGPETQAKFLARNLNDDRYMSVAVKNYLEDCLLFPEDGRKRHVTAVAGGATGNLRWVWGLNFGEGNIKDRTDDRHHAVDAAIIAACSESTVKKVAEASAKGREAFKQLRKSRLADTQPWPNFAAEVAARREFVVPTRMADHGVMGRVFEDTLYHLEGITEDKGKYPLVRAGEKTVKKGNVRINPDGSVKLIDGMAFLRLWLDPTARPNGKVKGKWYAEPVYYADIPAIKAGTYVPRACTIHVARVNWEPVPEAAMEIEPIVLYAGDVVEINNQLVRYSGFDIHGATLHYQSLLNGATTTAIPSLGTWGKDTQVRVLQEDCLGHCYDGIAINPEDSTFQQR

SEQ ID NO: 6996 - protein, 1000 aa, synthetic construct
  REGION 1..1000: note = Synthetic
MAEQYLVLGLDPGISSCGFALLDMNNHKILEMGSHLFDAPQESKTKVSLAVGRRNARSARRNNLRTKNRQKHCMKLLKEAGLVPDDATKQWFQSAKGDRPLLELRFAALERILTNREFAQILYALSARRGYIPHGEGRISKLSDMDTSGSSDAETGKVLKAIGENNKLMVQGQFRTVGEMLYHQGKSRNKGGSYEHCVLNSQIVDEVHAIFQRQRAQQNPAATQELEDKYIENLTWEKRTLDHDARVYALVKKCKYFPSEYHAARADLSSELCSAYERLKHLRIVNADGHETALAPEQVEAYIAILFSPEPLSGRKEKVTYARIRKDLDLSAHLFFKGIDPEDEKDHEPYAPRAWRAMRKVLPTELMNRFRNDRALADAVGEALTYASSEDSLIYQLDSLDLSEAEREYILGLPFSGKIFKGYGSRSLKALGMLIDAFEEPEVTTLTEAEESSGLLGLRMSDNGMRYPLLPPYSTYDSENRNPVVLRAMGRMRRIVNAIIRIYGVPDEIHIELGRDLKRSKHEKDLISKRNRENERKNKQWRAQAAEIQGIDPDEVRPKLLKKMALWEEQGGLDAYTGHKIEFDRMISDDKYCEIDHVLPYSRTCDDSRSNKVLVLAKSNQDKRERTPYEWMTQDAQKGAPSWDEYQARVIANRHISPRKRRYLLNNNLGPDQESDFLNRNLNDDRYMSRAVKSYLEDTLIFPEDGRKKHVTAVSGGATGSLRHVWGLNFGDGNTKDRSDNRHHAVDACVIAACSEATVQAVAKARKLGAEAYKHIREDRLKDTQPWPTFADEVVARREFVIPTRMVSHGVTGQAFEDTNYRFDGLTNDTKKLGILYGNGKFTKKGNFVIGGDGNAHLVDGMAFLRLWIDPTAKKGKGKWYAEPVYYADIPAIKNGTYVPRAGKATVARNAWEAIPEAAHRTKPLVLFCGDVISMDGHTARYWSFSINTLTLKTKDLITGDDYKDFPTLGKWSKDSYPKIIQEDCLGHCYKGLVPKSSEG

SEQ ID NO: 6997 - protein, 995 aa, synthetic construct
  REGION 1..995: note = Synthetic
MINQDSKQPYYILGLDPGIASCGFALLDMANHTIPEMGSHLFDTPQTDKTNTSLAVVRRNARSARRNNERTKNRQKHCLNLLKKYEIVPEGVDKQWFQTRHGDCPTLELRVRGLDHLLTDRELAQVLYSLSGRRGYIPHGVGRIENATKSSDEEGKVLKAVRENTDLMKSKGYRTVGEMLYKRKRSRNKAGKYELCVLNSQLVDEARTIFEKQQSCGNEKITSQLVEEYIKCMKWEKETLDQDAKVYAHIGKCTYFDDEYRAAKADLSSELCRAYERLGHLVIVDESGKERKLNSEQRGEYLRTLFSPVSQVNNKDCKVTYSNIRRDLNLSERSLFKGVGRDDEKKEVFAPKAWRCMRKNGLPSSLLERMWKDRELADAIGEALTYASTEKSLRNQLESLDLSVQELNAICGLPFASKVFKGYEARSLKALQLLLDSFDDPQVMTLTDAERASGLLDLRLNRKSKQETFLEPYLVYDPTCNNPVVLRSMGRMRRIINAIIKLYGVPNEIHIELGRELKYSAKEKDKIRDNNKDNRKNNEIWSKTISESLGIAPEEVRGKLLRKYALWKEQGGKDVYTGDKIEFDRMIREDHYCEIDHILPYSRTCDDSKANKVLVLAKNNQDKGPRTPYEWMTQDASAPNWDEYRARVLELVKNPKKRRYLLNTDLAEGNHEAKFLDRNLNDTRYMSRAVKTYLEETLLFPEDGRKQHVIAVAGGATANLRWVWGLNTGKGNTKDRSDNRHHAVDAAVIAACSESTVQKVAKARSLGREMFKVMRRSRLADTQPWPGFADEVLAKRESVIPTRMVSHGVTGRVFEDTLYSFEGEVDGKEGYGLLKAKNKQVKKGNFCFVTDKSVHLVDGLAFLRLWLDPTARPNGKVKGKYYAEPVYYADIPSIKNGTYVPRACKIHVARTKWEPIPDSVLKQNPIVLYRGDVLSIDGNIGRYWAFDINKCGMKVHDLKTNKELVSFPTIGKLGVKSNVFIIQEDILGHCYANLE

SEQ ID NO: 6998 - protein, 1004 aa, synthetic construct
  REGION 1..1004: note = Synthetic
MLHLRQFLSHGKESVMRKKPYFVLGLDPGIASCGFALIDIENHEILEMGSHLFDAPQESKSKESLTVGRRKARSARRNLRRTKNRQKHCLNLLKSSGLVPKEATKEWMQSRKGDKPIIELRVDGLDRVLSDREFAQVLYSLSGRRGYFPNGEGDGKDARDDSGEVLAALARNDEDLKASGCRTIGEFLSTKERSRNRAGAYENCVRNTQIISEVKTIFATQRAKGNHKASEELEKAYLKNITWRAFNSEYDELVYGRVGMCSYFKNEKRAAKADLSFELCRAYERFGHIAMVDADGEESFLTTDQINDYIRRLFSTKPKSVKYSTIRKDLDLPATMYFKGVEKEQENKTHVSEPKVWNKLTKHLPESLLLRMLTDRSFADDILESVTFASSKESLEKRLEDIDLDEDELDAVLCLPYTSKLFKGYGERSRKALDLLLEVFGEQDVRTLTDAEKASGLLAFRLSKNCNERTTLLPPYGAYDPICTNPVVLRAMGRMRRIVNAIIKIYGVPHEIHIEVGRELKQSKHEKDLINKRNRQNQQNNDAWAKTIASIRECDVDEVTGKDLLKYALREQQNQKDAYTGAPINLERMILESNYCEIDHILPYSRTCEDGRDNKVLVLGSTNQNKRERTPYEWMTQDASLGAPDWEEYKARVVANEKYSRRKRESLLNTSLGADDEAKFLSRNLNDTRYMSIAIKNYLDDTLVFPDNGKKLHVFAVSGKATSTLRYSWGLNMGKGLTKDRTDDRHHAVDACVIAACSLSTIKRIAEAHSQGKKSFEQTRESRLASTQPWETFAEEVIARRETVVPTRFVNHGVTGRAFEETNYRFDGFTDDTKKLALLYGSGKETKKGNIFLGKEGNAHIVDGMAFLRLWLDPDANNGKGKWYADPVYYADIPLLRNGSYVPRALKAHIARINCKPVPLEAQRLAPLVLFRGDVIEVNGARARFEGININNVSLKMSSLLPDDRWSNIPTFGKWNKNTRVRIIQEDCLGHCYRDWLRTNQSES

SEQ ID NO: 6999 - protein, 1002 aa, synthetic construct
  REGION 1..1002: note = Synthetic
MDVTRPYLVLGLDPGIASCGFCLLDMTNHKILEMGSHLFKAPQEDKTKTSLAVTRRKARSIRRNTARTAARLKRCLELLAGAGLVPADADKTWLQTKKGDKPILKLRAGGLDRLLTDREFAQVLYSLCGRRGYIPHGEGRLGETDEDESKKVLGAIKKNQDAMAAGSYRTVGEMLNAQGRSRNRGGDYSLCVYNSQIQDEAKVLFASQRAHGNTKATRELEDSYLACLTWEKKSLDHDARVYELVGPCSYFPGEKRAASADISSELCRAYERLGHIVIVHEDGSEQALTASEIDDHLKILFSTAPIKGNKECKVTYGTIRKDLDISGKSVFKGIAQDREKDEPFAPKAWRSLRRVLPEGLLARMFADRKLGDAVCEALTFASSEASLIERLSDLGLSDDERDAILAVPFTGKLFKGYGSRSLKALGLLLGAFEEPEIRILTDAEKVTGLLDLRLSDRGVRGQLLPPYDSYDPTCRNPVVLRAMGRMRHIVNAIIRIHGVPDEIHIELGRDLKMSNKEKSLVDKRNRENAASNKKWATTAAGILGCTPEEVPGRIIRKLILREEQGEKDLYTGDSIDLEHLVRDDRYCEIDHILPYSRTCDDSRANKVLVLSKSNQDKRERTPYEWMTSGEAGAPSWDSYRARVMAQVKNPRKRANHLNTDLGPETQAKFLARNLNDDRYMSVAVKNYLEDCLLFPEDGRKRHVTAVAGGATGNLRWVWGLNFGEGNVKDRADDRHHAVDAAIIAACSESTVKKVAEASAKGREAFKQLRKSRLADTQPWPTFAAEVAARREFVVPTRMADHGVTGRAFQDFSYRLEGLRETGYAEISRQTDPATRERRSDAAGNYALSSNGTVKLLDAIAFVRFWHDPDAGKNGKWYAEPVYCADIPAIQNGSYVPKYQKQKVARNSWLPVPDSAMHNEPLVLFQGDVLIIDSHIGRFWTYAIGGGTLNILSLLDKNEKAECFPPISKWVNSVEVRVLQEDCLGHCYDDISINPEDSTFRQR

SEQ ID NO: 7000 - protein, 1000 aa, synthetic construct
  REGION 1..1000: note = Synthetic
MAEPYLVLGLDPGIASCGFALLDLSNHQILEMGSHLFDVPQEDKTKVSLATGRRMARSARRNNARTKNRQKHCMQLLKEAGMVPEDATKQWFQSAKGDRPLLELRFAGLERLLTNREFAQILYSLSARRGYIPHGEGRISKLSDVDASGAADEESGKVLKAIGQNNKLMASGEYRTVGEMFHAQGKSRNKGGSYELCVLNSQIIDEVHVLFDTQRKHRNPVATEELEQRYIDNLTWEKKSLDHDAKVYSLVGKCSYFPTEMRAARADLTSELCNAYERLGHLRMVNADGQESSLSPEQIDIYLSILFSTEQLKGAKAKVTYARIRKDLNLSAHIFFKGIDSDDEKKREVYVPKVWHNMRNHLSTELMQKLWDNRGLADSVTEALTYASSEESLLFQLDGLDLTDDQKDEILGLPFSGKLYKGYGSRSLKALEMLVDSFEDPSVVTLKDAEEASGLLGMRLSKDGQRSTLLPSYSSYDKECRNPVVLRAMGRMRHIVNAIIRIYGVPDEIHIELGRDLKRSKREKDLIAKRNRANEKNNSRWAEQAADILKIDPEEVRPKVLRKMALWEEQDGFDAYTGAKIELEKMILDDKYCEIDHVLPYSRTCDDSRSNKVLVLAKSNQDKRERTPYEWMTQDAGKGAPRWEEYQARVVNNHHISPRKRRYLLNNNLGEDQQKEFLARNLNDDRYMSRAVKAYLEDTLLYPEDGRKQHVVAVAGGATGNLRHVWGLNFGSFGTKDRSDNRHHAVDACVIAACSQGTVQRVAKASSLGRNTLKQVRKERFAETQPWLTFADEVKARREFVIPTRMVSHGVTGRAFEDTNYRFDGLTDEKKKLSLLYGNKKFTKKGNVVIGKDGNAHLVDGMAFLRLWLDPTGRKGKGKWYADPVYYADIPAIQNGTYQPRAAKAHVARTAWESIPESALASKPVVVFRGDVITVGDVAARFCRFDINGLSLTMKSLSTEDECKSFPPMSRWDNKHRPVVLQEDCLGHCYDGLTPSSLEN

SEQ ID NO: 7001 - protein, 999 aa, synthetic construct
  REGION 1..999: note = Synthetic
MQQPYLVLGIDPGIASCGFCLLDTANNRILEMGAHLFDAPQEDKTRVSLATTRRNARSTRRNIKRRSDRQKHCLGLLAEYGLVPQDAPKGWLQSRKGDAPVLSLRAKALDELITDRELAQILYSLSAHRGYIPHGEGSLTGEGDVDAETGKVLRAIGANTKALSEGGWRTIGEMLNDQKRSRNKRGAYDLCVLNSQIVDEVHQVMHAQRTYGNTRASSELEERYLKVLTWEKPSLGHDEKVYNLVGSCSYFPEERRAANATLSSELCRAYERLGHLVIVNPDGSERVLSDHEREELLSILFAVKAIKGNKECKVTYANIRKMLDLGAECFFKGVDQDDEKKREPYEPRAWRNMRSHGVPSTLLERMLSDRDFADKIGEALTFASTEESLQMRLESLDLTDEEYESIAALPFNSKVYKGYGSRSLKALSLLLDAFQEEGIQTLTDAEEASGLLSRRLAKGEERTTQLPTYDVFDPTCNNPVVLRTLSRMRRIVNAIIRIHGVPNEIHVELGRELKQSNKEKAAIQKNNAANERDRKRWAGTLAEVMSISPDEVPNKLIRKCIMREEQGERDPYTGDPIELQCLIDDDRYCEIDHILPYSRTCDDSRRNKVLVLSKSNQDKRERTPYEWMTSGEVNAPSWDEFQKRVLNSKALLRKRGYLLNQSLGVDEETKFLQRNLNDMRYMSRAVKNWLEKSLALPEGGRVVAVAGGATANLRHVWGLNTGPNNKKDRSDDRHHAIDAAVIAACSQGTLMKVAKARALGAKAFRRMRESRLSDTQPWPTFASEVLAQAEFIIPTRMVNHGLTGRAFEDTAYRYVGESDDANRRGVLYAKGKEVKKGNFQIGADGNARIVDGMAFLRLWLDVEGNAGKGKWYAEPVYYADIPHIMNGDYVARVAPKAHVGRTLGWIELPESARTTAPITVFRNDALVVESQIVRYTGFHVGSVAIEYEMIGPAVAQVTIPSLGKWDSNTRVRVLEEDCLGHCYREFGYNMPQNSLDDEC

SEQ ID NO: 7002 - protein, 1051 aa, synthetic construct
  REGION 1..1051: note = Synthetic
LFLIIHRINYSHLAVNAPHRMQSNPVVFLLILFLMFIKFHEGASMESERAYLVLGLDPGIASCGFCLLDMTNHKILEMGSRLFKTPQEDKTKVSLAVTRRNARSARRNNERTKSRMKHCMDILADEGLIPEDADKTWFQSKKGDKPILKLRSCGLNRALTDREFAQVLYSLCGHRGYIPHGEGKDAETDDAEGKKVLNAIKRNTEEMAAGGYRTVGEMLHSRGKSRNRGGNYDFCVYNSQIQSEVHAIFEAQRALGNLKANEKFEDRYLECLTWEKKSSDHDKKVYDQVGTCIYFPELKRAADADVSSELCRAYEKLGHLVIVHVDGAEQRLTGEQISHYIGILFSPTPLNNNKYCKVTYSTIRSDLDLSGKSVFKGVPQEKEKDEVFVPKAWRCLRKVLANDHEDLLDRMLNDRELGDAICEALTFSSSETSLQEQLEPLGLAEDECVALSSIPFNGKLFKGYGSRSIKALSILLGAFEEPGVQTLADAEKATGLDRKRLEDRVARSELLPPYNTYDETCRNPVVLRAMGQMRHIVNAIIRIYGVPDEIHIELGRELKMSAREKEMVSKRQRANETANKNWAAIAAKILCCEPEEVPGQTIRKLAFREEQGEKDIYTNAPIDLEKLVTDNRYCEIDHVLPYSRTCDDSRANKVLVLSASNQNKRERTPYEWMSQDAGKAGTPKWSEYSARVIATVKNPRKRANLLNMDLDKDAESEFLQRNLNDTRYMSVAVKNYLEDCLQFPDDGRKTHVIAVAGGATASLRHVWGLNFGKNNEKDRTDNRHHAVDAAVIAACSTKTVQAVARASSVGRESFKHIRQSRLADTQPWKTFAEDVITERSFVIPTYMADHGVTGCVFEDFSYSLEGIDEKGYAHISRQTDRTTGECRSLKASNFEIVNETTVKLLDSMAFLRLWHDPHAGKTGRWYIEPVYCADIPNLDGKTYHPRYQKQKVARSGWPLVPAEALKNKPLLLFRGDVLIVGNHIARYWKFDIGGGKVTMLSIVDINSEAKGFPSISKWKNDMPVRILSEDCLASCYKHMTIDSENSTFEER

SEQ ID NO: 7003 - protein, 1042 aa, synthetic construct
  REGION 1..1042: note = Synthetic
VRSGPSRRSQRPSDGQGVNSCPARPYTHSIVERNGGTTMDANRPYLVLGLDPGIASCGFCLLDMTNHKILEMGSHLFKAPQEDKTKVSLAVTRRNARSIRRNTARTAARLKHCLSLLVEADLVPPDADRAWFQTKKGDKPVLKLRATGLDRLLTDREFAQALYSLCGRRGYIPRGEGRLGEADDNDNEGKRVLDAIKKNQEAMEAGAYRTVGEMLNAQGRSRNRGGDYSLCVYNSQVQDEVKTLFKEQRALGNAKATKKLEQAYIDCLTWEKKSLDHDARVYELVGECVYFPEEKRAASADISSELCRAYERLGHLAIVREDGSDQALSAEQIAHYLGILFSTAPIKGNKDCKVTYGTIRKDLDISGKDVFKGVAQDKEKDEVFAPKAWRCLRRTLPQGLLERMFDDRKLGDAVCEALTFASSEASLVERLSGLELSDDEAEAILEVPFTGKLFKGYGSRSLKTLGLLLGAFEEPEIRILTDAEKATGLLDLRLSDRGVRGGLLPPYDEYDRTCRNPVVLRAMGRMRHIVNAIIRIHGVPDEIHIELGRDLKMSNKEKDLVDKRNRENEAAKKKWAKTAADILGIEPEEVPGRIVRKLIMREEQDNWDLYTGDAIDLERLVRDDRYCEIDHILPYSRTCDDSRANKVLVLSKSNQDKRERTPYEWMTSGEAGAPSWDEYRARVMALVKNPHKRANHLNTDLGEEAQAKFLARNLNDDRYMSVAVKNYLEDCLLFPEDGRKRHVTAVAGGATGNLRWVWGLNFGSGNVKDRDDDRHHAVDAAIIAACSEGTVQKVAKASSKGREAFKHLRESRLADTQPWPTFADEVIARREFVVPTRMVDHGVTGRVFEDTLYHLEGITEDKGKYPLVRAGEKVAKQGNVHVNPDGSVKLIDGMAFLRLWLDPTARPNGKVKGKWYAEPVYYADIPAIKAGTYVPRACTIHVARVNWKPVPEAAAQQKPVVLYPGDVLQVGSHVGRYRSFDISNCGLSVNSLVNKDVIAPGFPKTLGGWGKDTQVRVLQEDCLGNCYDHIAINPDDSTFRQR

SEQ ID NO: 7004 - protein, 1000 aa, synthetic construct
  REGION 1..1000: note = Synthetic
MSEGRPYLVLGLDPGIASCGFCLLDIANCKILEMGVHLFKAPQEDKTKTSLAVTRRNARSVRRNTLRTAARLKHCMELLKEAGLVPEDADRTWFQSKKGDKPILKLRASGLGRLLTDREFAQVLYSLCSHRGYIPHGEGRLGETDDAEGRKVLSAIKKNLADMESGNFRTVGEMLYAGGKSRNKGGNYDFCVYNSQIQDEARTLFEVQRSHGNAGATEELEKKYLECLTWEKKTLDHDDRVYELVGNCPYFPYEKRAANADVSSELCRAYERLGHLVVINEDGSEQRLTAEQIDGYLKVLFSPVAIKGNKDCKVTYGNVRKDLDLSGKSVFKGVAQDKEKDEVFAPKSWRCLRKALPEGLLARMLDDRRLGDDICEALTFASSEASLAERLEALKLNEGEREALLGVPFTGKLFKGYGSRSRKALDLLIGAFEEPEIRILTDAERATGLLDLRLSDRNPRSKLLPPYNAYDETCRNPVVLRAMGRMRRIVNAIIKIYGVPDEIHIELGRDLKMSNREKDLVSKRQRLNEATNKKWAAVAAGVLGCEPEEVSGGLIRKLAMREEQGEKDAYTGVAIDLECLIRDDRYCEIDHVLPYSRTCDDSRANKVLVLSKSNQDKRERTPFEWMTSGEVGVPSWDEYRARVMATVKNPRKRANLLNTDLGPDTQAQFLARNLNDDRYMSVAVKNYLEDSLLFPEDGRTRHVTAVSGGATGNLRWVWGLNFGEGNTKNRQDDRHHAVDAAVIAACSEKTVQEVAKASSLGRETFRHMRKSRLADTQPWPSFAQEVEERRASVTPTRMVNHGVTGRVFEDTLYRFEGLTEDKGRYPLVHANGKTVKKGNVRITSDGSARLVDGMAFLRLWLDPEARPNGKVKGEWYAEPVYYADIPAIRAGTYVPKACATHMARTSWEPVPESAMRLKPVTVFFGDVLVVDERVARYAGFNINSKRMKMVNLLTKLEVPDWPPFGGWGRDTRVYVLQEDCLGHCYEGMATDFENSSIKED

SEQ ID NO: 7005 - protein, 1099 aa, synthetic construct
  REGION 1..1099: note = Synthetic
LCLPCSPCSSPQGARTAGASLACSFCPIWGLKSLVWHVLARLGFTPAAPSFSRLSYSVNEPSAEKRGLMSRALLYFISCQASVSKRKTTRGAPMETNRPYLVLGLDPGIASCGFCLLDMTNHKILEMGSHLFDAPQEAKTKTSLAVTRRNARSARRNTLRTATRMKHCLALLKDAGLIPENADKAWLQSAKGDKPILKLRANGLDRQLTDREFAQVLYSLCGRRGYIPHGEGRLGETDDGEGRKVLSAIKANEATMKRGNYRTVGEMLYANNGKSRNHGGDYSLCVYNSQIKDEVQALFSAQRALGNPKASGDFEQDYIDCLEWEKKTIDYDTRVYELVGACSYFPEEKRAADADISSQLCRAYERLGHIVIVREDGSEQRLTAKQIDGYLNILFSPLPLKGNKECKVTYGSIRKDLDLSGKDVFKGVAQDGEKGEPFSPKSWRSLRAALYENHEDLLVRMLKDRELGDAICEALTFASTEASLFERLGLLGLTEDEQTALCSSVPFTGKLFKGYGSRSLKALGILLSAFEEPEIRTLTDAERATGLLDLRLADRGLRDELLPSYSKYDPTCRNPVVLRAMSRMRRIVNAIIRIHGVPDEIHIELGRDLKMSNKEKVAVSKSQRANEAANKKWAAKAAGILGCSPEEVPGRIVRKLAMREEQGEKDAYTGATIDLEHLVRDDRYCEIDHILPYSRTCDDSRANKVLVLSKSNQDKRERTPYEWMTSGEPGTPDWDEYRNRVMATVKYPRKRANLLNTDLSPETQAQFLARNLNDNRYMSVAVKNYLEDCLVFPEDGRKKHVTAVAGGATGNLRWVWGLNFGQGNTKDRDDDRHHAVDAAIIAACSESTVKKVAEASSRGRETFKHLRKSRLADTQPWPTFAEEVIAQRAFVVPTRMANHGVTGRVFEDTLYHLEGFTNDKGKYPLVRAGEKTVKKGNVRINPDGSVKLIDGMAFLRLWLDPDARPNGKVKGKWYAEPVYYADIPAIKAGTYIPRACTIHVARNAWEPVPASAMRRKPVVLFAGDIVEVDEHIGRYSGFNIAGGRMGVLHILTKVEVSDWPSLGSWGRNTQVRVLQEDCLGHCYDSIIIDPDNSTFRQRE

SEQ ID NO: 7006 - protein, 1000 aa, synthetic construct
  REGION 1..1000: note = Synthetic
MAEPYLVLGLDPGISSCGFALLDMNNHKILEMGSHLFDAPQDSQTKVSLAVGRRSARSARRNNLRTKNRQKHCMELLQEAGLVPQGVTKQWFQSTKGDRPLLELRFAALERPLTNREFAQVLYALSARRGYIPHGEGRISKLSDMDTSGSSDAEAGKVLKAIGENNKLMAQGHFRTVGEMLYDQGKSRNKGGSYERCVLNSQIVDEVHIIFQSQRTQQNTAATQELEAQYVQNLTWEKRTLDHDAKVHALVGKCSYFPGEFRAARADLSSELCNAYERIKHLRIVNADGDEVALAPEQVETYIAILFSPEPLKGKKEKVTYARIRKDLDLSAHLFFKGIDPEDEKDHEPYVPKAWRAMRKVLSTELMERLRSDRTLADAVGEALTYASSEDSLVYQLDNLDLSDEERSQILGLPFSGKIFKGYGSRSLKALDMLVDAFEEPEVTTLAEAEESSGLLGLRMSDRGARYPLLPSYSNYDKENRNPVVLRAMGRMRRIVNAIIRIYGVPDEIHVELGRDLKRSKHEKDLINKRNRENERKNKQWRAQIAEEQGIDPDEVRPKLLRKIALWEEQDNFDIYTGHKIEFDRMISDDKYCEIDHVLPYSRTCDDSRNNKVLVLAKSNQDKRERTPYEWMTQDARKGAPNWDEYQARVIANHHISPRKRRYLLDNNLGPDQESDFLSRNLNDDRYMSREVKSYLEDTLIFPEDGRVKHVIAVAGGATGSLRHVWGLNFGANNSKDRSDNRHHAIDACVIAACSESTLQAVAKARKLGAETYKRMRKDRLKDTQPWPTFADEVIARREFVIPTHMVSHGVTGRAFEDTNYRFDGITNDTKKLGILYGNGKTTKKGNFVIGNDGNAHLVDGMAFLRLWLDPTARKGKGKWYAEPVYYADIPAIKNGTYIPRAAKAHVARVAWEPVPENALASAPVVLFSDNVIKVGSAIARYSRFDIGNAALVLENLRTGEECKKFPTLGRWNNELVPIIINEDCLGHCYKELAPNILEG

SEQ ID NO: 7007 - protein, 1002 aa, synthetic construct
  REGION 1..1002: note = Synthetic
MERNRPYLVLGLDPGIGSCGFCLLDMTNHRILEMGSHLFDVPQEPKTKTSLAVTRRNARSIRRNTLRTRMRLKHCLGLLKDAGLVPQDADKNWLQSTKGDKPILKLRSCGLDRLLTDRELAQVLYSLCTRRGYIPHGEGRFGETDDVEGRKVLAAIKTNNKAMESGNYRTVGEMLHARGKSRNRGGNYDFCVLNSQIQDEVRTIFSAQRTLGNDRASTEFEEKYLDCLTWEKKTLDHDKRTYDLVGKCSYFPEERRAALACLSSELCRAYERLGHLVIVHEDNSEQVLTAQQIDVYLKVLFSPAPLKGNKDCKVTYSAIRRDLDLSGKSVFKGVSQEKEKDEVFAPKSWRRLRKTLPEDLMVRMRNNRELADDICEALTYASSEDSLLTQLEPLDLSENETEAVLGVPFSGKFFKGYGSRSRKALGILLGAFEEPEVRTLTDAEKATGLLDHRLANDTVRSVLLPPYVTYDETCRNPVVLRAMGRMRHVVNAIIRIHGVPDEIHIELGRDLKMSKREKDAVSKRQRQNEATNKKWAKTAAGILGCEPEEVPGKVIRKLAMREEQGEKDAYTNAPIDLERLVREDHYCEIDHILPYSRTSEDSRANKVLVLSKSNQDKRERTPYEWMTQDVGKPGVPNWDEYHARVVATVKHPRKRANLLNTDLGPETEAKFLARNLNDDRYMSVAVKNYLEDCLLFPDSDRKRHVTAIAGGATGNLRWVWGLNSGSNNTKDRSDDRHHAVDAAVIAACSEATVQKVARARSLGRETFKHMRKSRLADTQPWPTFADEVIARKEFVIPTRMADHGVTGRVFEDTLYHLEGFTDDKGKYPLVRAGQKTVKKGNVCISPDGSAKLIDGIAFVRLWLDPTARPNGKVKGKWYVEPVYYADIPAIRRGAYVPKACTIHVARTSWEPVPETALASRPITLYSGDVLRVDDHIGRYSSTDINGCRLVMLNLDSGNRVNDWPSIGSWGTTTQVQVLQEDCLGRCYGNVILHSDGSTFETR

SEQ ID NO: 7008 - protein, 1175 aa, synthetic construct
  REGION 1..1175: note = Synthetic
MSDHQTVWSFDLGKGSIGEAVRDIKSNRFLHKASLLIPAEFASTKEATARRRMWRTRIAHKAREKWLDEVWLAAGLEPLQTRKVWKNPEISKWELKQVGDYRMEREFAPQNRKPGRDGAPADGTICYTSCLLRIKLLRGEKLETWQIYKALHSAIQKRGYGRVPWAAREEKRSGKTEEEQEKELKKLDPDYREAVETWPKFKRAVGGVEFHLPCFYDAWKMGLWSVDCPEVFENRITCQAESTRKVRFDRADVEREIETLGQRAAAQLLQLADAFAQWKRDGWKSIDSFPVTAKTFGEFLVHGPAGEPKGDARNNFSDYLKFRASNNIHSGSGDDWMGAMAQKTPRFDNRIINTCAIIPRLQVCNVTIRFNKSDSKPVPESLLATEVTFLMKLKNTLVTSYPAQRKLTVEEIRKIFEVVTAEALTKALSIDPSDKIREKKVVECYALTKTDWARTKGIKELGLFPLPGHMEIRAPKSDGRSRFSRPALRLIRALILSGQSPSTFYQRLLARDPALITEIGMDVLDAEPVRFVGSLGGEKKFIKTERSWVVATDLKFLTDLTRSNNTWDNIYFPEQRLDALETRYTDTDGKINVPQAVRELLGSINDPVVRHRLGVFSDRLTKLQWGDDKEGIPPCGIPDTVVLEFVREDFMGERAKRELQKFISDREKARKEAGEQAAALGVHEKSGRLKYELFKSQGGICLYCQQNFKETDLADYRIEHIVPRAQGGPDAMVNYVLAHEACNDAKGDKTPFEWKHGQQGWDGYKACVEKHGTLLRNKKVQLLLREDAAELVERYTALAETAWITKLAQKIVSLHFGWPRGNDREGKRRVIAVSGGLTAWIRRKYRLNSLLNPPPAGTVDLNEWEAKAEKNRKDSRHHALDAIVINFLPQWMRDEKKGWFFRFPEPVRKNPRGVFEKEIADVMPRLLAFEKAPLAETIYGGRLDKGKTTIVQRVHLKKLAFNTIKQKEVFDRKYLAGQIKSVRDSITADILLRFLEEESNGESEWHDFCEGLFQRKRDGTKGARISKVNVTVGSADEYAEMSKDGGGAYRKGKKGHKGQIIYLERTVNKKGATKDIIQVRPVYAFESRLTIERKLRDELGDNIRVYGFFQSGCLVGVEKEVAHEKKPLPAGTYLLNTIMADAKCMKVTTQNGVTYPDIPRYSLSSLIEAGLRRAD

SEQ ID NO: 7009 - protein, 1247 aa, synthetic construct
  REGION 1..1247: note = Synthetic
MFSRRSVHCHHAPEVFGMRRNPMTQENTQPGSARKTIWSFDLGKASIGEAVRDLKDDSFPHLESLLIPFEFAETQSAASRRRMWRTRIAHHAREDWLARIVKIAGFEPLRGRRMEKTAEGWRQVPENAEEKKRRAMLEREFPAKGDETQYNSAALRILLLERETKLEEWQIYKALRSAIQKRGYGRVPWSNREEKRGGKSEEEMEKEMAKKDPGYRAAIEAWPKFKQQVLPEFHFPCYYDAAHTGIWSPEDPSVVKLRQDHHAESTRRVRFDRTAVEREITLLADAAAEEWPALGKAFERIRAQGWRYTEHATKRERMLPVVAETLGEFLVHGPAGTPSDEALEDFHRYLEERRARGIRPGTEDDWQAATGQKTPRFDNRIVEPCALLDGLRVCNVAVRLDPKTKAAQPDSLLYSEVTFLMKLKNTRVEGRPGYAGLTSGEIRKLWETALGDVAAISLQKIESDIRKKKPDAKDDEVKSKALRSWEEKVSECFSLVESDPDKKSRTKKRSLHSVTGLRPAAGHEVVRSPKSQGRSRHSRPALRLIRSLILSGNKPSEFKRRLLVHDAALLAEIGLDVLAAPLPPRAKIDGKPEPQRRPYVLESQLKFLDDLIRENDTWEKIHLPEQRLDALEERHSTDGHLDREAAVRDLIGSINDPVVRHRLGVFTERLCELERQFGRPDEIVLEFVREDFMGEKAKDELKRFQNEREEQRKHARKMAAEAGASGKAAGLRYELLKAQGNKCLYCGQDFHVSKLDDYPIEHIVPRAQGGPDAMVNYVLAHEKCNDEKGDMTPYQWKYGKEGWSGYVELVKQHATALRNKKVQLLTREDAAELVQRYTALAETAWISRLAQKIAGLWFGWRNGNDAENRKRITVISGGFTARIRRRYRLNSLLNQLDPDFVTKALAEAEKQKGSRLSDEERKAATRRAEDDWEAAAGETKNRKDHRHHALDAMVINFWNTGSKKQDADFFRFPPAIHRNALAYFRERIEPVNPMLYVREKPAIQAMFYGKRQLDGSTFIVKRRPLLELGTKEVKNKKVLKPLADIRQQAQTIVDGAIRRIVIEFLEAHGDLTLEQWTEWCDNVTRGDNGPRIKQVQMRESAADKTENYHDFGKDQTARFGQFRKADQCTSYFVIAVPTPSKKDPDAVRYKRRAVYAFDNRNEKRMQIQSEPGVRVVDEFWPSCQVRIEHEWELRGRSMPPGLYRLHGIEDDGRTTLSSPQAGLRGTKDEGRASLAVLMQAGMKRVRA

SEQ ID NO: 7010 - protein, 1229 aa, synthetic construct
  REGION 1..1229: note = Synthetic
MVGIAAPFSSAACRGSEAGRMKACHCSELLPTLLAETGRPSPAEILPASNPSNPRPMKTIWSFDLGKASIGEAVRDLSNHSFPHKASLLLPEDFAETQTAASRRRMMRTREAHKAREAWLDAVWRAAGLTPLIGRRVEERDGKWQAVEETPEQKTEREEKLEREFPKKGDATCYNSALLRIRLLRREKLEPWQIYKALHSAIQKRGYGRVPWAARDERRTGKTEEEMDKELAKKDPAYKAAVEAWPVFKREMAEHFHFPCYYDAAKMGLWKPGPPEVFADRIDCHAESTRRVRFAREDVEREIAMLARNAEVQVPALAEMFSRARRDGWTLRDGKSGRTKTFPVVAADIGAFLVHGPAGEPLGAENDFAAYLDFRTERGIHPGSADDWMGATAQKTPRFDNRIINDCALLDGLQVCNVAVRYDAKNKRPYADSLLASEVTFLMKLKNTLVAGAGKDRKLTADEIRKIFMVITADALVVPIKVKPRVKAGTQALPEEERFAHGMKTWPARGAAAYALTKREWGNKAGIKELKLFPLTNHEVIKAPKTDGRSRFSRPALRLIRALILSGDKPSEFKRRLLARDAALLAEVGMDVLAVPPPPRAKVNGKPEARRRPYILERDVKFLTDLAEANDDWGMIHIPEQRMDALEARHKNDGIIERDAAIREIIGIINDPVVRHRLGVFAGRLRDLHARFGVPEEIVLEFIRTDFMGPKAKAELAAFQKKREEARTKAKEQVGKGDALKYELAAAQGCICLYCGQPFQMLELGNYEVEHIVPRQQNGPDAMVNYVLAHRECNEAKGEHTPFKWLRQTPGWDAYVERVEACAPALRNKKVQLLQREDAPELVDRYTALAETAWISRLAQKIAGLHFGWRNGIDFTGPKPVKRVTVISGGLTARVRRKYRLNSLLAPCPAGEDPREWESKAEKNRGDDRHHALDAMVINFLPQWSRDASKEHFFRFPEPIRKNAKAFFRKEIDEVMPSNIAFAKPTLAETIYGGRREGDNTLIVQRVPLLALGMKPAAQGKTAFDPKYLRDQAKSVREPRIVEAILGFLDEGHEEEAAWRDFCAKLHLPQRDGSPGPRVLKVNVNTGAADEYAEMSKDQTGAFRKGKKGHRGQIVYLLRAATKKGAVKETIEVRPVYVFESRSTVEQKLKGEHGEAITIYGFFQSGCLIAVEREVAHDKKPLPVGEYLLNTIMADSKCMKLTTQDGRTYPDIPRYSLASLIAAGLRRAD

SEQ ID NO: 7011 - protein, 1009 aa, synthetic construct
  REGION 1..1009: note = Synthetic
MKNKTVLALDLGTSSVGWALFNLGEDKLPTSLVDMGVRHFEEVIEPKSRELKNLARRQARQMRKNLSRRRQRRTALLTILQAAKLSPDGIDPYSESELTTHRPYELRAIAVDQKIELEELGRALYHLGRKRGFKSNRGAKMASLADQEEVQAFLKAPEREDDSEESKEDGPVLTEISQLRSELEGRTLGQYFWNCLKAKEKIRGRHTERSMFEEEFEKIWSKQAEFYPKVLTNDLKANVWHAMFDQRPLRQQKYLKGPCSLEITKPRAEKAQLVSQRFRYWQDLCNLELTDLETGERRRLSAQERNKLAEKLESVASISLKAIPGELGFKKAKWKTNLDRAKGDVLKGNSTAYKVSKRATHLWEALDEGGRERLVEIMLTIHDRGDLYRTLRKVFQLDPKVAYDLAIVELEQGTMSLSSKAMRRMLGHMKDGKSRIEAQVACGYEPWSEEIVQVARIESLPSRTEIPNPRVRKALGQVRKVVNAIVATYGRPEIIRIEMARDMTLTKDEKAKVEKSAKDRERENREADEWLAKQGDENPTRTKRFWYRLAKQCRWECPYTGRAIPSSLAAMNQFQIEHIVPYVRSIDDSFNNLTLCEAETNRKKGNKTPYEAFGSRPEWEEMVNRIDKLVGVGSKHKKNLFKSQLPPDVDKFVSRQLNETRWICRATAQYLRPVCTEVEVTKGAATAMLRSHWGLMEALYGVNEKKRDDLRHHAVDAVAIAFTSRALFQRISRHRSAAANESIDSVKVAPLSNDVVPPAPTWLFGEIKLRLATVVISHETQRAIKDAFHEESAYGKRAEGVYHIRKPLENMKESDIEAIVDDKVRALALEQFLANGKDAKVAFADGLQVGSTSARRARVAVAIPKAPLLKLPKLAPTKFFKLGNNHHVEIFEETTTGKRDGRYVTTIEAAERVRQRREPMVDTSPPAPGWKFVAWLCPNDCVRVDEDTREFFRVQTLESTNRKIVFRQISAGAVTDNEERLIKSPSTFKGVKLEIDPIGRIREVPEGVI

SEQ ID NO: 7012 - protein, 1029 aa, synthetic construct
  REGION 1..1029: note = Synthetic
MHMTKIIGVDTGIASVGYAYIDLRKNEILASGARIFDAAEHGKDGSSLALPRREKRLARRRLDRRRRRRIAVRKLLLDHGFSEADVALPVKGQKTGKITEPDVWQLRKLGLERKLSSRELAQVLMHINQRRGFQSIRKSDVDEKSEGGVMLSAAAKLQENMKAAGAETIGAYLAGLEKKRNRPDSYEHTVIRNLLRQEVDILIARQQAFGQPLATEALRDAFKETAFRQRPLQSSIDLVGVCEFEPGEKRAPVRAYSNELRTCWERLNSLRLLKSGRGTPLTLDQKRALISLAHRQANVTFARARKELGLPTEYTFNLASYRKTKEEDQDWASVVKTAEKATLIKMEGYHKIKKALAPYMSEGDWKNFAAEPAHLDRLTEILAFYEDIRDIRDLARDLPLTEEQLQAVMPLNLAGTAALSFKAIYNILPYLEQGLVYSEACEAAGYDHSPRYFGDKDQLPPFLAEYGTEVRNPVVLRALSQTRKVINALIREHGMPDRFHVELSRELGRNFKDRKDREREIQKRRAYNEELRQHAEEIFGREPSGEDFAKYKLWKEQNGICAYSGEYIPPETLKDPMATQVDHILPYSRSFDNSWFNKVLCYADENQHKGNETPVEYFSRIGRDLAGLEDFAKRLGNDQKARRLLMRDFDLEKQNEWKSRHLRDNSYVARLLVSHMERHLAPRYDRTDDSGHPLFVQTRNGALTSHLRHAWGLGLKDRDENDRHHGLDAIIVAAATQGHVQQMTLWDKRHRPNHPDDPGFYPPKPWPTFREDALEVVDKIFVSRAPDRKVTGAIHEDTIKSLRYDAQGRPYVVKRVRLGDLKLADLKNIVDAEVDENGVAHGRNATLYYLLKDRLDAHGGDAKKAFAEPVYMPKKGGGQGPLIRAVRLVTSDKSGFKVREGIASNGDMAYVKVYEKDGKFYLCPVYVKDVMTGREPDRLIVQGKIEEDWRQVDESYRFKFDLFKNDYVVLENHKEERIEGYYINTDRATGQIRLRIHDNSGKELRPGVQRMKSFEKYYVDVFGQRWKTS

SEQ ID NO: 7013 - protein, 1072 aa, synthetic construct
  REGION 1..1072: note = Synthetic
MNKMILGLDIGIGSVGWALIEEGKRIIGLGVRTFDVSEDPVTKATLNQVRADARRQRHQIKHKASRLKGLLNLLLKLELINDKNIILQNPLHKDIWELRAKALTEKITSDELALIIYHICNHRGFYWVSSCSTNNEDGLIKKALSSNEQIMLDKGYKTIGQMIFNEFPNHYRNKDGDYTKCISRVELDKELNTIFTCQKSLGNNDVTEELMTGVLGVGDRKSGFLWQQRPSIQGEQILKQVDRCRFEANEYRAPKANYFAMRHVWLTKLSRLKVVDADYKERSLTHYEFMSLKDIIFEIKNDITFKALENKLIKSYIWSKDQFHLKSAEFTSNLTKSVKFHAMDAWINIRKAFEKADLKDSWNYLLQDIKQGNVDKYNKIVFILTVFKDDAEIIERLGKLDLTQEEIVALSTLRFTKFASFSEKALAKFIPFMEEGLAYETASAKAGYNYSLISQEPIIKHKYLPSIYLENNGKIVKNSKILDLPDNPIVLKALNQTRKVINAVIKKYDSPDEIHIELARELSKTAEQRLEEDHKLNLLYKKNCKLKDEFVSKYGLHNFNVSNFEKFKLFKEQNGISTYTGAIIDEERLLEDFYVQVDHIIPYSKSFDNSFNNKAIVLSKENKDKGNRTALEYIYQENLNIESYKQRVLGNSNFSRLKISNLMLANFEREAATNFKARHLRDTAYICSFAKNFIESYLLLNANKSNSRCLVVPSNLTSLLRQHWGIKKNRLKNDRHHATDAAVIAGCSFSILNAIERISKKSDIGTLEDFSKDPQFTDEVISLSNVLKLPWKHFSNEVDFRVNEDNRQILIDRLSQLGTYDFNDLKRVKTLNVSRAPKRLKQGKAHGDTIYKIKSLENEEVVVRVPLKKLNLKKLECMVDKQRNINLYNVLKQRLIEFNDDGEKAFATPIYMPCKDPKNAPLIRKVSILQIKSGILVRGGIVSNGDIHRIDFFKKNDKYYAIPVYVNQKELPNKIAVKGKRQKDWLTLDNSYEFCLSVYKNDFLEVDTKDGLFRGYYAEFDRHRCSILLKSHDRDEKLEKRIAYMQVKSITKLHVDVLGNLYQADFMERQAI

SEQ ID NO: 7014 - protein, 1064 aa, synthetic construct
  REGION 1..1064: note = Synthetic
MPSPHGMSHSFCLRQATVPGFATRNDHVQTWMHVQPVFGTPSMPLPSAPLIFGLDLGTSSVGSAVLRLHEDDTPPTILRLGVRIFPSGRDPDSGEPLNAQRRRARLMRRQLRRKRHRRQDVTRILHEAGLLPAFGTADWHVLMTKADPYQLRARAPEDALPPHEAGRALYHLLKRSGFRSLRKPMSEDKEDEEGPIKKEILEHSQRLGKRTLGQYLVDLPKRRGLHLSHDMVLAEFDAIWQRQSEAAPSVFTDELRANLTTAAFARRPVFWRLDTYGSCRFVPGAPLCAKGSWQGQDYVLLQTVNSLRLFGGNERPLTPDERHRVIAMLRSQESATFGKLRSLLKLGRDVRFNLEAGGRDKLAGNAVGARLTKLLGKDWPDLAAAPDIRETLHDRLHAIHYRRVGNHRIELRGPDEQAHERAAFIDHATSTWRLPPDTAAALADLDLPAGWLRLSREAVGRLLPALETGLRYDEAVRQVFGIGHQEGPRSARRDRLDSDHRNLRNIRNPTVVRALNEMRKVVNNLIDAHGRPDVIRVELSRDLKLPPAERAEIDKRNRKRERERKAAETDLRTKGVAATPEAIDRWLLWKECKETCPYTGEKISFADLFHAGRFEVEHIIPRSRSLDDSLANKTLCERSANQRKGNRTPFEAFGPDANGGNAAVWEATTARVMSLLPVAKARKFLRTSAPEADDAFVERELRDTSYISRLARDRLKTLGDDVRVETTNGRVTGQLRRLWNLRAILPEPQAATSGRNARDKNRADHRHHAVDALVTALVTPAHVKRLSDHYRKERLHELHNLPLPWPDIRRDAGAKLARIVVSHRSNRKISGELHEAKRLGITDVVTRRSGIDYTDFVIRIPVADITAKNLDAVVDDGVRAALNRFLTAHGGSMPKVMPPYPTLPDGNALREIRRVRIRKPLRRELVVAVGHDGGISFVEAGKNHHLALYGHPDEPGVVIAVQLIEAARRLSRGEAIIRPWDDEGRPLVMSLCKGDMLMMPEPAPDGSPDIRVVTGFKANGQVVLQHHRDAIGTSATYPRFAILARKGAQKISVDPIGRIRPAGG

SEQ ID NO: 7015 - protein, 1097 aa, synthetic construct
  REGION 1..1097: note = Synthetic
MKKQPQRYILGLDLGIASVGWALILVDGAENPVGLLDCGVRTFERAEVPKTGDSLALARRQARSVRRLIRRRAHRLLRLRRLLKREGILSAADFNSDGLPNLPIDAWQLRVAGLERKLTNQEWAAVLLHLVKHRGYLSQRKSETQTENKELGRLLAGVAENSKLLSESSEQYRTPAELAVKLFAEQSGHLRNKGGEYTHTFNRLDLQKELHLLFERQYALGNPFASAELQSKVDELLMTQRSALQGEAVLKMLGKCTFEPSEYKAAKNTYSAERFIWLTKLNNLRILYNGEERALDEGDRKKLLDEPYKKAKLTYKQVRSILNLPESAVFKGLRYGKDSDGLKAENGTLMEMKAYHKIRTILDKAGLKGEWENRIRNPEILDKIGTAFSLYKTDEDIQAALADLRLPENVLDALLAGLNFDKFIQLSLKALRNILPLMERGIRYDEACKEVYGDHRALAESKNQVLLPPIPADEIRNPVVLRTLTQARKVINAIIRRYGSPQRVHIETARELGKSKQERDKIDRKNKENQNDRNRLASDIRKHFNFEPTPKDILKLRLYEQQHGKCLYSDLREEKGECLYTGNVIELHRLFEDGYVEIDHALPLSRTWDNSLNNKVLVLKSSNQNKGNKTPYEWLDGANNSRRWREFQARVQGCHFPYVKKQRIQTAKLDSKAEQGFLERNLNDTRYISKFMCQFITANLRLAETSNALMEEVAGENPYWKERKRQRVFAPSGSIIALLRGLWGLKKVREDNDRHHALDAIVVACSTVSMQQKITKAMQRRETLETVDSETGEVKTRIPQPWDFFRQEVMIRVFSDSPREELAEKLNSRPEALHDFVSPLFVSRAPNRKMTGQGHLETVKSAKRLSENISVVRKPLTALKLKDIENIVGYPDREPALYQALRERLLAHKDDPVKAFADKPFYKPAKDGGQGSLVKAVRIIENTKHGLKIRNGITDTNGDMVRTDVYQKTDKKGKRQYFIVPVYAWQVEKNELPTVDCKGYEIDDNYEFCFSLYKYDLIEIQNPNDINQELRAYYINCDSSDGRFWLAYHDKSAKEQQFRISTQNQPIIKKYQVDTLGKEIRLCKAEKRTALNGKKKK

SEQ ID NO: 7016 - protein, 1094 aa, synthetic construct
  REGION 1..1094: note = Synthetic
MIIARLKTMNYILGLDIGIASVGWAVIEIDEQEMPKRLIDVGVRVFEKAETAKEGESLNKVRREARSQRRIIRRRAHRLLRARRLLKREGVLQAEDFDEAGLVIGLPNMPWQLRVAALDRKLMPKEWAAVLLHMIKHRGYLSQRKNEEQKAASEGDKEAGALLKGVKANHNALKDKKFRTPAELAVKKFEQETGHIRNQRGDYSHTFNRKDLLAELDLLFEKQKEYGNPHVLDGLKKAVEDLLMVQRPALSGNAVQEMLGHCTFETAEYKAAKNTYTAERFVWLTKLNNLRILENGTERALTDSERSQLIDLPYQKSKLTYVQVRKKLELNETAYFKGLRYGKDNAENGILMEMKAYHAINRALEKEGLKDKTSPLVYSPELQDEIGTAFSLYKTDDDIRGRLNGLLPEAELNALLFHLNFEKFIQISLKALRKVLPLMEQGQRYDEACRSVYGDHYGQKEKREEMYLPPIPADQIRNPVVLRALSQARKIINAVVRRYGSPMRIHIETAREVGKSYKDRKDIEKRQEENRRDRERAVVEFKKRFPNFAGEPKAKDILKMRLYEQQHGQCLYSGKKIDLDRLNEKGYVEIDHALPFSRTWDDSFNNKVLVLGSENQNKRNQTPYEYFNGKENSREWRGFVARVQTCRFPYSKKQKILLQKIDEEGFRERNLNDTRYVNRFLCEFVADNMMLKGKGKRRVFASNGQITNLLRGFWGLHKVRSDNDRHHALDAVVVACSTAAMQQKITNYVRYREMNAFNGEIIDKSTGEVTRLSFPQPWDFFRQEVMIRVFGRPEGDPQFEIADTVEDLKALLADKLSSRPDAVHEYVTPLFVSRAPNRKMSGAHKDTLRSAKRFVLQNEKISVKREWLTDITFKDLENMVNYKNGREIELYKELKARLEEYGGNAKKAFDPKENPFYKKGGQQVKAIRIEKTQESGVLLNKKHAYTMADNGDIARVDIFSKTNKKSKKQYFVVPVYAWQVSEGILPNIDCKGYEIDDSYTFCFTLQSGDLIAVPNPIDGKEKIFAYYISCDSSNGRLILMLPDKSVCPDGYPKFKDGKQFRISSQNSSFIEKYTVDELGQEIRPCRLRKRPPVR

SEQ ID NO: 7017 - protein, 1083 aa, synthetic construct
  REGION 1..1083: note = Synthetic
MITARLKPMNYILGLDIGIASVGWAVIEIDEQEMPKRLIDVGVRVFEKAETAKEGESLNKVRREARSQRRIIRRRAHRLLRARRLLKREGVLQAEDFDEAGLVIGLPNMPWQLRVAALDRKLMPKEWAAVLLHMIKHRGYLSQRKNEEQKAASEGDKEAGALLKGVKANHNALKDKKFRTPAELAVKKFEQETGHIRNQRGDYSHTFNRKDLLAELDLLFEKQKEYGNSHVSDGLKKAVEDLLMVQRPALSGNAVQEMLGHCTFETAEYKAAKNTYTAERFVWLTKLNNLRILENGTERALTDSERSQLIDLPYQKSKLTYVQVRKKLELNETAYFKGLRYGKDNAENGILMEMKAYHAISRALEKEGLKDKTSPLVYSPELQDEIGTAFSLYKTDDDIRDRLNGLLPEAELNALLFHLNFEKFIQISLKALRKVLPLMEQGQRYDEACRSVYGDHYGQKEKREEMYLPPIPADQIRNPVVLRALSQARKIINAVVRRYGSPMRIHIETAREVGKSYKDRKDIEKRQEENRRDRERAVAEFKKRFPNFAGEPKAKDILKMRLYEQQHGQCLYSGKKIDLDRLNEKGYVEIDHALPFSRTWDDSFNNKVLVLGSENQNKGNQTPYEYFDGKENSREWRGFVARVQTCRFPYSKKQRILLQKIDEEGFRERNLNDTRYVNRFLCEFVADNMMLKGKGKRRVFASNGQITNLLRGFWGLHKVRSDNDRHHALDAVVVACSTAAMQQKITNYVRYREMNAFNGEMIDKTTGEVTRLSFPQPWDFFRQEVMIRVFGRPEGDPQFEIADTAEDLKALLADKLSSRPDAVHEYVTPLFVSRAPNRKMSGQGHLETIKSSKRLAEGISVLRVPLMQLKLSDLERMVNRDREPKVYEALKARLENYGNDPAKAFAEPFYKLDKNGLPTQQVKAVRVEQVQKSGVLVREENGVADNATMVRVDVFEKGGKYFLVPIYSWQVAKGILPDRAIVALKDESEWEKVDDSFTYQFTLYANDLIKIGLKKGTFFGYYIGLDRTTGAIAIREHDLDKSKGKDGIYRIGVKTALSFQKLQVDELGKDITPCRPKKRPPVR

SEQ ID NO: 7018 - protein, 1078 aa, synthetic construct
  REGION 1..1078: note = Synthetic
MKQQPQRYILGLDLGIASVGWALILVDEEGNPIGLLDCGVRTFERAEVPKTGDSLALARRQARSVRRLIRRRAHRLLRLRRLLKREGVLSAADFNSDGLPNLPIDTWQLRVAGLERKLTNQEWAAVLLHLVKHRGYLSQRKSETQTENKELGCLLASVAKNSKLLSENANQYRTPAELAVRLFAEQSGHLRNKGGDYTHTFNRLDLQKELHLLFEQQRTFGNPFASAELQSKVDGLLMMQRSALQGEAVLKMLGKCTFEPSEYKAAKHTYSAERFIWLTKLNNLRILENGTERALNEAERKLLLDEPYKKAKLTYSQARKLLDMSHDATFKGLRYGKDSEGLNAENGALMEMKAYHKIRTVLDKAGLKGEWENRIRNPEILDKIGTAFSLYKTDEDIQAALADLRLPENVLNALLAGLNFDKFIQLSLKALSNIMPLMERGIRYDEACKEVYGDHRALAESKNQMLLPPIPANEIRNPVVLRTLTQTRKVINAIIRRYGSPQRVHIETARELGKSFKDRKEIEKRQEENRKERERAAEHFKELFPHFAGEPKGGDILKLRLYEQQQGKCLYSSIPIDLGRLNEKGYVEIDHALPFSRTWDDSFNNKVLVLGSENQKKRNQTPYEYLDGASNSQRWREFQARLQGCRFSYAKKQRIQTAKLDSKTEQGFLERNLNDTRYIARFLCGFIEENLHLQGEGKRRVFASNGQITALLRGLWGLKKVREENDRHHALDAIVVACSTVSMQQKITKAMQRRETLETVDTETGEVKTRIPQPWDFFRQEVMMRVFSDTPHEELAEKLSGRPEALHDFVSPLFVSRAPNRKMTGQGHLETVKSAKRLSENISVVRKPLTALKLKDIENIVGYPDREPALYQALRERLQAYKDDPVKAFAEPFYKPAKNGGQGSLVKAVRVKDVQKTGVMVRKDRGGIARGIADNATMVRVDVFGKKGKNYLVPVYAWQVAKGILPNRAVVAYADEADWDEMDDSYEFKFTLYPNDLVEIISKKGRIFGYYSGLNRATGAIDIKEHDLSKEKAKNGIHQSVGVKTVLSFQKYQVDPLGKEICLCKVEKHPELNSKKKK

SEQ ID NO: 7019 - protein, 1071 aa, synthetic construct
  REGION 1..1071: note = Synthetic
MAQQNYILGLDLGIASVGWACVWIDENEHTIGLLDCGVRTFERAEVPKTGDSLAKARREARSVRRLIRRRAHRLLRLRRLLKREGILKAADFGANRLPENLPIDAWALRVAGLDKKLAAKEWAAVLLHLVKHRGYLSQRKSELQEDGKSELGRLLAGVAQNHELLQADEYRTPAELAVKYFAVQSGHLRNKGGDYSHTFNRLDLQKELHLLFEKQREFGNPFASADLEAKVDALLMTQRSALQGEAVLKMLGKCRFESSEYKAAKNTYSAERFIWLTKLNNLRIMDGGEERALADDERRLLLDEPYQKSKLTYAQVRKILALPESAVFKGLRYGSDAESAKKAESGALMEMKAYHKIRTVLEKAGLKAAWNNRIRNPELLDRIGTAFSVYKTDEDIQTALADLGLPENVLDALLKGLSFDKFIELSLLALHKILPQMEKGLRYDEACKAAYGDHRAIKENQNKRLLPPIPADVIRNPVVLRTLTQVRKVVNAIIRRYGSPARVHIETARELGKSFKDRKEIEKKQEENRKERERAVERFKELFPHFAGEPKGQDILKLRLYRQQHGKCLYSGNEIDLSRLNEKGYVEIDHALPFSRTWDDSLNNKVLVLGSENQKKRNQTPYEYLDGASNSRVWREFQARLAGCDFPYGKKQRIQTAKLDTKAEQGFLERNLNDTRYIARFLCGFVEENLYLSGKGKRRVFASNGSITALLRGLWGLQKVREENDRHHALDAIVVACSTVSMQQKITKAIQGREILETVDTATGEVKTRIPQPWEFFRQEVMIRVFSDNPHEELAEKLSSRPEAVHEFVKPLFVSRAPNRKMTGQGHLETVRSAKRLDEGVSVVKKPLTALKLKDIEKIVGYPDREPALYDALRQRLQAFKDEPAKAFAEPFYKPAKDGRQSALVKAVRVEDVQKSGVMVRDGKGIADNATMVRVDVFTKGGKNYLVPIYAWQVAKGILPNRAVVARANESDWDEMDESFEFKFSLYPNDLVEVVSKKGRIFGYFASCHRGTGNINIRIHDLDSKVGKDGMLEGVGVKTAISFKKYQVDPLGKEIRLCKAEKRPELKNKKS

SEQ ID NO: 7020 - protein, 1069 aa, synthetic construct
  REGION 1..1069: note = Synthetic
MKKQPQRYILGLDLGIASVGWALILVDGAENPVGLLDCGVRTFERAEVPKTGDSLALARRQARSVRRLIRRRAHRLLRLRRLLKREGILSAADFNSDGLPNLPIDAWQLRVAGLERKLTNQEWAAVLLHLVKHRGYLSQRKSETQTENKELGRLLAGVAENSKLLSESSEQYRTPAELAVKLFAEQSGRLRNKGGDYTHTFNRLDLQKELHLLFERQCALGNPFASAELQSKVDELLMTQRSALQGEAVLKMLGKCTFEPSEYKAAKNTYSAERFIWLTKLNNLRILYNGEDRALDEGERKQLLDEPYKKAKLTYKQVRSILNLPESAVFKGLRYGKDSDGLKAENGALMEMKAYHKIRTVLEKAGLKGEWENRIRNPEILDQIGTAFSVYKTDEDIKAELAALRLPENVLDALLAGLNFDKFIQLSLKALSNILPLMERGIRYDEACKEVYGDHRALAESKNQMLLPQIPANEIRNPVVLRTLTQARKVINAIIRRYGSPQRVHIETARELGKSFKDRKEIEKRQEENRKERERAAEHFKELFPRFTGEPKSGDILKLRLYQQQQGKCLYSGIPIDLGRLNEKGYVEIDHALPFSRTWDDSFNNKVLVLGSENQKKRNQTPYEYLDGARDSQRWREFQARVQGCRFPYAKKQRIQTAKLDSKTEQGFLERNLNDTRYIARFLCGFIEKSLHLQGAGKRRVFASNGQITALLRGLWGLKKVREDNDRHHALDAIVVACSTVSMQQKITKAMQRRETLETINTETGEVKTRIPQPWDFFRQEVMIRVFSDAPREELAEKLNSRPEALHDFVSPLFVSRAPNRKMTGQGHLETVKSAKRLSENISVVKKPLTALKLKDIENIVGYPDREPALYRALQERLQAYKDDPAKAFAEPFYKPAKDGGQGSLVKAVRIIENTKHGLKVRNGITDTNGDMVRADVYQKADKKGKRQYFIVPVYAWQVEKNELPTVDCKGYEIDDTYEFCFSLYKYDIIEIQNPDNMSKELRVYYINCDSSDGRFWLAHHDKSAKEQQFRISTQNQPIIKKYQVDPLGKEIRLCKAEKRTELNGKKKK

SEQ ID NO: 7021 - protein, 1063 aa, synthetic construct
  REGION 1..1063: note = Synthetic
MEKFHYVLGLDLGIASVGWAAIEIDKETETSIGLLDCGVRTFERAEVPKTGDSLAKARREARSTRRLIRRRSHRLLRLKRLLKREIFRQPETFKDLPINAWQLRVKGLDSRLNEYEWAAVLLHLVKHRGYLSQRKSEMSETDSKSEMGRLLAGVAENHQLLQQEQYRTPAELALKKFVKHFRNKGGDYAHTFNRLDLQAELHLLFQKQRELGNPFTSPELERQVDDLLMTQRSALQGDAILKMLGHCGFEPEQFKAAKNTFSAERFIWLTKLNNLRIQDQGKERALTADERTKLLDEPYKKSKLTYAQVRKLLSLPQTAIFKGLRYDLEHDKKAENSTLMEMKSYHNIRQTLEKSGLKTEWQSIATQPEILDAIGTAFSIYKTDEDISHELKTCRLPENVLNELLKNINFDGFIQLSLTALRKILPLMEQGYRYDEACTQIYGNHHSGSLQQESKQFLPHIPIDDVRNPVVFRTLTQARKVVNAIIRRYGSPARVHIEMARELGKSKSDRDRIEKQQQKNKKERENAVAKFKEDFPDFVGEPRGKDILKMRLYEQQHGKCLYSGHDIDINRLNEKGYVEIDHALPFSRTWDDSQNNKVLVLGSENQNKRNQTPDEYLDGANNSQRWLEFQARVQTCHFSYGKKQRIQLAKLDDETEKGFLERNLNDTRYIARFMCQFVQENLYLTGKGKRLVFASNGGMTATLRNLWGLRKVREDNDRHHALDAIVVACSTASMQQKITKAFQRHESIEYVDTETGEVKFRIPQPWDFFRQEVMIRVFSDQPCEDLVEKLSARPEALHDNVTPLFVSRAPNRKMSGQGHLETIKSAKRLSEENSMVKKPLTTLKLKDIPEIVGYPSREPQLYAALKTRLETHDDDPIKAFAKPFYKPNKNGELGALVRSVRVKGVQNTGVMVHDGKGIADNATMVRVDVYTKAGKNYLVPVYVWQVAQGILPNRAVTSGKSEADWDLIDESFEFKFSLSRGDLVEMISNKGRIFGYYNGLDRANGSIGIREHDLEKSKGKDGVHRVGVKTATAFNKYHVDPLGKEIHRCSSEPRPTLKIKSKK

SEQ ID NO: 7022 - protein, 1055 aa, synthetic construct
  REGION 1..1055: note = Synthetic
MQNNPLNYILGLDLGIASIGWAVVEIDEESSPIRLIDVGVRTFERAEVAKTGESLALSRRLARSSRRLIKRRAERLKKAKRLLKAEKVLHSIDEKLPINVWQLRVKGLEEKLERQEWAAVLLHLLKHRGYLSQRKNESKSDNKELGALLSGIASNHQMLQSSEYRTPAEIAVKKFQVEEGHIRNQRGSYTHTFSRLDLLAEMELLFQRQAELGNSYTSTTLLENLTALLMWQKPALAGDAILKMLGKCTFEPTEYKAAKSSYSAERFVWLTKLNNLRILENGTERALNDNERFALLEQPYEKSKLTYAQVRAMLALGDNTIFKGVRYLDEDKKTVESKTTLMEMKFYHQIRKALESAELKKEWNELKGNTALLDEIGTAFSLYKTDDDICRYLEGKLSKNVLNALLENLNFDKFIQLSLKALQQILPLMLQGQRYDEAVSAIYDDHYGKKSVEINRLLPTIPAGEIRNPVVLRTLTQARKVINAVVRLYGSPARIHIETAREVGKSYQDRKKLEKQQEDNRKQRESAVEKFKEMFPHFVGEPKGKDILKMRLYELQQAKCLYSGKPLELHRLLEKGYVEVDHALPFSRTWDDSFNNKVLVLANENQNKGNLTPYEWLDGKNNNERWQHFVVRVQTSGFSYTKKQRILNHKLDEKGFIERNLNDTRYVARFLCNFIADNMLLVGKGKRNVFASNGQITALLRHRWGLQKVREQNDRHHALDAVVVACSTVAMQQKITRFVRYNEGNVFSGERIDRETGEIIPLHFPSPWAFFKENVEIRIFSENPKLELENRLPDYPQYHHEFVQPLFVSRMPTRKMTGQGHLETVKSAKRLNEGLSVLKVPLTQLKLSDLERMVNRDRESALFEGLKTRLEQFDNDPVKAFAEPFYKKGGTLVKSVRVEQTQKSGVLVRDGNGVADNASMVRVDVFTKGGKYFLVPIYTWQVAKGILPNRAATQGKDENDWDIMDEMATFQFSLCQNDLIKLVTKKKTIFGYFNGLNRATSNINIKEHDLDKSKGKLGIYLEVGVKLAISLEKYQVDELGKNIRPCRPTKRQHVR

SEQ ID NO: 7023 - protein, 1053 aa, synthetic construct
  REGION 1..1053: note = Synthetic
MENSQLNYILGLDIGIASVGWAVVEIDKEENPIGLIDVGVRTFEKAEVAKTGESLALARRLARSTRRLIRRRAFRLLKAKRLLKKYEILTQDDFISSKEIKGLPHNPWELRVKGLTQKLSQKEWAAVLLHLLKHRGYLSQRKNESKTDNKELGALKKCIDQNHLLLQDKAYRTPAELALKYYYKKDKHIRNQRGAYTHTFNRLDLLAELELLFETQRNLGNRYTSKELQLEFSELLIWQKPALLGEAILKMLGKCTFETAEYKAAKNTYSAEYFVWLTKLNNLRILENGSDRGVSEEERVVLLKQPFEKAKLTYTQVRKLLGLSENAIFKGLNYRKENAENTTLMEMKSWHSIRKALESNGLKTDWEGLKTQPELLDKIGTAFSIYKTDKDISHYLQNDISKDILNVLLENINFDKFIHLSLKALYKILPLMEKGYRYDEACKQIYGDHYGQKEQQLENIRNPVVLRSLSQVRKVVNAIVRLYGSPCRVHIETGREVGKSYEDRCEIKKRQLDNQADKQRAVKKFKEWFPNFVGEPKSQDILKMRLYEQQHGKCLYSGKPIKHLDRLLEKGYVEIDHALPFSRTWDNSFNNKVLVLAAENQNKGNKTPYEFFNGKENSKTWKNFTALVLGSGFSYAKKQKILTQKLDEKGFRERNLNDTRYIASFLCNFIENNTHLIGQGKKRVFASNGSITAFLRHCWGIHKERVANDRHHAIDAIVVACSTVSMQQKITNFVRYKEMNLSKGEIIDKETGEIQQVYFPEPWQFFRKEVEIRVFSDNPQEDLVIQLPDRPQANHQFVQPLFVSRAPTRKMSGQGHKDTVKSAKRIAENISVIRVPLTQLKLEELECMVNREREPELHEALKTRLEAFNNDPAKAFDPKERPFYKKGGQQVKAVRVEKLQKTGVLVYNKTGVADNGAMVRVDVFIKKGKYFLVPVYAWQVAKGILPNRAVVKNKDESDWEIMDETAIFQFSMYPNDLVEVKTKKGVVKGYYVSMGRANGTINIREHDLDKTKGKEGIHQSIGVKLAISFKKYQIDVLGKNIFLCKTSKYRSIN

SEQ ID NO: 7024 - protein, 639 aa, synthetic construct
  REGION 1..639: note = Synthetic
LSLKALQQILPLMLQGQRYDEAVSAIYGDHYGKKSVEINRLLPTIPAGEICNPVVLRTLTQARKVINAVVRLYGSPARIYIETAREVGKSYQDRKKLEKQQEDNRKQRESAVEKFKEMFPHFVGEPKSKDILKMRLYELQQAKCLYSGKSLELHRLLEKGYVEVDHALPFSRTWDDSFNNKVLVLANENQNKGNLTPYEWLDGKNNSERWQHFVVRVQTSGFPYAKKQRILNHKLDEKGFIERNLNDTRYVARFLCNFIADNMLLVGKGKRNVFASNGQITALLRHRWGLQKVREQNDRHHALDAVVVACSTVAMQQKITRFVRYNEGNVFSGERIDRETGEIIPLHFPSPWDFFKENVEIRIFSENPKLELENRLPDYPQYNHEWVQPLFVSRMPTRKMTGQGHMETVKSAKRLNEGLSVLKVPLTQLKLSDLERMVNRDREIALYESLKARLEQFGNDPAKAFAEPFYKKGGALVKAVRLEQTQKSGVLVRDGNGVADNASMVRVDVFTKGGKYFLVPIYTWQVAKGILPNRAATQGKDENDWDIMDEMATFQFSLCQNDLIKLVTKKKTIFGYFNGLNRATSNINIKEHDLDKSKGKLGIYLEVGVKLAISLEKYQVDELGKNIRPCRPTKRQHVR

SEQ ID NO: 7025 - protein, 516 aa, synthetic construct
  REGION 1..516: note = Synthetic
LYSGKEINLGRLNEKGYVEIDHALPFSRTWDDSFNNKVLVLGSENQNKGNQTPYEYFNGKDNSREWQEFKARVETSRFPRSKKQRILLQKFDEDGFKERNLNDTRYVNRFLCQFVADRMRLTGKGKKRVFASNGQITNLLRGFWGLRKVRAENDRHHALDAVVVACSTVAMQQKITRFVRYKEMNAFDGKTIDKETGEVLHQKTHFPQPWEFFAQEVMIRVFGKPDGKPEFEEADTLEKLRTLLAEKLSSRPEAVHEYVTPLFVSRAPNRKMSGQGHMETVKSAKRLDEGVSVLRVPLTQLKLKDLEKMVNREREPKLYEALKARLEAHKDDPAKAFAEPFYKYDKAGNRTQQVKAVRVEQVQKTGVWVRNHNGIADNATMVRVDVFEKGDKYYLVPIYSWQVAKGILPDRAVVQGKDEEDWQLIDDSFNFKFSLHPNDLVEVITKKARMFGYFASCHRGTGNINIRIHDLDHKIGKNGILEGIGVKTALSFQKYQIDELGKEIRPCRLKKRPPVR

SEQ ID NO: 7026 - protein, 506 aa, synthetic construct
  REGION 1..506: note = Synthetic
MRLYKQQNAKCLYSGKPIELHRLLEKGYVEVDHALPFSRTWDDSFNNKVLVLANENQNKGNLTPFEWLDGKHNSERWRAFKALIETSAFPYAKKQRILSQKLDEKGFIERNLNDTRYVARFLCNFIADNMHLTGEGKRKVFASNGQITALLRSRWGLAKSREDNDRHHALDAVVVACSTVAMQQKITRFVRFEAGDVFTGERIDRETGEIIPLHFPTPWQFFKQEVEIRIFSDNPKLELENRLPDRPQANHAFVQPLFVSRMPTRKMTGQGHMETVKSAKRLNEGISMIKMPLTKLKLKDLELMVNREREKDLYDTLKARLEAFNDDPAKAFAEPFMKKGGAIVKSVRVEQVQKSGVLVREGNGIADNASMVRVDVFTKDGKYFLVPIYTWQVAKGILPNKAIVALKDENEWIEIDNNHIFLFSLYQNDLIKVKTKKDELFGYFNSLNRATAAIDIKVHDLDKSKGKNGIYQSVGVKLALSFEKYQIDELGKNIRLCKPSKRQPVR

SEQ ID NO: 7027 - protein, 806 aa, synthetic construct
  REGION 1..806: note = Synthetic
LRITDEFGTRKLTEIERQILIDLPYKLKTVNYQQVRNALTTLSPNALFNIRYHQKDKKGEIKSSDKIEKDTKFIEMKFWHKIKETLEGNGRKTEWQSLSSNHNLLDEIGTVFTICKNDERRKALLSGKIKEDQDILNILCNHVDFTCTVNLSLEALKNILPFMEQGDDYDTAWRKVYPPQSTKKESVLPPIPADEIRNPVVLRALSQARKVINGVVRRYGPPARIHIETAREVGKSFKDRKEIEKRQEENRKDREKAAAKFREYFPNFVGEPKSKDILKLRLYEQQHGKCLYSGKEINLGRLNEKGYVEIDHALPFSRTWDDSFNNKVLVLGSENQNKGNQTPYEYFNGKDNNREWQEFKARVETSRFPRSKKQRILLQKFDEDGFKERNLNDTRYVNRFLCQFVADHMLLTGKGKRRVFASNGQITNLLRGFWGLRKVRAENDRHHALDAVVVACSTVAMQQKITRFVRYKEMNAFDGKTIDKETGEVLHQKAHFPQPWEFFAQEVMIRVFGKPDGKSEFEEADTPEKLRTLLAEKLSSRPEAVHEYVTPLFVSRAPNRKMSGQGHMETVKSAKRLDEGISVLRVPLTQLKLKDLEKMVNREREPKLCEGLKARLEAHKDDPTKAFAEPFYKYDKAGNRTQQVKAVRVEQVQKTGVWVRNHNGIADNATMVRVDVFEKGGKYYLVPIYSWQVAKGILPDRAVVAYADEEDWTVIDESFRFKFVLYSNDLIKVTAKKNVFFGYFVSLNRATGAIDIRVHDTDNTKGKNGIFQSVGVKTALSFQKYQIDELGKEIRPCRLKQRPPVR

SEQ ID NO: 7028 - protein, 500 aa, synthetic construct
  REGION 1..500: note = Synthetic
MSKSTMPCRSRAHGTTVSTIKYWYWAAKTKTKAIKPLTNTSTAKTTAANGRNLKRVSKPAVSRAVKNKRILLQKFDEDGFKERNLNDTRYVNRFLCQFVADRMRLTGKGKKRVFASNGQITNLLRGFWGLRKVRAENDRHHALDAVVVACSTVAMQQKITRFVRYKEMNAFDGKTIDKETGEVLHQKTHFPQPWEFFAQEVMIRVFGKPDGKPEFEEADTPEKLRTLLAEKLSSRPEAVHEYVTPLFVSRAPNRKMSGQGHMETVKSAKRLDEGVSVLRVPLTQLKLKDLEKMVNREREPKLYEALKARLEAHKDDPAKAFAEPFYKYDKAGNRTQQVKAVRVEQVQKTGVWVRNHNGIADNATMVRVDVFEKGDKYYLVPIYSWQVAKGILPDRAVVQGKDEEDWQLIDDSFNFKFSLHPNDLVEVITKKARMFGYFASCHRGTGNINIRIHDLDHKIGKNGILEGIGVKTALSFQKYQIDELGEEIRPCRLKKRPPVR

SEQ ID NO: 7029 - protein, 1063 aa, synthetic construct
  REGION 1..1063: note = Synthetic
MAITELKYILGLDLGIASVGWAVVEIDPQENPISLIDLGVRTFEKAEVPKTGESLNLSRRLARSQRRLIRRRAHRLLRMKRLLKREGVLQAVDCGKDFANLRLPNNVWSLRVAGLDRCLDNKEWAAVLLHLVKHRGYLSQRKNENKTDDKELGALLSGVNANHQLLLAKTYRSPAEIAEQKFASEKGHIRNKAGDYAHTFNRLDLQAEMRLLFEKQAKLGNPYTSASFQAQCIDLLMTQRAPLSGEAILNMLGHCTFEPTEYKAAKNTYSAERFIWLTKLNNLRILESGSERPLLDAERQQLLNQPYLKAKLTYTQVRKILDLSEQARFNIRYQRDKTLEESEKATLMEMKSYHAIRKALEGAGLKTEWQGLATKPDLLDRIGTAFSLYKTDNDISTYLSDKISQPILNALLENINFDKFINLSLQSLRRILSLMEQGERYDTACKTIYGDHYGAKSAELQLTLPAIPADEIRNPVVLRTLSQTRKIINAVVRRYGSPAYIHIETGREVGKSFKDRREIEKRQEQNQAERQRAVEKFKELFPHFVSEPKGKDILKMRLYEQQQGKCLYSGKAIDITRLNEKGYVEVDHALPFSRTWDDSFNNKVLVLAIENQNKGNQTPYEWLDGKHNSLRWQTFNALVRGCHFPYAKKQRILTAALDEESFKARNLNDTRYVARFLSQFITENMQLTGEKKRQVFTSNGQITALLRARWGLSKVREENDRHHALDAIVVACTTRAMQKRITDFVRQKEMNAFSGEYVDRATGEIKALHFPEPWTFFHREVMIRVFDDHPAEEVIIQLPSRPQANHSFVTPLFVSRMPTRKMTGQGHLETIKSAKRLTENLSIQKVRLNSLKLSDLENMVNRERETELYQALKARLEAFNNDPQKAFAEPFYKKGGQQVKAIRVERTQKSGVIVRNGNGIADNASMVRVDVFIKNGKYFLVPIYTWQVAQGILPNKAVIAYEEEANWEEMDENAHFQFSLYANDLIKLTTKKGVFFGYYSAFNRATGAIDIKVHDLDKKAEKTKNGVYQGLGVKLAISFEKFQVDELGKVIRACKPSKRQPVR

SEQ ID NO: 7030 - protein, 672 aa, synthetic construct
  REGION 1..672: note = Synthetic
MITTKLKPMNYILGLDIGIASVGWAVIEIDEQEIPKCLIDVGVRVFEKAETAKEGESLNKVRREARSQRRIIRRRAHRLLRARRLLKREGILQAVDFDEKGLVNGLPNTPWQLRVAALDRKLVPKEWAAVLLHMIKHRGYLSQRKNEEQSADKELGALLSGVKANHEALKDDKFRTPAELAVRKFEQETGHIRNQCGDYSHTFNRKDLLDELDLLFKKQKEYGNSYVSDGLKKAVEDLLMVQRPALSGNAVQEMLGHCTFETSEYKAAKNTYTAERFVWLNKLNNLRILEEGTERALTDSERSQLIDLPYQKSKLTYAQVRNGLELNDAAYFKGLRYGKDNAENGILMEMKAYHTISRALEKEGLKDKKSPLAYSPELQDEIGTVFSLYKTDEDIRGRLKALLPEAELNALLLHLNFEKFIQISLKALRKILPLMEQGQRYDEACHSVYGDHYGRKEKREEIYLPPIPADQIRNLVVLRALSQARKIINAVVRRYGSPMRIHIETAREVGKSYKDRKDIEKRQEENRRDREKAVAKFKEYFPNFAGEPKSKDILKMRLYEQQHGQCLYSGEKIDLGRLNEKGYVEIDHALPFSRTWDDSFNNKVLVLGSENQNKRNQTPYEYFNGRKTAVNGGNLSRAYKPAVSHTAKNKEFCCKKSMKETSENVTLTIPAM

SEQ ID NO: 7031 - protein, 1049 aa, synthetic construct
  REGION 1..1049: note = Synthetic
VKYSIGLDIGVASVGWCLINNDKKRIEDLGVRVFTAAEQPKTGSSLAEPRRLKRGLRRRLKRTRQRMAGVKALFVKYGLIEAESLEQIYVPHGGWLSPWQLRFESLERKLSGEEFARVLTQLCKRRGYKSMRLDEGTDDDEGKVKGSISDNRALMEQKGYRTAGEMFWKDEKFSKSKRNHEDYNNVVSREMLLDEIKILFEKQRLLGNGYAQKRFEKEFTDLFIWQKPVDEGEKLIEKVGACELIPAEKRAPSRCWTAEKFTILQKINNIMIYDAGEKLPLTAEQREAVYEKCLSRQSPVTYADIRKLLGLEEHARFNMVRYDKDDLSAESKDKLPQLTGYHALKKAINNADEKYWDDIAADEDKLNSIAYALTYWKSKEGVLQQLQLLGLPENIIEALKEIRFDKQKHLSIKAMQLINPYLEQGLDYSAACQAAGMHHSVKARKEKQKKLPPIPAEEIRNPVVIRALSQTRKVINAIIDRYGSPEDITIELARDISKNFKDRKDIERNQGKNREKNDAAKNQMLSEFGINASGNDIRKYRLWLEQESRCIYSGKYIDPRRMLVEKGYADIEHIIPYSKSFNSSYMNEALALAEENHKKGNRIPYEYFGHDEARWNEFSEKVNSLNIPYSKKRNLLIKSFDSRAEEAMKERHLNDTRYISRFITNFIKENLITTGEGKDNVTTINGQATAYLRARWGLNKDRKESDRHHAMDAAVAAVATRSMLQRIARFLSWKSFYYDEDNEKYIDKETGEMYNPKKIPEPWDRFARELEARISDSPREYIEQNDLPGYRNEDLGFVRPIFVSRSPRKKISGSAHAETIRKLKGNDEIGRILTTKRVRLEELNLTKLEKMSGKDTDPQLYRLLKNRLDQYNDNPKKAFAEPVYKLLKDGSPGPDVKKIQVDDDPASGGVLVNGGLADNGSMTRIDIFLKDKKYYIVPVYVAQTVYRELPDKAITAHKPESEWIQMDDTFEFEFSLYPGDLLKIEDKKKTLFGYYTGCNRATGSIDLDAHDRSTKFVSIGIRNASKITKYCVDPLGYITPVSKEKRHGF

SEQ ID NO: 7032 - protein, 1132 aa, synthetic construct
  REGION 1..1132: note = Synthetic
MNMSYVLGLDLGIASVGWSIVEPGKRIIDLGVRVFKKAETDKEGDPLNLIRRESRLSRRRLYRRAHRLNRLLNFLISSGLIHSKDEVLKNVYNENPWALRTLGLNSVLTNNQLARVIYHICKHRGFYWASSADDGQADNGKIKKSLSSNQLIMKEKGYKTVGQMIFTEYPNCQRNKSGEYSKSLPRTDLDKELRAIFKAQQSFSNPIVTKDFINAIVGIGDRKTGFLWEQRPALQGEDLLKMVGHCRFEKDELRAPAANFYSEQLVWLTKINNLRVYDEDSQERPLTREERNLILNMPLEMKSDIKYSSLTSAFEKASLWKAGQFKYKSVDYEQKTQKKKKTAKSADITKSSKKNPEDKVFYKSSHLHEIRKALGSSLSEEWEKIRTEVLSGKYDRYNRIAYVLTVYKEDSDVIEQLSPYESRTLIEALLPVRFNGFVSLSEKSLKKIIPYMVLGKRYDEACSEAGYKHYKQNQAKVKKSKYLPSLFSGREPNGTLIFNEEIGDIPRNPVVLRVINQTRKVVNAIVKKYGSPESVHIELARDLAKSRAERNEIEKRNEDAASRRIKEREEFKKHYGAEKTNGTNLLKYRLYKEQDCKSMYSCKTIDINRLFEEGYVQIDHILPYSRSYDDSQSNKVLVLTKENQDKGNRIPYEYFESKQTDISWYEFEQWVKSCKNLNQKKKRNLLRNSLSKDAKKDFLERNLNDTRYACRFMKNYIDRFLCLSENSDKSGCVVVAGQLTANLRNCWGLNKVREENDRHHALDATVIACCTRKIVQKVGAWSKAREVEFNNSSYDDPDLPIDENELLLLNTFKNVKEPKFTEPWHCFREEVEARVFECDLEKLKKELKQQCSYTESDLKNVRTLFVSRACEKIGKGALHKDTVYRQTSEMRKENLAIKKVSLKKLKYAKISSIVDADTRNKNLCDALRKRYEEYSSTTGKDVSKIEEKDLAKIFSDDKPMHMPNSEGQEDPCNPIVKSVRVKDACSGVPIRNGVAENDNIMRVDIFKKRGKYYCIPIYAWNKTLPNKACVARKNESDWVEIDDSYEWCFSVRTNDLIRIDGKKESFFGYFNGFHRSVASFSILFHDRQISKKYKKGEKEGIGVKTAYSLTKYNVDVLGYYYLAKPEKRLELA

SEQ ID NO: 7033 - protein, 1131 aa, synthetic construct
  REGION 1..1131: note = Synthetic
MNMSYVLGLDLGIASVGWSIVEPGNRIIDLGVRVFKKAETDKEGDPLNLTRRESRLSRRRLYRRAHRLSRLLNFLISSGLIHSKDEVLKNVYNENPWALRTLGLNSVLTNNQLARVIYHICKHRGFYWASSADDGQADNGKIKKSLSSNQLVMKEKGYKTVGQMIFTEYPNCQRNKSGEYSKSLPRTDLDKELRAIFKAQQSFSNPIVTKDFINAIVGCGDRKSGFLWEQRPALQGEDLLKMVGHCRFEKDELRALAANFYSEQLVWLTKINNLRVYDEDSQERPLTREERDLILNMPLEMKSDIKYSSLTSAFEKANLWKSGQFKYKSVDYEQKTQKKKNTAKSVDITKSSKKNPEDKVFYKSSHLHEIRKALGSSLSEEWEKIRTEVLSGKYDRYNRIAYVLTVYKEDSDVIEQLSPYESRTLIEALLPVRFSGFVALSEKSLKKIIPHMVLGKRYDEACSEANYKHYKQNQAEFKKLKYLPPLFSGREPNGTLIFNEEIGDIPRNPVVLRVINQTRKVVNAIVKKYGSPKSVHIELARDLAKSRAERNEIEKRNEEAASRHIKERDEFEKLFGSKCLNGTNLLKYRLYKEQDCKSMYSGKEIDHKRLFEKGYVQIDHILPYSRSYDDSQSNKVLVLTNENQDKGNRIPFEYFEAKQHGFSWYEFEQWVKSCKNLNQKKKRNLLRCSLSKDAKKDFLERNLNDTRYACRFVKNYIDSFLCLSENSDNSGCVVVAGQLTAYLRNCWGLNKVREENDRHHALDATVIACCTRKIVQKVGAWSKSREMNSYNSSYVDPDSPVDEDEKLLQKLYVNTRKPDFPKPWECFRSEVESRVFESALEKLKEKLKLQCSYTESELKNVRTLFVSRACEKIGKGALHGDTVYRQTSEMRKENVAVKKVSLKKLKYARIGAIVDADTRNKNLCDALKKRYEEYARKIGKKIEDFVDKDIAKIFADDNPLHMPNSDGQEDPCNPIVKSVRVKEAFSGVPIRNGVAGNSTIIRVDLFKKDGKYYCIPVYAWNKTLPNRAYVSGKKETDWALVDDSFEWCFSIRQNELLKIKLKGETIFGYYNGFDRDRGSFNILLHDRQDGKDHKQGLIRKGIKTAISITKYDVDVLGNYYLSKPEKRLELA

SEQ ID NO: 7034 - protein, 1130 aa, synthetic construct
  REGION 1..1130: note = Synthetic
MSYVLGLDLGIASVGWSIVEPGNRIIDLGVRVFKKAETDKEGDPLNLIRRESRLSRRRLYRRAHRLSRLLNFLISSGLIHSKDEVLKNVYNENPWALRTLGLNSVLTNNQLARVIYHICKHRGFYWASSADDGQADNGKIKKSLSSNQLVMKEKGYKTVGQMIFTEYPNCQRNKSGEYSKSLPRTDLDKELRAIFKAQQSFSNPIVTKDFINAIVGCGDRKTGFLWEQKPALQGEDLLKMVGHCRFEKDELRAPAANFYSEQLVWLTKINNLRVYDEDSQERPLTREERDLILNMPLEMKSDIKYSSLTSAFEKANLWKSGQFKYKSVDYEQKTQKKKNSAKSVDITKSSKKNPEDKVFYKSSHLHEIRKALGNSLSEEWEKIRTEVLSGKYDRYNRIAYVLTVYKEDSDVIKQLSPYESRTLIEALLPVRFSGFVALSEKSLKKIIPHMVLGKRYDEACSEANYKHYKQNQAESKKLKYLPSLFSGREPNGTLIFNEEIGDIPRNPVVLRVINQTRKVVNAIVKKYGSPKSVHIELARDLAKSRAERNEIEKRNEEAASRRIKERDEFEKLFGSKCLNGTNLLKYRLYKEQDCKSMYSGKEINHKRLFEKGYVQIDHILPYSRSYDDSQSNKVLVLTNENQDKGNRIPFEYFETKQQGFSWYEFEQWVKSCKNINQKKKRNLLRRSLSKDAKKDFLERNLNDTRYACRFVKNYIDSFLCLSENSDNSGCVVVAGQLTAYLRNCWGLNKVREENDRHHALDATVIACCTRKIVQKVGAWSKSREMNSYNSSYVDPDSPVDEDEKLLQKLYVNTRKPDFPKPWKCFRSEVESRVFESDLEKLKEKLKLQCSYTESELKNVRTLFVSRACEKIGKGALHGDTVYRQTSEMRKENVAVKKVSLKKLKYARIGAIVDADTRNKNLCDALKKRYEEYSSITGKDVSKIDKKDLSKIFSDDKPMHMPNSEGQEDPCNPIVKSVRVKEACSGVPIRNGVAENSTIVRVDIFKKKGQYYFVPIYSWNKSLPNRACQGKNKSDWVVVDDSYEWCFSVRTNDLLKIVIKGKTYFDYFITLDVHSDGRIRLLNHDRQEDDVHYENGEYRISLKNADSINKYNVDVLGNYYLAKPEKRLELA

SEQ ID NO: 7035 - protein, 1093 aa, synthetic construct
  REGION 1..1093: note = Synthetic
MATILGLDIGVGSVGWGLIEDGKRIIDLGVRTFSKAETAKEGKSLNLIRRESRLSRRRIYRRAERLNKLLNFLIQECLISKKEEILLNPKAENPWILRSIAVNNPISKEQLARIIYHICKHRGFYWSSSAELNIDDNGKIKDALSTNQELMAKKGYATIGQMIACEFPNCCRNKQGSYNKAISRVDLDRELRLIFNNQKEMGNHFITEELINGICGTGDKKTGYLWMQKPALQGEQLLDMVGHCRFEREEKRAPVSTYLAERHVWLTKLINLRIKDDNSQVRGLDLSEINILKSLPYEILSGVKYKKIKDVLKKNGLWSDEYSFIGLDYQSSKKKDPEDAVFHELKGWHKIATAISKGSVQYWEKLSKETLNGHSEEYDFIASTLTIYKEDEELKKKFAEKSVPNEVVNELLNVRFQNFSSLSLKALSKIIPFMEQGIRYDEACDKAGYKHYLTSQELINKTKYLPPLFSGRDKNGTLIFNEELGDIPRNPVVLRAINQTRKVVNAVIKKYGSPSSIHIELARDLAKSFDERKKIEGAQKENRDNREKTAKEFIKIFGEIACNGRNLEKFRLYKEQDCKSFYSGKKIDIQRLLEPGYVEVDHALPYSRSFDDSQTNKVLVLSKENQNKGNRTPFEYFERFNLDWDEFFARVKNSKTISFRKKDKVLMKTFDKNEDKFRDRNLNDTRYITKFIKNYIDNCLLLNDESTDSKCVVVAGQLTDLLRKRWGLIKNRADNDRHHALDAVVVACCTRSIVQLVGTYYRQHEIRYTLDNKSDLESDLDFNPDQLDFPVPWKFFRDELVARLTIDSKDELISTIKQLFPNRQEIELSSVRPLFVSRMCEKKGKGALHKDTVRRQTDKLREQSLAVSKLHLIDIKLEDITPDNLVDYERNRNLYEAIKRRILKFYDSESSKTTEAIKKLIKKDFTENPFHMPNRRGEEQSDNPIVYSIRKIEKLSGVPVRNGVAGNGSMPRIDVFRKQSKYFVVPVYSHCKKLPTKYAQQKNMNDWNSIDDSFEWCFSVYKNDLIKIKTNKETFFGYYKCFDIDSCRISLVTHDNSEEKRVSYTKAMLFEKYYVDVLGNVYLSPKELRVELA

SEQ ID NO: 7036 - protein, 1141 aa, synthetic construct
  REGION 1..1141: note = Synthetic
MDLIFGLDLGIASVGWSVVDDENKRIVDLGVRAFKAAETEDKGKSLNLVRRTSRLSRRRIYRRANRLNSLLNYLIKSGLISSKDEILNNEHHENPWNLRVKGLDGVLSNNQLARIIYHICKHRGFYWSSSAEETEDTEKGKIKKCLAQNSLALTNEHFRTIGETILNKYPDAQRNKADEYTKSISRVLLNEELKQILTVQKEVFHNPLLTDDFFKAILGTGDKKSGFLWKQKPPLQGEQLLKMVGHCRFEKDELRSPKANYFAERHVWLTKLLNLRIYSEDCEDRALTVEEISIVINKIYEQKSDIRYSSLTTAFVKSGIWPKNHQYKYKGLNYDQLTSSKKKKVEDTASTSEDSTDTKKTAKKTNPESKIFYKSSCYQNIKDAYMSNSLEQEWNILSTQISQGNYDRYNRIAYILSIYKDDEEVKKHLLDCGEKSEVAEALLKIRFNGFSALSEKALKKIVPIMEQGKRFDVACSEAGYAHYKQSQDSKEKRKYLPPLFSGREPNGTLIINSELDDLPRNPVVMRVINQTRKVVNALVKKYGSPKSVHIELARDLSKTFEERIDIQKRQEEIKERRQKEQEEFDRIFGVGIRSGKNLEKYSLYKQQDCKSIYSGETIDLGRLFEQGYVEVDHVLPYSRSFNDSQDNKVLVLTKENQNKGNMLPYEYFMSHNLDWNQFEARVLSNKKLRKNKRCNLLKKSLNRNSKKEFLDRNLNDTRYACRFVKNFIDKYLRLSDKADKSGCVVVSGQLTAYLRKHWGLNKNRSENDRHHAVDATVVACCSRRMVQLIGYWSKHKERQYLKDSQSDPDLESDEELLLKKSIGSQKLYFPYPWVKFRKELNLRVFSSDIEELKNELSLFESYTEEDISKVKTLFVSRAIQKIGRGALHADTVRSQTEEMNKEKVAVSRVKLSELSYDRISKIVDSDTRNKNLCNALKRRFEAYCKSNNINEISKLKAKDSAKIFTTNNPMHMPNSNGEEDPLNPVVRTVRVKETFSGVPIRHGIAGNGDIFRVDIFFKEGKYYLVPIYAIAKELPNRACVAKKHESEWTVIDDTYQWCFSVTQYDLIKIELKKETYFGYFNGFDRATGAVNIILHDRSTEKYKKGLIRSIGLKTAKSVTKYRVDVLGNYYLAGAEKRLELA

SEQ ID NO: 7037 - protein, 1125 aa, synthetic construct
  REGION 1..1125: note = Synthetic
MAYIIGLDLGIASVGWSVIDPDKRIVDLGVRVFKKAENEKGESLNVIRRSSRLARRRIYRRSVRLKKLLNYLIDCGLISSKEDVLKNVNHEKPWELRAKGLTSVLTNKQLAIVIYHICKHRGFYWVSSAEKQTGEGGLVTNSLSSNDKILAEKGYKTVGQMIFSEYPNCQRNKQGEYVKSLRRVDLHRELAEIFKIQKEQFSSPFITEEFCTKILGNGDHRSGFLWEQKPPLQGDALLDMVGRCRFEKDEKRAPLANYFVQRHIWLTKILNTRVCGRDCQERAFNDEERNAIQNLPLESGGDIKFSTLTKKLIKAGLWEKDQYKYKGLDYSLEDKDPEDKVFCKSFPINSIRKVLKGPGLKREWENIKNDLLSGHYERYNRIAEVLTIYKDDSYICERLSPFETKEVINALLSVRFDKFSNLSEKFLKKIVPYMEKGERYDEACSSAGYLHYQQFQKKSEKSKYLPPLFSGREKNGTLIFNEELGDIPRNPVVLRVINQARKVLNALVKKYGSPLSVHIELARDLAKSWEERDKINKNNKKKEKQKTSDLIEFRELLNKHSVVFSEDLLAKNLEKYRLYKEQECKSIYSGEIIDIERIFEEGYVEIDHILPYSKSFDDSKSNRVLVFTKENREKGNRIPLEYITNEEKRENFEAFVKSSRLLSQKKKTNLLRRSLTPEGSKDFLGRNLNDTRYACRFFKNYIDRFLILDPAADHSGCVVVAGTMTAYLRKHWGLRKSREDNRHHAMDAIVIACCSRSIIQKVAAWSRNREELYQSGEFIDSKYMVSNDLDKVNKTKLSNIETKSHKKMRFPCPWQNFRNEVIERVYQDDLDTLKNKLSEIGYTDSELVNVRTLFVSHACRSQRIGEGALHDETLMRQTPEMREKGVMVKKVKLQDLKEEYILNIVDADTRNKNLCNALKRRFKKYKEENGIQEEVKLDESDIKKIFSNDNPMHMPNHEGYEDLNNPIIRSVRILCKGAGFPVRNGVAKNGSIVRLDIFKKNNKFYCVPVYSYCKHLPNRACTQNKQEAEWDLVDDSFEWCFSLRQNDLIKVVFKDKIFFGYYIGFDRALARFCCVLHDQQVSKKNPVIRFCIKTALSVTKYHVDVLGNYYIAQAEPRFELACHFN

SEQ ID NO: 7038 - protein, 1100 aa, synthetic construct
  REGION 1..1100: note = Synthetic
LSIQFPHPLNNTKQPYTKNKCLFKGASFMNYTIGLDIGVASIGWAVIDNDNKRIVALNENLFDKAEDYKGKSKAEVRREKSSRSKTVRRKAHRLIRVRRLFVNTGLLTKDIVTNFHFHPSLLNKPNDLGKRTRKSPYQLRAEGLDRCLSNIEWAVVLFHLAKHRSFISVDTKDENAQKMKKAINENRSLLTMCAYRTVGEMYYKDDKFKEKCRNKGGEFTATINRQMLLDELTLLFEAQRSFGNQYSSVEFQQKYVTIFSSQRPTFTNSAIEKMVGYCTFEPHQKRAPKNSYTVERFNLLRDLSQLKYMIGIEEFFLTMEEKQAIIDLAYSKEKVTYSNIRTILNKKFKFPPNAIFKGHPIDKEQKNFTSLKGYHTLKKALSPLGANEWNVFSQNYRLLDQTVESIALGKNEANIIKRFKKIGLPPKYHSLLCNVSFSKFSHLSFKALNNILPLMESGMTYTAACANSKYKGHYIKNTQIQKTDPLILPLIPQTLFSNPVVFRALCKTRRIVQAIIKRYGLPYAIHLETARELSNSDEKKKEIEEQQNKNRKATEILVKELKEFGITTPKYSLIEKYRYYKEQDGICPYSGEPINLDMLLSDLYGSIYEIDHIIPYSLTQCNERSNKVLVKQSENQNKSNRLPIEYLGRDKERWDRFCTWVKGSRLSVRKKQTLLREPLTKEESECFRTRNLTDTQYAATAAAEYLKVGVTFSDKNNRKPIVLIKGAVTGFLRYNWGIKKDREKFLQHAQDAAVVAVASEKMLQQISEYYKLKETQPQLFYNKDNRPSFPMPWPFFNNELKARLSANPVEKIAAYKRIHKIPPVYYDEDISCYKPLYPSIAVRYKINGCLLDETAQSALPKYIKEGYTIKKIPLTELEPKHLIEDKDGIIPVVGADKDVAFREALLKRFTDIISIDEYYKKSLTEIKKISKQAFTEKFFKPSKPGRVPSLVKSIRIIDKGTAGHIKNNALYKNGTDSLFKVSIFKKNESYYFVPHYRLPALQKKEVLKAIVPKNSEENWIPIDETFHRCFSLYKNNLVRLITVRGEEHIGYYKGTHRRINAINLLSKETSFSITAPQIKYIELLFVSVLGDITRSKGDFS

SEQ ID NO: 7039 - protein, 1037 aa, synthetic construct
  REGION 1..1037: note = Synthetic
MEKILGLDIGIASIGYSIVNYDDENFNGEILKTGVRVFDACEVAKTKASLNAERRVFRGARRRLSRRSGRLKAIKQLFIESGYLTEEDIISIFNGKNKKTDVWTLRKEGLDRKLSKQEFYQILHQIAKRRGFKSIRKSEEVRQEGNLLKSISENTKKFEDSNYRTIGEMFAIIYKDDSKRNKRDDYKNSIPRVLLQKEIEVLFAKQREFGCKFANKNFEDKYIEIAFYQRPLQSMESMIGYCQFEKDKKRAPKASYTAEVFVAAQKLVNTKLITHNGDVVDLNPEQIQELIKFAHEKTKVTYKQARKELMIDADTRFKSLQYGKIIKDKKTGESVEVNPEEQTLVELKKYHEFKKAIKNSLGEEFFNKIQNKPDLFNKIAVALTYEKSDEAIIERLLKDNVPLEIIDCIKDISTSKVMHLSVEAMSKITPYLFLGKKYNEACEAAGYDFKSTNQAKNNQYLPVLDYSEQTTNPVVNRAISQTRKVINALLREYGSFDRIIIETARELGKSPEERNKIKAGQTDFQNEKELAKKRCEEQGINPNSKNNLLRFRLWEEQGGFCIYSKKPIDIRRLSDENYTDIDHIIPYSRCFDDSLNNKVLCLSDENRKKGNKIPYEYLNGKTDWFEYCSWIRSLHLRSAKESRLLRKSYSKDDSEGFSSRNLNDTRYITIFIKDYIQENLDTKVETRNGSLTAFLRNQWGIKKDREENDRHHAVDATVVACSTKGMVKFLSTISAKRENYDFINNMKPRFKRPWDTFNEDLQTSIDKIFVSRAPRNKIPGGMHKATIYSPKHLEEGFTTIKTSIKDIKLKDLDNMFDKERNIVIYNLLKERLEEFNDNPAKAFAQPVYMPLSETKREAGIKPHEIKTIKLKVSGTSGMLVHNGFAYNDSMPRVDVFSKKNKKGKEEYYLVPIYVSDFAKGVLPNKAIVAHKPEEEWITIDETYNFKFSLLKDTLIAFNKTDKPKDEIICYYCSTHRAHGSIIIEAIDNNKTLKGVEIGVKSLYSFKKYQIDVLGNYHEVKKEKRKNIKLKNTKKSTT

SEQ ID NO: 7040 - protein, 1028 aa, synthetic construct
  REGION 1..1028: note = Synthetic
MKKRLGLDIGISSIGYGVIEYDDENFDGKIIDAGVRIFTVAENPKDGSSLSKPRRDAKSTRKRLSRKSNRLYNIRKLLISNNFITQAQIEELWTQNKQLKDLWDLRKDALNRILSNDEFYRILMYIAKHRGFKSTRKSEEAQKEGALLKSIKENNEEFEKNNYQTIGEMFASKFTNGVPKRNKKEKYNNSISRELLEKEIDIIFEKQRQFGSKIATTEIQDKYKSIAFYQTPLQSMANMIGYCTFEQNEKRAPKCAYTSEIFTSAGTLVNLSLIDEEGNSRFLTGEEINDIIELAHKQSKVTFKQAKNLLNLDDEVKFNSLNYNKKDKDGNIINPEIKTTLIELKNYHKIKKSIEQNLGKTYFETIKYDQDLFDNIATTLTYEKTDENIVKRLKSLGIDNEIIKSVKDLSMSKTMHLSIKAIKKILPYMLQGMKYSHACEEAGYNHSIVLKNKIKSTQLPVLTKEELTTNPVVNRAISQTRKVVNALIRKHGSFDNIIIETARDLSKSFKERREIKQAQEEFQKEKEKARQRCIEHGLDPDKPKSNLLRFRLFEEQGGFCIYSGKPIKPERLADPNYTDIDHIIPYSRSFDDSLNNKVLCLSEENRQKGNKLPYEYIDQSKWYEFTQRLKTYHLKTAKFNRLIKKSYSQEGFISRNLNDTRYISRFIKDYIKENLDFNNNLKVETRNGSLTAFLRTQWGLIKNRDESDKHHALDAIVLACSTQGMVQYLSTISAKIENYEFINGKKPRFKKPWETFNEDLEIALSNIFVSRTVNAKVSGQIHDETIRSAKHLDEGFTTLKTPLEKINLTTLDKMYDKERNIDLYNIIKTRLEQFNNDPKKAFEEPLYMKLSKEKEEKGQNAPQIKSIKIKDTSVAGIKIRNGLAWNAAIIRVDLFTKENRSGKKEYFFVPIYISDMGKELPNKAISKSKNGWIEMDANYNFCFSIYSNTLLSINMTGNPEDENFWYFRSIDRSDSRLTLDSHDRSIKEKRISPKNAFSIKKYQIDVLGEYHEVKREKRQHLKGAKYGI

SEQ ID NO: 7041 - protein, 1026 aa, synthetic construct
  REGION 1..1026: note = Synthetic
MKYILGLDIGIASVGFAVVEQDDNREFTGISDAGVRVFRAAEQPKTGASLALPRREKRGSRRRLQRRVSRLYRLKQLFVQNGIITEQNIEELYIGGKKTIDVWNLRKDALERKLTGEEFYRCLMHIAKRRGFKSIRKSEEAKNSGALLKAIEENSVKFNQGKYRTIGEMYATLYADDIPKRNKRDSYKNSIPRNLLYDEVGIIFENQRKLGFDKATTELEDAYKNIAFYQRPLSSFEDKIGNCIFEKNEKRAPKYSYSAELFTAATRIVNTTIVDEMGNSRFFKESEILKLKDLAHINSKVTYAQAKKCLNLSQTDRFNSLNYNKKDKKTGELINPETSVFVELKGYHAIRKVIEKNLGKEYFNSIQYDKDLFNKIAFVLTCEKSDENIVKKMEELNIPNEIIRCVQDLSMSKVIHLSIKAIEKILPFMLTGMKYNEACFEAGYNHSVLNASKNKCCLLPVLQPNEMTTNPVVNRAISQTRKVINTLIKKYGAFDTIIVEMARDLSKSVNERREIEKAQEEFQAQKELARKRCIENGIDPDVPKSNLLKFRLWEEQNGYCMYSGKYIPPSKLKEPNSVQIDHIIPFSKSFDDSLNNKVLCLTDENQRKGNKIPYEHIGESNWHEFVNRIKMYNLKTAKVNRLTRKSYPKEDEAFKSRNLNDTRYMAKFIKDYIKENLDFDNNLKVETRNGAITAFLRTNWGLVKNRQKNDKHHAQDAVIIACTTQKMVQKISATAAQIEKNEYVNNKKPKYKKPWETFNEDIEKTISNIFVSRAIRAKISGEIHEETIRSAKHLAEGYTTLKTPIKKINLSILENMFDKERNIKIYEILKERLLEFDNDPKKAFEIPIYMPLSEEKVKLGQRPHEIKSIKIKDNGISGIKVNNGFASNSSIARLDVFKKENKKGKNEYFFVPVYVSDFGNDLPNKIFPVTKTSGNIDETYEFCFSLYQDCLISVNMSGNKSDEKYWYYRGFDISTGTITVDSNDREIEKQRISVKKAALIKKYQVGILGDIHEIKKEKRQSIKRKK

SEQ ID NO: 7042 - protein, 1067 aa, synthetic construct
  REGION 1..1067: note = Synthetic
LYNTIIIQIQNIIVNRSKEEMKQKILGLDIGIASVGHAIINYDDKNFDGEIIEAGARVFDACEVAKTKEPLNAQRRNFRLARRRLARRSSRLRQLKQLFISNNLLNEAQINNMFQGSKNRIDVWELRKEALNRKLTVEELYRVIHQIAKRRGFKSIRKSEEAKREGALLKSLSKNVEAFKDSNFQTIGEMFATIFVDKAKRNKRDMYTNSIPRYLLVDELNIIFDKQRDFGLDIATEEFQKQIFEKIFAQNSIQSMEKMVGYCQFEKDEKRAPKAAYTSEIFVAVQKILNTHVIDEVGQEYEFDEEHIKRILELAHEQSKVTYKQVKKEFSLSDETRFKGLNYNKKIIDKKTKEEKIVNPEESAFVELKKYQEFKKAIIKNTSKEYFENIKDVQTLFDNIAEVLTYEKSDDTIVQSMKEKEIPDEIINAVKDLSAVKVMHLSIKAMKKIIPFMIQGNRYNVACELAGYDFKNEKESKGEDFLPVLKQEELTTNPVVNRSISQTRKVVNALIRKYGKFDKIIIETARDLGKSAEERNKIKAGQNEFKEQKDKARERCIEHGINPDSKNNLLKYRLWEQQGGKCVYSWKEDNGVIKPVEIDIERLAEPNYADIDHILPYSRSFDDSLNNKVLCLSDENRQKGNKTPYEYLGNKVDWYKYSQYIRSLNLNSAKTNRILRQEYHGNTDTFISRNLNDTRYMTVFIKDYIKSNLDCKVETRNGSLTAFLRNQWGIIKNRDTDKHHAIDAVVLACSTQGMVKYLSTVSAKREKMEREGNAKPRFSKPWATFDEDLTKIKDNIFVSRALVTKIPGSIHKATLKSPKHLAEGFTTLKTDIQSLSLSKLETMYDKERNIAVYNVLKERLEQFGGDGKKAFAEPVYMPLSKEKEKAGQKPHEIKSIKLVDNSVSGVLLPQGFADNDSMARVDVFSKKNSKGKDEFYLVPIYVADFAKGILPNKVIKANQPESEWIIIDDTFKFKFSLFSNTLISINKTGKKEDEIFGYYIKTHRCTGSIYYEMVDGKINENGEHVQKTIGVKTLKTFKKYQVDVLGNYHEIKKEKRQPIHFRGDKNK

SEQ ID NO: 7043 - protein, 1070 aa, synthetic construct
  REGION 1..1070: note = Synthetic
MDYILGLDLGETSLGWCIIETKDGIPYRFENFGVRIFSDGRESKSKEPLSVARRTARGMRRRRDRYVMRRDTLMQKLIEYGFMPADKKERKALEKLDPYELRTRALDERLTSYELGRALFHINQRRGFKSNLKTDKKDADSGAMKSAISETRAKIVQAKARTLGEYLYQVNKGKTSTQNFVPVRAKSVVNKGKASYPLYPDRAMYEEEVRLILKNQNIDPVIADDLFQTIFFQRPLKTPEPGFCSFEENERRTYCALPAYQQFRLLQQINQLTLLYDDGERPLTAEERSTLYHYAAEDFSRLDKRKRLLTWSAAKKILKPFGVNPKASFNLESEQRKGLDADSTSAWLSDETCFGKRWFSFEAQKQNEIVQLLINAQNEETLVKEIISEYGVNEEQAKKIVSAPLADGTASLSLKAINKINPFLRQGQKYHDAVESAGYTFSLKTKGILPEHYDAFINPETGDIYTELPYYGEALPKHVIGGTYAAADRGNPEVYYGKINNPTVHIALNQVRKLINELVNRYGHPDEIVVELARELKLGKKQKEELNKELVQNTKENERIARELERLNVKDSYDNRMKYKLWEDLSDNPLQRVCPFCGKPIGHADLFSDKFEIEHLLPFSRSYSDARTNKVISCRECNREKGNRSPWEAFHTDGVRWNEILARVENFSTKSDPKKSRAKKFREDAFEDLNDVLARMLTDTQYMAKIARQYLCFAAHPTKVRGIPGRLTAQLRHHWGLENLFPDDQKDRSDHRHHAVDAFVVACTGRGTLQRYATERRDYYVAKMPQEKAPHLPYPDFRLADIQAAFDNMAISHKPDHGNPQLAIKQGKTVAKLHEETYYGMAGEGDKKGTWKLIQRLPVSEFKTITDLDCIIDQSGTANPIRALLDGKEKSEHEGVIQKYFADRGTHKVRTYRERSKEVVVPFTDKNDKPYRYAIYGGNAYAEIYCPDRGKNAGKWQIEIIPNYCAHQKGFVPQWRHTDAHAKLIMRLHIDDMVAYEKDGKTVIARVKKMSGSRVYIRENKIAKEEADKLSWGAYPSGMQAGNMRKITVTIDGRVIDPKRPKADEHGSDN

SEQ ID NO: 7044 - protein, 1068 aa, synthetic construct
  REGION 1..1068: note = Synthetic
MDYILGLDLGSTSLGWSVVELDKTGVPVRLERMGVRIFSDGRDSKSKEPLAVARRTARGMRRRRDRYVMRRETLMRKLVKYGLMPENESERKALERLNPYELRAKGLNEKLPPYELGRALFHINQRRGFKSNRKTDRKNDEAGAMKSAIRDLTEKMTESGARTLGEYLYNLNKDKKSTQNFAPVRVRTHLEKSKAVYSMYPTREMYEDEVRQIFLKQNLSDEIKADLFHTIFDQRPLKTPPKGRCPFEKSEERCYIAFPAFQRFRALQQINQLRVRDDFTEVELNDKQKRELRHWLLDDFSKLDKDYRLTFAAIKKILKLPKNVKFNLESERRKGLDADKTSAQLRPLFGTIWAEKQDEIVDLLLNMENEDELKQALRKYGLPDEQIERVLAVNLPDGTGSLSLKAIGKINPFLEQGMMYDKAVVAAGYVFSKKFDKLPDKYESFIDPEYGTVFDELPYYGQVLPEQVIGGTGKDEDRNDEAKFFGKINNPTVHIALNQVRKLVNALVKKYGHPNSIVVELARDLKLSRDEKKRLEKEQTQNETENKKIAEEFQRLNSEKGLNIKNNYDNRMKYKLWEDSSKNPMQRCCPFCGKPIPAVELAMSAEFEIEHLLPFSRSYLDARSNKVLSCRRCNREKGNRSPWEAFHNDAKRWNEILARAENLPENKRWKFNEDAFKRLQDENGDVLARMLTDTQYMSRIARQYLCFAANPKRVYGIPGQLTSKLREHWGLNSILSEQHEKDRTDHRHHAIDAFVVACTSRGTLQKYATERRDFGEMPQEKAPHIPFPAFRLAEIKEAFDQIVISHKPDHGNPRKAIRQGKTVAKLHEETYYGMIGEGEKKGTVRLTKRVPCLAFTKSFNPQKKPYKLEDIVDQNRTANKIRKRLENSDPADYEKIVMAYFNERGMKRVKVFEDRNKNVVLAFHDRKTGQPYRYAIYGGNAYAEIYCPDRGKNAGKWQLEIIPNFKAHQKGFVPNWRHTDAHAKLIMRLHIDDMVAYEENGETVIARVKKMTGNLFYLRPHHVAKEEADKLSWAASAEQLRLHNGRKITVTIDGVVLDSKRPKGDTDG

SEQ ID NO: 7045 - protein, 1064 aa, synthetic construct
  REGION 1..1064: note = Synthetic
MDYILGLDLGATSLGWSVVELGNDDVPLRLERMGVRIFSDGRDSKTKEPLAVARRTARGMRKRRDRYVMRRKTLMNKLIKYGLMPESEAERKALERLNPYELRVKGLDEKLLPYELGRALFHINQRRGFKSNRKADRKNDEAGAMKEAIADLREKMTASGARTLGEYLYGLNKGRESTQDFTPVRVRTHLEKSKIAYSMYPTREMYEDEVRQIFLKQDLSDEIKADLFKTIFNQRPLKTPPKGHCPFEKSEERCYIAFPAFQRFRALQQINQLRVRDDFTEVELNDEQKRELRHWLLDDFSKLDKNYRLTFAAVRKILGSQYKNVKFNLESERRKGLDADKTTALLRPLFGTVWADKQDEIVDLLLNTESEDDIKTALLKYGLSDEQIEQALTADLPDGTGSLSLKAINKINPFLEQGMLYDKAVVAAGYVFSKKFDKLPEKYESFINPEDGEVFNELPYYGQALPERVIGGTGKDEDKEDDAKYYGKINNPTVHIALNQVRQLVNALVKKYGHPNSIVVELARDLKLSRDEKKRVEKEQAQNEAENKKIGDELTRRGIKNNYDNRMKYKLWKDSAENPMQRCCPFCGKPIPKEEEAMSAEFEIEHLLPFSRSYLDARSNKVLSCRRCNREKGNRSPWEAFHNDAERWNEILARVEKLPENKRWKFNEDAFKKLQDEKGDVLARMLTDTQYMSRIARQYLCFAANPRFVYGIPGQLTSKLRDHWGLNSILSEQKEKDRTDHRHHAIDAFVVACTGRGTLQKYATERRDFGEMPQEKAPHIPFPTFRLSEIKDAFDKIVISHKPDHGNPQKAIRDGKTVAKLHEETYYGMAGEGDKKGTVRLTKRVPCLAFTKSFNPQKKPYKLDDIVDQSGTANKIRERLENSNPADYEKIVMEYFNERKMKHVKVFEDRNKDVVLAFNDRRTHKPYRYAIYGGNAYAEIYCPDSERKNAGKWQIEIIPNYCAHQKNFVPNWRHTDAHAKLIMRLHIDDMVAYEKDGETIIARVKKMSGGRIYFRENKIAKEEADKLSWGAYPSGMQERNLRKITVTVDGVVLDPKRPKGGADG

SEQ ID NO: 7046 - protein, 1147 aa, synthetic construct
  REGION 1..1147: note = Synthetic
MKTLGLDLGPNSIGWAVVEDNSDGSGRLIDAGVRVFPEGVDAFDTGKESSRNEQRRTARMMRRQIRRRARRRKVVEAALVEARLLPDNEAGRKAILATDPYPLRARGVTEKLDPFEIGRVFYHLNQRRGFLSLKKVSKEKVEKELKAIEKRKAKAAESGKPEEAGKKEDDSKMLAQIALLAQTIGDRTLGKTLHAQQTEGAARTTHGTIIPHRIRSQHTSRRMIEEEFLRIWDFQSVHHPQLLSDRSCFGARGRLGARATRDAEPIRFPIGKHVGPTAKAERLIEIARGLLARDGIHGLIFFQRPVYWLSSTIGKCEYEPKEQRCPRADRRAQRYRLLCDLNNMRYDRPGDYGEKALDAEQRADVMRLLESQKEVQFSRIRKILGPFEDIQINLEQMVSRRGKKAKKGVDASTTPKREKMKGHETDAEMRSVYPKWDAFDDAVKTQIVTVLVGTRTRNEKGQRSIEERLCAIPGVDSAIAEKLASADLPDKYLSVSLKFIEKVLPYLEAGTRLSAKDKGEIGAMERAGYESGFKGLKEPLAVLPAPNSRMAISLKYITNPVVKAAMWQIWTVVNTILREHFKDGSKPDRIHVEMIRSMKKTTEMRRIDAGEKKTLDKQNEAIRSEIRALGAVPTNDAVKKYKLWLEQGMRCAYTGDPIARHQLFHEDGLVQVDHILPQSRTADDAMSNLVVCFTTANQEKRNRLPSDWLGAEALKDLESRCKHLPWPKRQKLKKKEIDDDFVETQLTDTSYIAKATVGYLHTIVGRHGKVVGLKGQYTSELAHQWGLNTILFQMPGSPAFRTQTSPADHKKMPKNRDDHRHHAIDAIVIALSRQDRLNALLQDKYAVIHRNKEGKLVETYKFESAVDAPWGMEPDAFRALVFEKLKAMNVSHRVRRGVSGGLHEETNYGAVYERTKGDRREKRRDGEFVVRKSVEALSMSEVGNIRDETIKNIVIRRLGEHKIAFGRGADKVPPKKMQEAMKDLKMPSGVPIRKVRIRVMDSTIQSIREKTGEVAYVSPGANHHVCVFEWTERGKVKRGGVYVRRLDAAKRILNRDPIVQRTHPDRPDARFVMSLCTGDTILITDAQGKETAHIVTTLVYGKTQKRIHAASAYDARKDRVSPSITGQLLSIRKVTVDPLGRIRWAND

SEQ ID NO: 7047 - protein, 1535 aa, synthetic construct
  REGION 1..1535: note = Synthetic
MNTILGLDLGTNSIGWALIKVLNDKTRLPLEIIDLGVVVIPTDQRTLDKFSKGESISKTAERTKQKGVRKLYERKKLRRERLHRVLNILGFLPEHYSKKIDFKKHLGQFFGNSQPKISYVENDHGKHEFIFMDSYREMLKEFSKHNIKNVPYDWTIYYLRKKALSQKISKEELAWVILNFNKKRGYYQFRDDNADENKENKIEKYYALKVTNVKKEDAQNYTITLENGWIYKNKSKISLLDWVGSTKEFISTEKFDNKGNIIKKKNGEDDRTLKLVDSEKDWIAIKKSTEDRIENYGKTVGTYLYEHLLKDPNQKLNGELINIIDRKFYKNELKQILEKQKEFHPELLNEDLFQKSIIELYPKNSTRQKELKNKDLCYLLIDDVIYYQRDLKKKNSTINKCSFESREYYLNGEKQIQKINCIAKSKPLYQEFRTLQFIKNLKVYEIIDGLEKDITSKLLPDFETKEHFFEWLNDKEKIDQLQLLSYKCFDLHDNVKNDLIAKGIKRPTEKAIRTELLEKYRWNYSKDNDRNFLLNETRFKILKYLKKVDKKLTLTNEQIESLWLLLYSAKDERELKNGLQKFSEKNKLPKKFSDIFISFPPFKKEYGAYSEKALKKLLSLVRFGKYWSFNKIDNNIQNKIMNILNGEVDDSISDRVREKTILLQDKNDFQDLPLWLASYVAYNRFSEVSEIKYWDSPDKIEFLKQHSIGNPIVEKIINETLKLIKDIWVIHGKSCKNFFSEIHIELSREIKSSSKKRAQITNNNTKNQKLNNLIKSLLIEMASDTKYENVTPYSPSQQEILKIYDEGIYSKEENSEKIKEINKIRNNNKISKSDITKYKLWLEQGYISPYTGKIIPLTKLFTAKYQKEHIIPQTKFFDDSFNNKVICEAEVNKLKDNSLAMNFIKAKGGKAVKLSDGETVTILNQEEYKQLVRTSFKKNSIKLRNLLLEEIPDTFTKRQLNDTKYISKLVLSLLSNIVREKGELESTAKRIVSTNGQITSILRNDWGLNNIWNKLITPRFERLNNINKNKIYGNWENKKGKNVFQINYLNDNLSTLNTKRIDHRHHALDALIVACTTRNHINFLNNQYAKSRNQRHDLRAKLKRRETITTEGSKKQVFKDFIKPWESFTQDALKKLETTIVNFKVNKRIINKTINWYKKWEKQKDGTYKKIQKKQTKGDAWAIRKPLHIDTIYGIVCKKLPLKSALENYKNIIDENLKHKIKELKEVNKFDNNQIINFFKECNFIFEDNNIQKVEVYDFKDNRDKTILSSSRQLIDESFTPKKIGKVLDPTIRNILLKHLNSTKYNNKFDSDGNPIKPEKLAFSPEGLKDLNKNIKHLNNNKEHQPIKRVKLFETLGNKIKVGYTQQKNKKFAETATGTNLFLGIYSDNNKRDFKTIPLILAIQREKEGLNPCPDTDEKGNQLLFSLSPNELVFVPNNEERKNPNLVDFENLSKDQIDRIYKFVSCTGSEAYFVPSRTAKPIIENENGTNNKSQRIIEFNEKTSIKNEKNEPVLIKTICWKIEVNRLGKIIKVIK

SEQ ID NO: 7048 - protein, 1219 aa, synthetic construct
  REGION 1..1219: note = Synthetic
VGYYDKVTHRGALTPCHLARRYLFYGDKIQRRVGKIMAYGIGLDIGIGSVGWAVLALDHEENPWGIIDLGSRIFDAAEQPKTGASLALPRREARSMRRRLRRRRHRLERIRNLFIKCGLLTTEQLDHLYDGKLEDIYTLRVRALDERLTDEELARVLLHLAHRRGFKSNRKAESQSTEAGELKKAISLNQKTMVENHYRTVGEMFCKDPRYLEYKRNRGGNYLNTVDRAMVEDEARKILEIQEKLGNRKLNGDFQESFLSILLSQRQFDEGPGGNSHYGGNQILNKVGICTFEDGSNGEPAEKRAPKVCYSFEYFNLLQKVNHLRLTSSKDNRGLDGAERKRVIARAKDKADLRLGEIRKVLQIPSEYRFQGVSYNTKELPEETEKKTKFNYLPFYHQMRKLLESKAQFDIRNYSLDVLDKIGQILAFYKGDDARRKELEKLQLAPKAVEALLEMNGTTKFSHLSLKAIRKITPFLEQGMTYDKACEAAGYDFRAHQANKSCLLPANAPELEDITNPVVRRAIGQTIKVVNAIIRKQGSSPLYVNVELAREMAKDFQERKKIEKINKENQENNDSLMDKIRKENNKLNPSGMDLMKLKLWNEQDGISPYSQKHIERERLFETGYVDIDHIVPYSISFDDSYKNKVLVFSSENRDKGNRLPYQYLLKKYGQDAADRFKVWVGNNVRDYQKRQRLLKEKMTEEEISGFKERNLSDTKYISRFMYNFIRDHLEFAPSETGKKKRALAVNGMITSYLRKRWGIRKIRANGDKHHAVDAVVIACTTDKMIRDLTLYSEERENKYDVDERGSRLVNESTGEVLKEFPFPWEGFRQELEARCSDHPERGLAGLPFYMNKDLNDIKPIFVSRMPRRKVTGAAHKDTIRSARHIAEGITVSKVPLTSLKLDKTKEIDGYYNPDSDRILYEALKERLNQFNGNAKEAFNEPFCKPKADGSQGPLVKKVKIQSKATLAEEITVSKVPLTSLKLNKTKEIDGYYNPDSDRILYEALKERLNQFNGNAKEAFNEPFCKPKADGSQGPLVKKVKIQSKATLAVLVEGKTGVADNDSMVRVDVFKVEGEGYYLVPVYIADTVKKDLPQKAIVAHKSYKDWKVMDDKNYLFSLYPNDLIYVESRSKINFKLTQDKEKESTLEPEFSCSKILGYYQGCDVANGAINIITPDGTYLKHNQGVKRLKRFEKYQVDILGKSYPVKSEVRRKIIIKQKAR

SEQ ID NO: 7049 - protein, 1177 aa, synthetic construct
  REGION 574..579: note = misc_feature - Xaa can be any naturally occurring amino acid
  REGION 1..1177: note = Synthetic
VQKSPAHRQIIPEGRPFVNPFFEIKSFPFQVKISFTYKGKIVIILLVLIPYQELLGYYNKVVNRKALTSCLRRTSSLYQTDGEGTMAYGIGLDIGIASVGFATVALNEQDEPCGILRMGSRIFDAAEHPKNGASLAAPRREARSARRRLRRHRHRLERIRNLLVESGLISQDGLGSLFEGRLEDIYALRTRALDERLTDAELCRVLIHLAQRRGFRSNRKADAADKEAGKLLKAVSENDRRMEENGYRTVGEMLYKDPLFAEHRRNKGEAYLSTVTRTAVEQEARLVLSTQREKGNAAITEDFVEKYLDILLSQRPFDVGPGGNSPYGGNMIEKMIGRCTFEPDELRAPKASYSFEYFQLLQKVNHIRLLRDGRSEPLSEEQRRAIIDLALASADVTFAKIRKALSLPDSVRFNDVYYRESAEEAEKKKKLGCMGAYHEMRKALDKVAKGRISAIPVEQRNAIAYVLTVHKTDERILTELQNINLERSDIDQLMQMKGFSKFGHLSIKACDRIIPYLEQGMTYSDACTAAGYAFRGHEGGERSLYLPAQTPEMDEITSPVVRRAVSQTIKVVNXXXXXXVTALIREQGESPTFVNIELAREMSKDLAERNDIRRENEKNAKANEAVMDELRRTFGLVNPSGQDLVKYKLFLEQGGVCPYTQRPMEPGRLFEAGYADVDHIVPYSISFDDRYCNKVLTFASVNRKEKGNRLPLQFLKGERRDAFIVFVKANVRDYRKQRLLLKETVTEEDRKGFRDRNLQDTKHMAAFLHSYINDHLQFAPFQTDRKRHVTAVNGAVTAYLRKRWGIRKVRAEGDLHHASDALVIACTTPGMIQRLSRYAELREAEYMQTEDGAVRFDPLTGEVLEKFPYPWPCFRQEWTARISDDPQAMLRDLKLTDYRGLPLDQVKPIFVSRMPKHKVTGAAHKDTVKSAKVLDEGIVLVKRSLTDLKLKDGEIENYYDPSSDRLLYEALKERLLAFGGDAQKAFAEPFHKPKSNGTPGPLVKKVKLMEKSSLNVAVHEGKAVADNDSMVRADVFYVEGDGYYFVPIYVADTVKPNLPNKAVVANKPYAEWKEMKETDFLFSIYPSDLVRVTHRKGIKLTQINKDSTLKKDKTVPTELMYYVKSSISTGSLTLETHDRTYDIKSLGIKTLEKLEKYQVDVLGNLSPAGKEKRQRFQ

SEQ ID NO: 7050 - protein, 1135 aa, synthetic construct
  REGION 1..1135: note = Synthetic
VGYYDKVTHRGALTPCHLARRYLFYGDKIQRRVGKIMAYGIGLDIGIGSVGWAVLALDHEENPWGIIDLGSRIFDAAEQPKTGASLALPRREARSMRRRLRRRRHRLERIRNLFIKCGLLTTEQLDHLYDGKLEDIYTLRVRALDERLTDEELARVLLHLAHRRGFKSNRKAESQSTEAGELKKAISLNQKTMVENHYRTVGEMFCKDPRYTEYKRNRGGNYLNTVDRAMVEDEARKILEIQEKLGNRKLNGDFQESFLSILLSQRQFDEGPGGNSHYGGNQILNKVGTCTFEDGSNGEPAEKKSPKVCYTFEYFNLLQKVNHLRLTSSKDNRGLDKAERKRVIALAKNKADLRLGEIRKDLQIPSEYRFQGVSYNTKELPEETEKKTKFNYLPFYHQMRKLLKSKAQYDISDYSLDVLDKIGQILAFYKGDDARRKELEKLQLAPKAIEALLEMNGTTKFSHLSLKAIRKITPFLEQGMTYDKACEAAGYDFRAHQADKSFLLPANAPELEDITNPVVRRAIGQTIKVVNAIIRKQGSSPLYVNVELAREMAKDFQERKKIEKINKENQENNDSLMDKIRKENNKLNPSGMDLMKLKLWNEQDGISPYSQKHIERERLFETGYVDIDHIVPYSISFDDSYKNKVLVFSSENRDKGNRLPYQYLLKKYGQDAADRFKVWVGNNVRDYQKRQRLLKEEMTEEEISGFKERNLSDTKYISRFMYNFIRDHLEFAPSETGKKKRVLAVNGMITSYLRKRWGIRKIRANGDKHHAVDAVVIACTTDKMIRDLTLYSEERENKYDVDERGSRLVNESTGEVLKEFPFPWEGFRQELDARCSDHPERGLAGLTFYMNKDLNDIKPIFVSRMPRRKVTGAAHKDTIRSARHIAEGITVLKVPLTSLKLDGDGEIADYYNPDSDRLLYDALKKRLEQGNGDDKNAFKEPFYKPKADGSQGPLVKKVKIQSKATLSVPVEGKTGVADNDSMVRVDVFKVEKEGYYLVPVYVADIVKEKLPQRAIVAHKPYEEWKVMDDKDFLFSLYPNDLIRIEGKQEVLFSLVNEDSNLCKEFKSNQILVYYVKTGIANGTITVITNDHCYQKLSLGVKTLKSMEKYQVDVLGEVYPVKKEVRQKFTIQQKAR

SEQ ID NO: 7051 - protein, 1134 aa, synthetic construct
  REGION 1..1134: note = Synthetic
MLIYTQFLYHTKNYAGCYNKVVNRRALTPRLCGALSLSEDKTEGRTMLPYAIGLDIGITSVGWATVALDEDDCPFGIIGMGSRIFDAAEQQKNGKSLAAPRREARSARRRLRRHRHRNERIRALLIRERVVSEDQLAHLFEGQLPDIYALRVKALDETVTGEELARILIHIAQRRGFKSNRKAAVSKEDGELLTAVSANKARMAEHGYRTVAELYLKDEVYREHRRNKGGKYISTVSRDMVEDEVRQIFAAQRKLGNTIATEALEVSYVEILLSQRSFDDGPACGPYAGSQIERMIGKCPFERDELRAAKATYSFELFSLLEAVNHIRIVTGRESVLLTPDQRVRLISLAHKTADLNYAQIRKELALSDEQTFNMVSYGKAGDKLSAEKKTKFSHLKAYHQMRKAFESVVKGHFADITREQRNAIGEVLSKYKTSAKIRPALEAVGLSGQDIDIAESLSFSKFGHISVKACDRIIPYLEQGMNYSDACTAAGYQFKAHEGQEKAHLLPPLDEETKNTITSPVALRAISQTIKVVNAIIRERGCSPTFINVELAREMSKDFYERSQIKKEQDENRTKNERLMERIRTEYGKVSPTGLDLVKLKLYEEQGGVCAYSQKQMSLEHLFDANYAEVDHIIPYSISFDDGYKNKVLVFAKENRDKGNRLPLQYLTGKRRDDFIVWVNSSVRDYRKRQRLLKESVTEEDEAQFKDRNLQDTKTATRFVLNYITDHLEFAPFSTDRKKHVTSVNGSVTSYMRRRWGITKIRANGDLHHAVDALVIACTTDGMIQKASQFARFRETRYTQAEDTRFIIDADTGAVIKEFPYPWPRFRQELEARLSSDPSRAIRGQGFPLYLAEEIPVRPLFVSRTPRHKVTGAAHMETVKSGKALADGLLIVRKALTELKLDKNGEIANYYNPSSDRLLYDALKARLQLFDGDGKKAFAEPFYKPKSDGTPGAVVSKVKVCEPSTLNVSVHGGKGIADNDSMVRIDVFHVEGDGYYFVPIYVADTLKPELPNKACIQKKNYENWKEMKNEDFIFSLYPNDLVKVTQKKPWKLSKAQKDSDLPDSYEVKSELLYFVSASISTASLSCRNHDNSYKIDSLGIKTLEAFEKYTVDILGEYHPISHEIRQTFSRKKG

SEQ ID NO: 7052 - protein, 1122 aa, synthetic construct
  REGION 1..1122: note = Synthetic
MPRLVRGIISIRRKTLSSLHYWHYKLKQKWEVKDMHQYAIGLDIGITSVGWAALALDADENPCGILDFGSRIFTAAEQPKTGASLAAPRREARSARRRLRRHRHRNERIRNLIVSSGLLSKEELSQLFDGQLSDIYAVRVKALDTSVSRSELARIMLHLSQRRGFRSNRKGESDQEDGKLLAAVNKNKERMGKNGYRTAGEMFLKDPLFAEHKRNKGGNYIATVTRVMVEDEIRKIFSAQRNYGSEFASAELENAYLEILLSQRSFDEGPGGNSPYGGSQIERMVGLCTLEPDEPRAAKASYSFEYFSLLEKINHIRLIHGGESTPLTDGQRRTLIELAHKSDTLSYAKIRKELNIPANHTFNMIRYKTDVPPEEVEKKEKIVCMKAYHQMRRAVDRVAKGRFAMLSNEQRNEIARVLSLYKTGEKIERALTEAGIEPCDIAELETLSFSKFGHLSVKACDKLIPFLEKGMNYNDACTAAGYDFRAHSKDGRTLYLPPLGDDCYEVTSPVVRRAISQTIKIVNAIIRRYGHSPVYVNIELAREMAKDFAERSKLKKQMDDNQKQNERMMQQIREYKHGAPTGIDLVKFKLFSEQGGVCAYSQRQMSLERLFEDNYAEVDHIIPYSISFDDSYKNKVLVLTEENRNKGNRLPMQYLTGKRKDSFVVWVNACVRDYRKRRLLLKEAYTAEDEANFKERNLQDTKTMARFMYNYINDNLQFDPSFTGRKKRVTAVNGAVTAYMRKRWGISKVREDGDRHHAVDAVIIGCTTDGMIQRVSRYASWHEKHYMRTENGSILIDPNTGEIKQEFPYPWPWFRKELEARLSNDPSRAVADLKLPFYMDDDAPHVRPLFVSRMPTRKVTGAAHKDTVKSPKALDEGYTIVKRPLTSLKLDSSGEISGYYKPESDRLLYGALKKQLAEHGGTGAKAFTEPFRKPKSDGTPGPIVNKVKLLETTTLTVPVHDGCGAADNDSMVRIDVFHIEGDGYYFVPIYVADTLRPELPSKAVVAAKSYEEWKDVKDEDFIFSLYPNDLVKVKHRRGMKLSKVFPESTLPPILECKESMFYYISSSIANGTVRFITNDNTYIIQSLGLKTLESIEKYTVDVLGEYHPVRKEKRQRFDITKG

SEQ ID NO: 7053 - protein, 1102 aa, synthetic construct
  REGION 1..1102: note = Synthetic
MAYCIGLDIGITSVGWSVLKLDENEQPYRIDKLGSRIFDAAEHPKDGASLAAPRREARGARRRLRRHKHRLERIRYLITKENILSEEDLRCLYDGDLSDIYMLRTKALDEKVTEKEFARILIHLAQRRGFKSNRKVDVEDKKSDAGALTSAVKENTDLMEKKAYRTVGEMLYKDEKFAECKRNKQESYKNTVSRSQIEDEIHIIFKKQREFGQAFASEKIEEEYSDIVLSQRSFEEGPGEGPSSSPSPYAGNQIEKKIGKCTFEKEEPRAVKGSYSFELFSLLQKINDIRIIHDGKTRSLTQEERIRIRNFAHEVSSLNYACIRKELGLSDDEFFKNVSYSNKQGDKGQTIEETEKKTKFEYLKAYHKMRKALSKVSKDRINFYDTEHRNAIAYALSVYKTDDKISDYLINNGIEKIDIEPLLTISGLSGTGHLSTKACDKLIPFLEKGMRYDEACSEAGYAFRAHSNNEKNMFLPAYIPEFDNITSPVVRRAVSQSIKVINAIIREQGESPVFINIELAREMSKDFDERRKLDSEMKENNAKNEKIIEKLKSTYGIKNPSGMDIVKLKLFEEQDGVCLYSLKHFDVTRLFEDGYVDIDHIIPYSISFDDSYNNKVLVLSSENRQKGNKIPMQYLTGEKRDKFEIYVNQNVRNLRKRQKLLKPELTNEDTEGFKERNLQDTKHISRVMLNLINDYLEFAPSETGKIKRVTAVNGRVTAYVRKRWGINKVREDGDLHHAVDAVVIACITDGMIRKISKYSNYREVEYSFDDEGSTLVNRKTGEFIDRFPVPWKDFRRELEIRTSNDPAMYLRSVKLPGYIGVDVDEIKPCFVSRMPKHKVTGAAHKDTIRSPRLLDDGYVISKKNLTELKFDKNGEIEGYYNPSSDILLYNAIKKRLEEFDGNAKEAFKDPFYKPTSSGERGPLVKKVKCFEKQSLSVPVHGGTGVASNDSIVRTDVFYVEGEGYYFVPIYVADTIKDELPNRACTRDKKYSDWKVVDDSSFIFSLYPNDLIKIIPSNNKIKLLLNNKNSTLDKEIMVEEVFLYYTGFDISVSVASGITHDDSYKYRSIGKTMKAIEKYQVDVLGNYHKIGKEKRMPFNLKKR

SEQ ID NO: 7054 - protein, 1099 aa, synthetic construct
  REGION 1..1099: note = Synthetic
MAYGIGLDIGIGSVGWAVLALDHEENPWGIMDLGSRIFDAAEQPKTGASLALPRREARSMRRRLRRRRHRMERMRNLFINDGLLTEEQLYHLYDGNLEDVYALRVKALDERLTDEEVARVLLHLAHRRGFKSNRKAESKSAEAGELKKAISLNQETMEENRYRTVGEMFFKDSRYAEYKRNRGGNYLNTVDRSMVEEEARKILETQEKLGNSKLNKDFQNSYLSILLSQRQFDEGPGGNSHYGGNQILNKVGTCTFEDGSNGEPAEKRAPKVCYSFEYFNLLQKVNHLRLSSAKDNRGLDEEEREKVIALAKDKADLRFGKIRETLQISPEYRFQGVSYSTKEPREDTEKKAKFNFLPFYHQMRKILKSKAQIDIKEYTLDELDKIGQILAFYKGDDARRKELGKLRIEPKAIEALLELNGASKFSHLSLKAIRKITPFLEQGMTYDKACEAAGYDFRAHQEDKTFLLPANAPELEDITNPVVRRAIGQTIKVVNAIIRKQGSSPLYVNVELAREMAKDFQERKKIKDDNEANQSRNDRLMQEIKENYQRLNPSGMDLMKWKLWKEQDGKSPYSQKSIAPERLFETGYVDIDHIVPYSISFDDSYKNKVLVFSSENRDKGNRLPYQYLLKKYGQDTADRFKVWVGNNVRDYRKRQRLLKEKMTEEEMSGFKERNLSDTKYISRFMYNFIRDHLEFAPSETGKKKRVLAVNGMITSYLRKRWGIRKIRANGDKHHAVDAVVIACTTDKMIRDLTLYSEERENTYDVDERGSRLVNESTGEVLKGFPLPWEGFRQELEARCSPHPERELAGLTFYMNKDLNDIKPIFVSRMPRRKVTGAAHKDTIRSARHIADGITVSKVPLNSLKLGKDGEITDYYNPDSDRLLYEALKTRLEDFKGDGKDAFQEPFYKPKADGSQGPLVKKVKIQAKATLAVPVEGKTGVAENDSMVRVDVFKVEGEGYYLVPVYVADTVKAELPQRAVTPGKPYQNWKIMDEKDFLFSLYPNDLIKIEAEKEISFSLVNPDSDLLKEIKSNQIFAYYVKTGIANGSIKVITNDNCYQKLSLGVKTLKSIKKYQVDVLGEVHPVKKEVRQKFTIQQKAR

SEQ ID NO: 7055 - protein, 1097 aa, synthetic construct
  REGION 1..1097: note = Synthetic
MTAREGGVYMRPYGIGLDIGISSVGWAAIALDHQDSPCGILDMGARIFDAAENPKDGASLAAPRREKRSQRRRLRRHRHRNERIRRMLLKEGLLSEAELTGLFDGALEDIYALRTRALDEALTKQEFARVLLHLSQRRGFRSNRRATAAQEDGKLLDAVSENAKRMADCGYRTVGEMLYRDAVFAKHKRNKGGEYLTTVSRAMIEDEVKLVFASQRRLGSAFASEALEQGYLDILLSQRSFDEGPGGNSPYGGAQIERMIGKCTFYPEEPRAARACYSFEYFSLLQKVNHIRLQKDGESTPLTSEQRLQLIELAHKTENLDYARIRRALQIPDAYRFNTVSYRIESDPAAAEKKEKFQYLRAYHTMRKAIDGASKGRFALLSQEQRDQIGTVLTLYKSQERISEKLTEAGIEPCDIAALESVSGFSKTGHISLRACKELIPYLEQGMNYNEACAAAGIEFHGHSGTERTVVLHPTPDDLADITSPVVRRAVAQTVKVINAVIRRYGSPVFVNIELARELAKDFTERKKLEKDNKTNRAENERLMRRIREEYGKMNPTGLDLVKLRLYEEQAGVCPYSQKQMSLQRLFEPNYAEVDHIIPYSISFDDSRRNKVLVLAEENRNKGNRLPLQYLTGERRDNFIVWVNSSVRDYRKKQKLLKPTVTDEDKQQFKERNLQDTKTMSRFLMNYINDHLQFGVSAKERKKRVTAVNGIVTSYLRKRWGITKIRGDGDLHHAVDALVIACATDGMIRQITRYAQYRECRYMQTDTGSAAIDEATGEVLRIFPYPWEHFRKELEARLSSDPARAVNALRLPFYLDSGEPLPKPLFVSRMPRRKVSGAAHKDTVKSPKAMAEGKVIVRRALTDLKLKNGEIENYFDPGSDRLLYDALKARLAAFGGDGAKAFREPFYKPRHDGTPGPLVKKVKLCEPTTLNVAVHGGKGVADNDSMVRIDVFRVEGDGYYFVPIYIADTLKPVLPNKACVAFKPYSEWRTMDDRDFIFSLYPNDLIRVTHKSALKLSRVSKESTLPESIESKTALLYYVSAGISGAAVSCRNHDNSYEIKSMGIKTLEKLEKYTVDVLGEYHKVEKERRMPFTGKRS

SEQ ID NO: 7056 - protein, 1095 aa, synthetic construct
  REGION 1..1095: note = Synthetic
MRPYAIGLDIGITSVGWAALALDADENPCGIIDLGSRIFYAAEHPQTGESLAAPRREARSARRRLRRHRHRNERIRSLMLEEQLISQDELEVLFDGRLEDIYALRVKALDEIVSRTDFARILLHISQRRGFKSNRKNPTTKEDGILLAAVNENKQRMSEHGYRTVGEMFLLDETFKAHKRNKGGNYITTVARDMVADEVRSIFSAQRELGASFASEEFEERYLEILLSQRSFDEGPGGNSPYGGSQIERMVGRCTFFPNEPRAAKATYSFEYFTLLQKVNHIRIVENGVASKLTDEQRRIIIELAHTTKDVSYAKIRKALKLSDKQLFNIRYSDNSPTEDSEKKEKLGIMKAYHQMRSAIDRVSKGRFAMMPRAQRNAIGTALSLYKTSDKIRKHLSDAGLEEVDIDAADSIGSFSKFGHISVKACDMLIPFLEQGMNYNEACAAAGLNFKGHDAGEKSKLLHPKEEDYEDITSPVVRRAIAQTIKVINAIIRKEGCSPTFINIELAREMAKDFRERNRIKKENDDNRAKNERLLERIRTEYGKNNPTGLDLVKLRLYEEQSGVCMYSLKQMSLEKLFEPNYAEVDHIVPYSISFDDSRKNKVLVLTEENRNKGNRLPLQYLKGRRREDFIVWVNNSVKDYRKRRLLLKETLTDEDLAGFKERNLQDTKTMSRFLLNYIADNLEFAESTRGRKKKVTAVNGAVTAYMRKRWGITKIREDGDCHHAVDAVVIACTTDAMIRQVSRYAQFRECEYMQTESGSVAVDTGTGEVLRTFPYPWPDFRKELEARLANDPAKVINDLHLPFYMSAGRPLPEPVFVSRMPRRKVTGAAHKDTIKSARELDNGYLIVKRPLTDLKLKNGEIENYYNPQSDKCLYDALKNALIEHGGDAKKAFAGEFRKPKRDGTPGPIVKKVKLLEPTTMCVPVHGGKGAADNDSMVRVDVFLSGGKYYLVPIYVADTLKPELPNKAVTRGKKYSEWLEMADEDFIFSLYPNDLICTTSKNGITLSVCRKDSTLPPTVESKSFMLYYRGTNISTGGISCITHDNAYEIGGLGVKTLEKLEKYTVDVLGEYHKVGKEVRQPFNIKRRKACPSEML

SEQ ID NO: 7057 - protein, 1090 aa, synthetic construct
  REGION 1..1090: note = Synthetic
MYRIGLDIGIASVGWAVLETNSDGNPMRIIDLGSYVFDAAEDPKTGASLAKPRRDARGARRRLRRHKFRLQRIKKHIVRYGILSRDELEHLYDVPGEDIYRIRVEALDRALDDQEFARLLIHLAQRRGFRSNRRVDAKDQDEGKLLSAVNENARLMKERGYRTVGEMLYKDPKFSTAKRNKEESYSNTVSRSQMEDEVRRIFEAQRKCGNQKASEELEKEYLDIYLSQRSFEEGPGGNAGDYCPYSGNQIEKMVGHCTFEPDEKRAVKASYTFERANLLQNINKMQLIDENGEMYPLNEEQRHALVERAHQTASLDYSKIRKTLNLKETERFAYVDYNQKSTIENAEKKQKFEYLKHYHELRKALNSVEKDLIQKCPVQVRDEIGTILTYYKTDLKIRAALDKIEDPFLTEEVKDAVMGMSGCSGVGSLSLKALNNIMPYLEQGMMYDKAAEAAGYNFRGHDRYNKGMYLPTLSEDDDIRNPVVRRAVSQTIKVVNAIIKKYGKPVAINVELARETARTFEDRQKILKQQKKNREANQKTKRLLQEEFHLLSPSHLDILKDRLFKEQDGICLYSGEKIDRTRLFEDGYVQIDHIVPYSISWDDSYSNKVLVMTRENQQKGNRLPMEYLNGKKQDEFCVRVERQIRDLRKKTNLLMKSIPADKKESFKDRNLNDTKYICRFMLNYLNDHLLFDQSVDMGKRVTALNGSVTAYLRKRWGLNKVRGNGDKHHALDAVVIGCINNSLIMRVTQYFKHRENFLFEPEQHVQKKAEVPSPWPNFREEVEFRMADNPKAFYDRLSTKISLTNYSEEELEQVKPIFVSRMKVKKKTGSANDATIRGLKVLEDGQMVAISKVPLSTLRLDKNGEIKDYYHKEDDQLLYNALKDRLKEYGGSGEKAFTEPFYKPKANGDQGPLVRKVKTAKKITNGVVLNHGEGIASNGSMLRADFYRKNGKYYAVPVYVKDMVKDHLPDRAVTLKHPYDQWDKMDDNDFLFSLYPNDVVYIKFNVKNNKYQELHLVNKDSTLPEKKEFRELHGYYKSFDIATNSIKIITDDNCYYGKGIGIKTLPEIKKCAVDVLGNLIPVARETRKHR

SEQ ID NO: 7058 - protein, 1087 aa, synthetic construct
  REGION 1..1087: note = Synthetic
MLPYAIGLDIGISSVGWASVALDEEDKPCGIIGMGSRIFDAAEQPKTGDSLAAPRRAARSARRRLRRRRHRNERIRALMLREGLLSEAELAALFDGRLEDICALRVRALDEAVTNDELARILLHLSQRRGFRSNRKTAATQEDGELLAAVSANRALMQERGYRTVAEMLLRDERYRDHRRNKGGAYIATVGRDMVEDEVRQIFAAQRALGSTAASETLETAYLEILLSQRSFDAGPGEPSPYAGGQIERMIGRCTFEPDEPRAARATYSFEYFSLLEAVNHIRLTEAGESVPLTKEQREKLIALAHRTADLSYAKIRKELGVPESQRFNMVTYGKTDSADEAEKKTKLKQLRAYHQMRAAFEKAAKGSFVLLTKEQRNAVGQTLSIYKTSDNIRPRLREAGLTEAEIDVAEGLSFSKFGHLSVKACDKIIPFLEQGMKYSEACVAAGYAFRGHEGQDKQRLLPPLDNDAKDTITSPVVLRAVSQTIKVVNAIIRERGGSPTFINIELAREMAKDFSERSQIKREQDSNRARNERMMERIKTEYGKSSPTGLDLVKLKLYEEQAGVCAYSLKQMSLEHLFDPNYAEIDHIIPYSISFDDGYKNKVLVLAKENRDKGNRLPLEYLNGKRREDFIVWVNSSVRDWRKKQNLLKEHVTPEDEAKFKERNLQDTKTASRFLLNYIADNLAFAPFQTERKKRVTAVNGSVTAYLRKRWGIAKVRANGDLHHAVDALVIACTTDGLIQKVSRYACYQENRYSEAGGVIVDSATGEVVAQFPEPWPRFRHELEARLSDDPARAVLGLGLAHYMTGEIRPRPLFVSRMPRRKVTGAAHKETVKSPRALDEGQLVTKTPLSALKLGKDGEIPGYYKPESDRLLYEALKARLRQFGGDGKKAFAEPFHKPKHDGTPGPVVTKVKLCEPATLSVPVHGGLGAANNDSMVRIDVFHVEGDGYYFVPIYIADTLKLELPNKACVKIKKISEWKHMKPQDFMFSLYPNDLFRIVSKKGITLNLVSKESTLPTSVNVSDTLLYFVSAGIASACLTCRNHDNTYQIESLGIKTLEKLEKYTVDVLGNVHRVEKEPRMSFSQKGD

SEQ ID NO: 7059 - protein, 1087 aa, synthetic construct
  REGION 1..1087: note = Synthetic
MHPYAIGLDIGITSVGWAALALDGSENPCGILGMGSRIFDAAEQPKTGESLAAPRRDARGSRRRLRRHRHRNERIKSLMLAEELVSPDELSSLFCGQLEDIYALRVKALDCAVSRTEFARILLHISQRRGFKSNRKNPSTKEDGELLKAVSENKQRMEANGYRTVGEMLLRDEMFKDHKRNKGGNYITTVTRDMVADEVKAIFAAQRSFGSVFAGEKLESSYLGILLSQRSFDEGPGGNSPYGGSQIERMVGRCTFFPDEPRAAKATYSFERFSLLEKVNHIRIITNGKAEKLTAQQRNLIIDLAHSSKDVSYAKIRKTLELSDGQLFNIRYSGDASPEETEKKEKLGSLKAYHQMRSAFNKVSNGYFSMLPREQLNAIGTALSLYKTSEKITAYLEDAGLRKDDISIADSIGNFSGFGHISVKACDMIIPFLEQGMNYNEACAAAGIDFKAHGVGEKSHFLHPTEDDYADITSPVVRRAISQTIKVLNAIIRKEGCSPTFINIELAREMAKDFSERNKLKKENDENRRQNEKRLDRIKNEYGKNNPTGLDLVKLRLYEEQSGVCMYSLKQMSVEKLFSPNYAEVDHIIPYSISFDDSLKNKVLVLTEENRNKGNRLPLQYLTGQRREDFIVWVNNNVKNYKKRRILLKETLTEEDEAGFKERNLQDTKTMSRFLLNYIADNLEFAESVRGRKKKVTAVNGAVTSYMRKRWGITKIRENGDLHHAVDAVVIACTTDGMIQQVSRYAKYRECRYMHTDSCSIAVDPDTGEVLHQFPYPWQDFRKELEARLGRDPARIINDLRLPFYMSSGAPLPEPLFVSRMPKRKVTGAAHKDTVKSAKLLDNGYLVVKRPITDLKLKNGEIENYYEPQSDRLLYEALKTALIEHDGDAKKAFANGFRKPKSDGTAGPIVKKVKLYEPTTLNVSVHGGKGAADNDSMVRVDVFLSGGKYYLVPIYVADTLKPTLPSKAITASKPYSEWHEMSDEDFIFSLYPNDLICATSKKGLKLSLVNKDSTLPPSVEGKSFMLYYIRTNISNGGIKAITHDNSYEIGGLGIKTLEKLEKYTVDVLGEYHKVGKEVRQPFNIKRG

SEQ ID NO: 7060 - protein, 1087 aa, synthetic construct
  REGION 1..1087: note = Synthetic
MRSYAIGLDIGITSVGWATLALDGNENPCGIIGMGARIFDAAEQPKTGESLAAPRRAARSSRRRLRRHRHRNERIKNLMVSKGVLSSDELETLFDGRLEDIYALRVKALDGKVSRSEFARILLHLSQRRGFRSNRKNPSSKEDGALLKAVSENAERMEKHGYRTVGEMLLCDEAFKQHKRNKGGNYLTTVTRDMVADEARAIFAAQRSFGSEYASEEFENEYLEILLSQRSFDEGPGGNSPYGGSQIERMIGRCTFFPEERRAARATYSFEYFSLLQKVNHIRIVTNGAAERLTAEQRNTVIELAHTTKDLSYAKIRKALKLSDGQLFNIRYSDKASAEDTEKKEKLGVMKAYHQMRSAFEKQSKGRFDFVTTPQRNDIGTALSLYKTSDKIREYLKDSGFDEIDMDAVESIGSFSKFGHISVKACDMLIPFLERGMNYNEACAAAGLNFKAHDTGEKTRFLHPTEDDYEDITSPVVRRAISQTVKVINAIIRKEGGSPTFINIELAREMAKDFTERNKLKKENDENRAKNEKLLERIRTEYGKSDPAGLDLVKLRLYEEQGGVCMYSLRQMSLEKLFSPNYAEVDHIVPYSKSFDDSRKNKVLVLTEENRNKGNRLPLQYLTGQRRDNFIVWVNNNVRDYRKRRLLLKETLTDEDELGFKERNLQDTKTMSRFLLNYISDNLEFAESTCGRKKKVTAVNGAVTAYMRKRWGITKIREDGDLHHAVDAVVIACTTDGMIQRVSKYARLRECRYMPTEEGSLVIDDGTGEVLHQFPYPWRDFRKELEARIGTDPARTINDLRLPFYMSSGMPLPEPIFVSRMPKRKVTGAAHKDTVKSPKKLDKGCIVVKRPLTDLKLKDGEIENYYNRQSDRLLYDALKKALIEHGGDAHKAFAGEFHKPKSDGTPGPIVSKVKLLEPTTLNVPVHGGAGVADNDSMVRVDVFLTKGKYNLVPIYVADTLKPELPNKAIAAHKPYSEWPEMSDDDFVFSLYPNDLVCVTHKKGIKLTVTNKNSTLPPTVEGKSFMLYYISTNISGGSIKGITHDNTYEIGGLGAKTLEKLEKYTVDVLGEYHKVGKEVRQPFNIKRR

SEQ ID NO: 7061 - protein, 1087 aa, synthetic construct
  REGION 1..1087: note = Synthetic
MYPYAIGFDIGIASVGWAVVALDGEDRPFGIINMGSRVFDAAEQPKTGDSLAAPRREARSARRRLRRHQHRLERIRRLLAAEKVVSQAELDTLFEGKLEDIYALRVEALDAPVSNTGFARILLHIAQRRGFKSNRKSGTSKEDGELLAAVTANRALMSEKGYRTVGEMLLKDPQYSGNKRNKGGKYLTTVGRDMVEEEVRAIFKAQREQGQPFAAAELEEQYLEILLSQRSFDEGPGQGSPYGGSQIEKMIGKCTLETGEPRAAKASYSFEYFTLLQNVNHLRLMSGGESSPLSSAQRETLIALAHKTKDLNFSRIRKELGIPAGTTFNAVFYKNAEDYEEAEKKTKFCYLRAYHQMRAAFNKLAKNHFDGLSRQQKNELGRVLSTYKTSANIRHRLAAAGLSEIEIDIAETMSFSKFGHLSVKACDKLIPFLEKGMKYDEACDAAGYDFKGHDGETRTRLLQPAEDDFADVTSPVVRRAISQTVKVLNAIIRERGGSPTFINIELAREMARDFAERSKMKKDMDENRARNERIMERIRTEYGKERPTGQDLVKFKLWEEQHGECAYSQKHISIERLFEPGYVEVDHIIPYSISFDDGYKNKVLVFTEENRNKSNRLPLQYLQGKRREDFTVWVESSIRDFRKKQRLLKETITAEDEKKFKERNLQDTKTMSRFLLNYISDHLEFADFASGRKKHVTAVNGAVTSYMRKRWGITKIRENGDLHHAVDALVVACTTDGMIQQVSRYAALRECEYVQTEAGSMAVSQHTGEVLRQFPYPWPEFRRELEARLGDDPRRAVISQRFPVYANGDIPVRKLFVSRMPRRKVTGAAHKETIKSPKALDSGNVVVKRALTDLKLDPKTGEIANYYMPQSDRLLYEALKEVLKKHGGNGAKAFTAPFHKPKSDGTPGPVVNKVKLCEPTTLNVPVLKGAGVADNDSMVRIDVFHVENDGYYFVPIYIADTLKKELPNKACVAYKPYEQWKEMADKDFIFSLYPNDLLRVTHKTKLKLTKAQKESTLPDTYETKQEMLYYISANIHTAAIGCRNHDNTYEIGGMGIKTLEKLEKFTVDVLGEYHKVEKEPRMAFCRK

SEQ ID NO: 7062 - protein, 1086 aa, synthetic construct
  REGION 1..1086: note = Synthetic
MIPYAIGFDIGITSVGWAVVALDSEDKPYGIINMGSRVFDAAEQPKTGASLAAPRREARSARRRLRRHQHRLERIHRLLLTENVISQAELDTLFAGKLEDIYTLRVKALDAPVSRTEFARILLHIAQRRGFRSNRKAETAKEDGELLAAVSKNRALMAEKGYRTVGEMLLQDPLYAASKRNKGGQYIATVGRDMVAEEVHAIFRAQRQLGQPFASEELESRYLDILLSQRSFDEGPGEGSPYAGSQIERMIGKCTLEDGEQRAAKATYSFEYFTLLQNINHLRLLRGGEGSPLTPAQREALIALAHKTKELNFSHIRRELAIPADTTFNAVYYKNTDDAEEAEKKTKFSYLKAYHQMRTAFNKLSKNHFDTLTRAQKNELGRVLSTYKTSAKIRAALLPAGLSDAELDIAETLSFSKFGHISVKACDKLIPFLEKGMKYDEACAAAGYNFKAHSGRERTQLLHPTPDDLADITSPVVRRAVAQTVKVLNAIIRERGCSPTFINLELAREMAQDFTERNQAKKSMDDNRARNERLMERIRTEYGKEHPTGQDLVKLKLWEEQHGECAYSQKHISIEHLFEPDYAEVDHIIPYSISFDDGYKNKILVLAEENRNKGNRLPLQYLQGKRREDFIVWVENTIRSTPKKQRLLKEKLTSEDEKQFKERNLQDTKAMARFLLNYIGDHLAFADFAAGRKKHITAVNGAVTSYMRKRWGISKIRENGDLHHAVDALVIACTTDGMIQQVSRYAALRECEYVQTEGGSLAVSVHTGEVLKRFPYPWPEFRRELEARLGDDPRRAVISQRFPVYLNNDIPVRKFFVSRMPRRKVTGAAHKETIKSPKALQDGVVVTKRPLTSLKLDKNGEIANYYMPQSDRLLYEALKEQLMKYGGEGAKAFTQPFHKPKSDGTPGPIVNKVKLCEPTTLHVPVLKGTGVADNDSMVRIDVFYVEGEGYYFVPIYIADTLKKELPSKACVAFKPYEDWKAMSDESFIFSLYPNDLMRVTHKNKLKLTKAQKESTLPDTYETKQEMLYYISAGISVAAISCRTHDAAYEIKSMGIKTLEKLEKFTVDVLGEYHKVEREPRMTFNRK

SEQ ID NO: 7063 - protein, 1080 aa, synthetic construct
  REGION 1..1080: note = Synthetic
MLSYGIGLDIGIASVGWAVVALDNNELPYGIINMGSRIFDAAENPKDGASLALPRREARSMRRRLRRHRHRNERIRAMLVRRGILTQGSLDTLFDGQLEDIYALRVRALDQSVTAEEFARILIHLSQRRGFRSNRKAEASKEDGELLSAVSKNAERMRENGYRTAAEMFMKSEEYSEHKRNKGNSYISTVSRGMVEAEAKMIFAAQRSFGMSFASEETEGEYLSILLSQRSFDEGPGGDSPYGGNQIEKMIGKCTLEPDELRAAKASYSFEYFNLLTRINNIRIVEGGASVPLDNAQRALIVELAHKTEALDFAKLRKALELSPSQTFNLVYYRADETQEASERKQKFSFLRAYHELRRAFDKLSKGYINGMSREKRNAIAYALTAYKTEKSIRTGLENAGLTEDELNTALTIGSFSKFGHLSVKACDKLIPYLEQGMKYNDACAAAGYNFKAHDGEKRSRLLHITSDDMEPITSPVVRRAVSQTVKVINAIIRERGCSPTFVNIELAREMAKDFQERGRLKKEMDANASQNERVMEQIRELGKTQPTGQDLLKYLLWQEQDGRCAYSLKSIPIENLFDDGYAEIDHIIPYSISFDDSRRNKVLVLSKENREKSNRLPLQYLSGKRRDDFTVWVNTAVRDQKKRRNLLKEEISDVDRGKFIERNLQDTKTMSSFLMNYLNDNLEFAPSDKRRKRVTAVNGAVTSYLRKRWGIRKLRANGDTHHAVDALVIACTTDSLIQRVSRYSRWHESSTVEVDPETGEVIDRFPYPWPQFRKELEGRLTSDPMKNLRELNLPLYGDSEVPLRPLFVSRMPRRKVTGAAHKETIKSPAALDDGFLVVKKPLTELKLDKDGEISNYYMPQSDRLLYEALKRQLSAHGGDGKKAFTEPFHKPKSDGTPGPVVNKVKICEPSTMSVPILGGSGAADNDSMVRVDVFRVEGEGYYFVPIYVADTLKPELPNRACVAFKPYDQWKVMDDSNFIFSLYPNDLFKATSRKTLTLKLSQPDSTLPPEYCVKSELLYFKGADISSASFAAINHDNSYKARGIGIKTLENLEKYTVDVLGTYHAVGKETRQPFYKKRG

SEQ ID NO: 7064 - protein, 1058 aa, synthetic construct
  REGION 1..1058: note = Synthetic
MLPYAIGLDIGIASVGWAVVGLDTNERPFCILGMGSRIFDKAEQPKTGASLALPRREARSLRRRLRRHRHRNERIRNLLLREKIISESELQDLFSGTLSDIYQLRVEALDRKLDDKEFSRVLIHIAQRRGFKSNRKNAAASQEDGKLLSAVTENQQRMNDKGYRTVSEMLLRDDKFKDHKRNKGGEYLTTVTRTMVEDEVHKIFSAQRTHGNLKADNQLESEYLEILLSQRSFDEGPGGDSPYGGSQIEKMIGKCTFFPEEKRAAKATYTFEYFNLLEKINHIRLVSKDNLPEPLSDFQRRSLIELAYKVENLTYDRIRKELHISPELKFNTIRYESDDLPENEKKQKLNCLKAYHEIRKALDKLGKGTINTLSKEQLNTIGTVLSMYKTSEIIKNKMEQIPAEIVDKLDEEGINFSKFGHLSIKACELIIPGLEKGLNYNDACEEAGLNFKAHNNEEKSFLLHPTEDDYADITSPVVKRAASQTIKVINAIIRKQGCSPTYINIEVARELSKDFYERDKINKRNEANRAENERSLEQIRKEYGKSNASGLDLVKFKLYQKQDGVCAYSQKQISFERLFEPNYVEVDHIIPYSKCFDDRESNKVLVFAKENREKGNRLPLEYLDGKKRESFIVWVNSKVKDYRKKQNLLKESLSEEEEKQFKERNLQDTKTVSKFLMNYINDNLIFSSSNKRKKHVTAVSGGVTSYMRKRWGISKVREDGDQHHAVDALVIVCTTDGMIQQVSKYVEYKECQYIQTDAGSLAVDPYTGEVLRSFPYPWARFHEDAVTWTEKIFVSRMPMRKVTGPAHKETIKSPKALGEGLLIVRKPLTELKLKNGEIENYYKPEADLLLYNGLKERLMEFGGDAKKAFAEPFPKPGNPQKIVKKVRLTEKSTLNVPVLKGEGRADNDSMVRVDVFLKDGKYYLVPIYVADTLKPELPNKACIAHKPYDEWATMDDGDFLFSLYPNDLIYIKHKKGIKLTKINKNSTLADSIEGKEFFLFYKTMGISSAVLTCTNHDNTYYIESLGVKTLESLEKCVVGVLGEIHKVRKEKRTGFSGN

SEQ ID NO: 7065 - protein, 677 aa, synthetic construct
  REGION 1..677: note = Synthetic
VPAAHLWPKRAIVKACDKLIPFLEKGLKYNDACAAAGYDFKGHDSETRTRLLHPTEDDFADVTSPVVRRAISQTVKVLNAIIRERGNSPTFINIELAREMARDFTERSKMKKDMDENRARNERIMERIRTEYGKEHPTGQDLVKFKLWEEQHGECAYSQKHLSLKHLFDPDYAEVDHIIPYSISFDDGYKNKVLVLAEENRNKGNRLPLQYLQGERRADFIVWVENSIHDYRKKQRLLKETITAEDEKGFKERNLQDTKTMSRFLLNYISDHLEFSDFSTGRKKHVTAVNGAITSYLRKRWGIAKIRENGDLHHAVDALVVACTTDGMIQQLSRYSTLRECKYVQTEAGSIAVSMHTGEVLKHFPYPWPEFRRELEARLGDDPRRAVISQRFPVYANGDIPVRKLFVSRMPRRKVTGAAHKETIKSPKALNDGVVVVKRALTSLKLDPKTGEISNYYMPQSDRLLYEALKEALKKHGGDAAKAFAAPFHKPKSDGTPGPVVNKVKLCEPTTLNVAVLNGAGVADNDSMVRIDVFRVENDGYYFVPIYIADTLKKELPNKACTRGKPYAEWKEMDAEDFLFSLYPNDLIRVTSQKGLTLSKAQKESTLPDTYETKQEMLYYTSASINTAAVACRTHDNSYEIKSMGIKTLEKLEKFTVDVLGEYHKVEKEPRMAFCRK

SEQ ID NO: 7066 - protein, 1089 aa, synthetic construct
  REGION 1..1089: note = Synthetic
MIPYAIGLDVGVASVGWAAVALDSKENPCGILDMGSRIFDAAEQPKTGASLAAPRREARSARRRIRRKRHRKERIRELMLSSGLLSEEELARLYEGELEDIYALRTRALDEAVSRQEFARILLHISQRRGFRSNRSAAADKENGLLLEAVSENAQRMKAGGYRTVGEMLWKDPLFRDHKRNKGGDYQATVSRDLIEEEVRQLFAAQRGFGCSFADASLEEAYLAILLSQRSFDEGPGVPSPYGGSQIEKMVGRCTFFPEEPRAARASYSFEYFTLLQKLAHIRLLQDGKSEPLTEEQRRALIELAHRSPNLDFARIRKELALPAECRFNAVSYRLELEPEKAEKKEKFNHLQAYHAMRTAIDRGGKGRFAQITPEQRDRIGTVLTLYKSEERVKQELADAGLEPCDIDSLLSLGGFSKTGHISIRVCKLLIPFLEQGMTYNEACDAAGLSFRAHTNTEKSSRLRLTEDDLADITSPVVRRAVSQTVKVLNALVRRYGGSPVFLNLELARELSRDFNERKAMERDMRDNRAKNERAMERIQKEFGKHNATGLDLVKLKLFEEQDGVCPYSLRHIDPARLFEPNYAEVDHIIPYSLSFDDSYNNKVLVLAEENRNKGNRLPLQYLNGQRREDFIVWVNTAVRSYRKRQKLLKERLTEEDEKQFKERALQDTKTASRFLLNLFQDHLEFAPSAAGKKKRVTAVNGAVTAYMRKRWGIVKLREDGDLHHAVDALVVACTTDAMIQQISRYAGYRECRYMQTETGSLALDESTGEVLREFPYPWPQFRKELEARLSPDPARKIRDLKLPFYFESGRPLPKPLFVSRMPRRKITGPAHLDTVKSPKALDEGSLIVKRPLTDLKLEKGEIKNYYRPDSDRLLYEALKARLAAFDGDGKKAFAEPFFKPRSDGTPGPLVKKVKLTEPTTLNVPVHGGKGAADNGSMVRIDVFHVEGDGYYFVPIYVADTLKAKLPNQACVAFKPHEQWKPMEDKDFLFSLYPNDLIRITHRRGIKLSLVNKESSLPPNQECTEAFLYYAAANISTGAISVRTHDNTYQISGLGIKTLGKLEKYTVDVLGEIHKVEQEPRLPFTQKRS

SEQ ID NO: 7067 - protein, 1092 aa, synthetic construct
  REGION 1..1092: note = Synthetic
MKYAIGLDCGIASVGFSVVELLNDQPYRIVKLGSRIFSEAENPKDGSSLAFPRREARGNRRRLRRHNHRLERIRFLIIKEKILTEDELANLFDTPLSDIYQVRTEALDRPLSNKEFARVLINLAQRRGFKSNRKTDSTDKENGLLLNAISENEETMQKNGYRTVGEMFFKDEKYSLHKRNKGGKYLNTVSRNMIEDEADKIFNAQKSFGCDFASDEIKEQYKNILLSQRPFDLGPGEGPENCRSPYFGNQIEKMIGKCTFFPEEPRAAKATYSFQLFNLWQKINNIRIVSDNGSSRFLTEGERTKVFELCHKSPTVNYSKIRKELDISTDKRFSTVSYGFKEVEEVEKKTKFEYLKQYHNIRKALDKFQKGYIQKLSREELNCIGYALTVHKDDAKILNALKDFEIDEFLYDYILNISSFSKFGNLSVKACDMLIPYLEKGLTYDKACAEVGFDFKAHDKSERSFTLPAFSDELTDITNPVVRRAVSQTIKVVNAIIREQGTSPTYINIELARELSKNFADRKEIEKENKKNNENNSKIKEELYENFHKSNASGLDIVKLKLWREQDGICPYSQKPIKYELLFSDGYVDVDHIVPYSISFDDSYNNKVLVFADENRQKGNRLPLQYLTGEKQENFKVWVNANIKNFKKRQNLLKESISENEFKGFKERTLNDTKYLSRVLYNYINDHLIFEDFENGRKKHVTAVNGATTSYLRKRWGIKKIREDGDLHHAVDATVIACTTDALIQKVSKYSKYKELQYSENIVVDSEGEVVDSFPYPYPTFRKELEIRTCTDVNNMIKELYRLPNYSAEDIENIKPCFVSRMPNRKTKGAAHEDTIHSGKVKGYSISKVPLTRLKLGKDGEIENYYDKESDLLLYNALKKRLEEYGGNGEKAFADFNDENPFYKPKSDGTNGPIVKKVKTIKKSTMNVSVRNGNGIADNGPMVRIDVFHVENDGYYFVPIYTADTVKKELPNLACVQNKSYDEWKEMDEKDFCFSLYQNDLIRVTAKKDMKLSLVNKNSTLPKEIYGNGMFLYYNNSDIGTASITVFNSDGTHKIKSLGIKTLLNIEKFTVDPIGNVTKVNSEKRLKFNTNK

SEQ ID NO: 7068 - protein, 1090 aa, synthetic construct
  REGION 1..1090: note = Synthetic
MKEEYKMKYSIGLDCGISSVGFAVMELDSNDEPCRIINLGSRIFDKAENPKDGSSLALPRREARGTRRRIRRHQHRLERIRYLLVERNVLTQIELDELFSGNLQDIYQLRTEALDRKVSNKELARILINLAQRRGFKSNRKSEALDKEAGKLLNAVENNQQILIENHYRTVGEMFYKDKKFSQFKRNKAESYNNTVSRSMVESEIHQIFSAQRELGNSAATEDLEEKYTEIVLSQRPFDLGPGKGNKNSPSKYSGSQIEKMVGKCTLIKGEQRAAKATYSFQLFTLWQNINNIKIVSFNGEKVKLTDEERKKIFDLCHKSPSVTYEKIRKELALSADCIFVGLPYGDKSIEEVEKKRKFEYLKAYHQIRKALDKMKKGYISSLSVEELDAIGEAFSFHRDDSNVVEYLRSKNVREEIYDCLLENISGFAKFGHISVKACKMLLPYLEKGMTYDKACDAAGLDFKSHVSEKSLYLKSNSEELEDIKNPVVRRAVSQTVKVVNSIFRSQGHSPVYINIELARDLSKTLQERKKIESRMKENREKNEKIVELLKSDFNINYPTGMDIVKLKLWREQDGICPYTQKSIAYDKLFDNGYTDVDHIIPYSICFDDSYNNKVLTFSSENRQKRNRLPLEYLHGQSAEKFKVWVNSSVKNFKKRQNLLKESFTEEDRKEFKTRNLNDTKYLSRVLYNYINDTLLFEEYKGGRSRHVTAVNGAVTSYMRKRWGIEKIRENGDLHHAVDACVIACITQGTINKVTNYSKFKELRYSNDIVVSSEGEVIDSFPLPYREFRKELDIRTLDDPVRVLREVRLTNYSSEDIESVKPCFVSRMPSHKNTGAAHKDTIRSGKKEGYTITKTSLCDLKIGKDGEILNYYNREDDRLLYDAIKFRLLEFGGDGKKAFPPDFQFHKPKSDGTPGPVVKKVKIVERSSLNLPVRSGVAANGSMIRIDVFKVEGEGFYFVPIYVSDTVKPTLPNKACVAHKDYADWKEMSDNDFLFSLYPNDLVKITAKKDMKMSLIHDDSTLPPEKYGNELMMYYIGSDIATASIALENHDGSYKMRGLGVKTLVNIEKYVVDPIGNISKVNKEKRMYFR

SEQ ID NO: 7069 - protein, 1095 aa, synthetic construct
  REGION 1..1095: note = Synthetic
MRPYAIGLDIGITSVGWAALALDADENPCGIIGLGSRIFDAAEQPKTGESLAAPRREARSARRRLRRHRHRNERIRSLMLEEQLISQDELAALFDGRLEDIYALRVKALDEIVSRTDFARILLHISQRRGFKSNRKNPTTKEDGVLLAAVNENKQRMSEHGYRTVGEMFLLDETFKDHKRNKGGSYITTVTRDMVADEVKAIFSAQREFGASFASEEFEERYLAILLSQRSFDEGPGGNSPYGGSQIERMVGHCTFFPEEPRAAKATYSFEYFTLLQKVNHIRIVENGVTSKLTDEQRRIMIELAHTTKDVSYAKIRKALRLSDNQFFNIRYSDSASVEDTEKKEKLGLMKAYHQMRSAIDRISKGRFAMIPRAQRNAIGTALSLYKTSDKIRKYLTDAGLDEIDINSADSIGSFSKFGHISVKACDMLIPFLEQGMNYNEACAAAGLNFKGHDAGEKSKLLHPTEEDYEDITSPVARRAIAQTIKVINAIIRREGCSPTFINIELAREMAKDFKERNRIKKENDDNHAKNERLLERIRTEYGKNNPTGLDLVKLRLYEEQGGVCMYSLKQMSLEKLFEPNYAEVDHIVPYSISFDDSRKNKVLVLTEENRNKGNRLPLQYLKGRRREDFIVWVNNNVKDYRKRRLLLKEELTAEDESGFKERNLQDTKTMSRFLLNYIADNLEFAESTRGRKKKVTAVNGAVTAYMRKRWGITKIREDGDCHHAVDAVVIACTTDAMIRQVSRYAQFRECEYMQTESGSVAVDTGTGEVLRTFPYPWPNFRKELEARLANDPAKVINDLHLPFYMSAGRPLPEPVFVSRMPRRKVTGAAHKDTIKSARELDNGYLIVKRPLTDLKLKNGEIENYYNPQSDKCLYDALKNALIEHGGDAKKAFAGEFRKPKSDGTPGPIVKKVKLLEPTTMCVPVHGGKGAADNDSMVRVDVFLSGGKYYLVPIYVADTLKPELPNKAVTRGKKYSEWLEMADEDFIFSLYPNDLICATSKNGITLSVCRKDSTLPPTVENKSFMLYYRGTDISTGSISCITHDNAYKLRGLGVKTLEKLEKYTVDVLGEHHKVGKEVRQPFNIKRRKACPSEML

SEQ ID NO: 7070 - protein, 1088 aa, synthetic construct
  REGION 1..1088: note = Synthetic
MRDYGIGLDIGISSVGWAVVALDDNENPMGIVNMGSRIFDTAEQPKTGASLAAPRREARSARRRLRRHRHRNERIRKLITESGVLTQEELDGLYNGVQKDVYELRVRALDEKVSREDFVRILIHLSQRRGFKSNRKNAADGEDGKLLTAVNENKKRMEEHGWRTAGEMLYKDEFFSEHKRNVGGEYLSTLSRDMIENEAKAIFSAQRKFGADFAAEVFENSYLNILLSQRSFDEGPGGNSPYGGSQIEKMIGYCPFEKDQLRAAKATYSFEYFNLLQKVNHIRLLCDGESVPLSEGQRKKLIELAHKVASLNYSRIRKELGISENQRFNTLRYPAGAELQDVEKKEKFCYLKAYHEIRKAVEKNGKGRFALITKEQLNSIGTILSTYKSSENVQRKLREAGIEEYDIKTLEALNFSGFGHLSVKALDKITPYLEKGMVYSDACKEAGYDFRGHSSKNSRLLPPLSDDNNEITSPVVLRAVSQTIKVVNAIIRKQEKSPMFINIELAREMAKDFSERKKLEKDMETNRKKNEAVMDRIRTEYKVSHPSGIDLVKLKLFEEQDGRCAYSLKPISISRLFEPGYAEIDHIVPYSISFDDSYKNKVLVLTEENRNKGNRLPLQYLSGKKRDDFIVWVQNNVRNYRKRDLLLKEQLSEEELAGFKERNLQDTKTMSRFMQNYIRDNLEFAPSAKGRKKRVTAVNGAVTSYMRKRWGITKIREDGDLHHAVDALVIACTTDSLIQKVTKYSRYRECRYVKDESGSYVYSEATGEVLDKFPYPWPHFRKELEARMGNDPSKLIADLRIPFYMEQDAPEVKPLFVSRMPNRKVGGAAHKDTVKSARYADEGILLVKTPLTKLSLDKEGEIANYFNPDSDRLLYEALKERLAAFDGKGEKAFAEPFHKPKRDGTPGPVVKSVRLKEKSTLNVPVQGKTAVADNDKMVRLDVFKVEGDGYYFVPIYVADTLKKELPNKACVAGKSFNEWKTMNDSDFVFSLCSNDLVKVTHKKTITLSVVNSGSSLAKTYSGNEMLLYYKGANINSGAVKLINHDNSYCIESMGVKTLKSIEKYTVDILGEYHPVRKEKRQPFNIGGK

SEQ ID NO: 7071 - protein, 1109 aa, synthetic construct
  REGION 1..1109: note = Synthetic
MEEGGKVMKYGIGLDIGIGSVGWAVLALDHEENPWGIIDLGSRIFDVAEQPKTGASLALPRREARSMRRRLRRRRHRLERIRNLFINGGLLTEEQLEHLYDGNLKDVYGLRVKALDARLTDEELARVLLHLAHRRGFKSNRKAESLSTEAGELKKAISLNQKTMEENQYRTIGEMFFKDSRYAEYKRNRGGNYLNTVDRSMVEAEACKILETQEKLGNSKLTKAFQDTYLSILLSQRQFDEGPGGKSHYGGNQILNKVGNCTFEDGSHGEPAEKRASKVCYSFEYFNLLQKVNHLRLTSAKDNRGLDKGEREKVIALAKDKADLRFEKIRETLQISPEYRFQGVSYSTKESREDIEKKNKFNFLPFYHQMRKILKSKAKIDIREYSLDKLDKIGQILAFYKGDDTRRKELAGLEIAPKAVEALLELNGASKFSHLSLKAIRKITPFLEQGMTYDKACEAAGYDFRAHQEDKSFLLPANASELEDITNPVVRRAIGQTIKVVNAIIRKQGSSPLYVNVELAREMAKDFQERKKIKDDNEANQSQNDKLMQEIKENYQRLNPSGMDLMKWKLWKEQDGKSPYSQKSIATERLFETGYVDIDHIVPYSISFDDSFKNKVLVFSWENRDKGNHLPYQYLLQKYGQDAVDRFKVWVGNNVRDYRKRQRLLKEKMTEEEISGFKERNLNDTKYISRFMYNFIRDHLEFAPSETGKKKRVLAVNGMITSYLRKRWGIRKSRANGDKHHAVDAVVIACTTDKMIRDLTLYSEERESKYDVDERGSRLVNESTGEILKEFPFPWDGFRQELEARCSEHPGRGLAGLTFYMNKDLNDIKPIFVSRMPRRKVTGAAHKDTVRSARHIADGITVSKVSLASLKMGKDGEIADYYNPDSDRLLYEALKKRLKDFDGDGKKAFNEPFYKPKADGSQGPLVKKVKIQAKSTLAVPVEEKTGVADNDSMVRVDVFKVEGEGYYLVPVYVADTVKKELLNRAIVAYKPYEEWKLMDDKNFLFSLYPNDLIEVESKRDIKFALTKEAKKESTLEQSFLTRKVLSYYQGTNISTAAIHLINHDKTYEQTSLGVKTLKSIKKFQVDVLGEIHPIKKEARQKFTIQQKNR

SEQ ID NO: 7072 - protein, 1105 aa, synthetic construct
  REGION 1..1105: note = Synthetic
MKYGIGLDCGISSVGFAAMELDENDEPRRIIKLGSRVFDKAENAKDGASLAAPRRAARSLRRRVRRHQHRLERIRRLIVTSGLLHEEELAHLFDGQLDDIYMLRTKALDATLTSTEFARVLIHLAQRRGFRSNRKSDAADKEAGKLLNAVSENQNRMQKSGWRTVGEMFYKDEAYADCKRNKGENYANTVSRDMVEDEIHKIFSAQRANASPYAGQDFENDYTAIVLAQRSFDEGPGAGPANAPSPYAGNQIERMIGQCTLIPEEKRAAKATYSFQVFNLWQKINHMRIEAPQNTRALTGEERARIFEFCHKSPGTTYAKLRKLLELTDEERFNISYGFKERDEVEKKAKFDFLKAYHQVRKTLDKLSKGLISKLSNDTLDAIGYAFTAYKNDDDILAYLSQNETAAHELTHEMTAQLLTMPSFSGFGHISVKACQKLISHLQQGMTYDKACEAAGIDFHGHNRGEKQKYLPPINPNDDENELNDITNPVVRRAVAQTIKVINTLIREMGESPSYINIELARELSKTFEERRDIETAQSKNAAKNAQAVAFLRENCRILSPTGQDILKYRLWIEQGEIDPYTQKKIRLEDAFGRNSLYDVDHIVPYSISFDDSFNNKVLTHQNENRTKGNRLPLAYMPTERQNDFKVWVMNHMKSNPKKRRNLLKEKISDNDIKSFRERNLNDTKYLSRVLYNYIRDHLAFADYKDRKNHVRAVNGAITSYMRKRWGIRKIRENGDLHHAADAAVIACVDEKMIQKVNRYSKMKELQYCDTPDGSAAFDEETGVVLSEFPQPYPHFRHELEARLLDSRELMQKALCKLPNYNWDEIEAAKPAFVSRMTNHKVTGQAHLDTIRSGKEPGCTITKTALNALKLDKNGEIQNYYNPDSDRLLYEALKARLLAFGGDGKKAFPPGFVLHKPKADGSDGPAVKKVKLIEKASLTVPVRSGHGVAANGDMVRIDVFYVPGDGYYFVPIYVSDTVKPELPNKACVAFKPYEEWKEMNDKNFLFSLYNNDLIKVKAKKNMTLSVKLKGSTLPDKLYGNDMFLYYNSAGITIATISVESHDGAYGISSMGIKTLVSIEKYTVDAIGNIHKVQKEPRQTFDRKAR

SEQ ID NO: 7073 - protein, 1032 aa, synthetic construct
  REGION 1..1032: note = Synthetic
  REGION 112..148: note = misc_feature - Xaa can be any naturally occurring amino acid
MHRYAIGLDIGITSVGWAALALDAEENPCGMLDFGSRIFTGAEHPKTGASLAAPRREARGARRRLRRHRHRNERIRRLMVSGGLISQEQLESLFAGQLEDIYALRTRALDEXXXXXXXXXXXXXXXXXXXXXXXXXXXXXXXXXXXXXAAQRGFGAEYANEKLEAAYLDILLSQRSFDEGPGGDSPYGGSQIERMIGTCAFEPDQPRAAKAAYSFEYFSLLEKLNHIRLVSGGKSEPLTDAQRKKLIELAHKQDTLSYAKIRKELELNEAVRFNSVRYTDDATFEEQEKKEKIVCMKAYHAMRKAVDKNAKGRFAYLTIPQRNEIGRVLSTYKTSAKIEPALAAAGIEPCDIAALEGLSFTKFGHLSIKACDKLIPFLEKGMNYNDACAAAGYDFRGHSKDGRQMYLPPLGDDCTEITSPVVRRAVSQTIKVINAIIRRYGTSPVYVNIELAREMSKDFAERNKIKKQNDDNRSKNEKIKEQVAEYKHGTATGLDIVKMKLFNEQGGICAYSQRQMSIERLFDPNYAEVDHIVPYSISFDDRYKNKVLVLTEENRNKGNRLPLQYLTGERRDRFIVWVNNSVRDFQKRKLLLKEELTPEEENDWKERNLQDTKFVSSFLLNYINDNLLFAPSVRRKKRVTAVNGAVTDYMRKRWGISKVREDGDRHHAVDAVVIACTTDALIQKVSRYESWHERHYMPTENGSILVDPATGEIKQTFPYPWAMFRKELEARLSNDPSRAVADLKLPFYMDADAPPVKPLFVSRMPTRKVTGAAHKDTVKSARALADGLAIVRRPLTALKLDKDGEIAGYYNKDSDRLLYDALKARLTEYGGNAAKAFAEPFYKPKSDGTPGPVVNKVKLTEPTTLSVPVQDGTGIADNDSMVRIDVFRVVGDGYYFVPVYVADTLKQELPDRAVVAFKAHSEWKVMSDGDFVFSLYPNDLVKVTRKKDVILKRSFDNSTLPETIASNECLLYYAGADISTGAISCVTNDNAYSIRGLGIKTLVSMEKYTVDILGEYHPVKKEERQRFNTKRG

SEQ ID NO: 7074 - protein, 1192 aa, synthetic construct
  REGION 1..1192: note = Synthetic
LFCGFEKKFCKPHIVNSDGKASRRAGETVENVEKSLDKSRNVLYYICSSLYHTKNCSGYYDKVVNRRALMPRLARGIISNSEKANFVDSKQKYSKQKYTWNGRGHMHRYAIGLDIGITSVGWAAIALDAEENPCGMLDFGSRIFTGAEHPKTGASLAAPRREARGARRRLRRHRHRNERIRRLMVSGGLISQEQLESLFAGQLEDIYALRTRALDEQVAREELARIMLHLSQRRGFRSNRKGGADAEDGKLLEAVGDNKRRMDEKGYRTAGEMFFKDEAFAAHKRNKGGNYIATVTRAMTEDEVHRIFAAQRGFGAEYANEKLEAAYLDILLSQRSFDEGPGGDSPYGGSQIERMIGTCAFEPDQPRAAKAAYSFEYFSLLEKLNHIRLVSGGKSEPLTDAQRKKLIELAHKQDTLSYAKIRKELELNEAVRFNSVRYTDDATFEEQEKKEKIVCMKAYHAMRKAVDKNAKGRFAYLTIPQRNEIGRVLSTYKTSAKIEPALAAAGIEPCDIAALEGLSFTKFGHLSIKACDKLIPFLEKAMNYNDACAAAGYDFRGHSKDGRQMYLPPLGDDCTEITSPVVRRAVSQTIKVINAIIRRYGTSPVYVNIELAREMSKDFAERNKIKKQNDDNRSKNEKIKEQVAEYKHGTATGLDIVKMKLFNEQGGICAYSQRQMSIERLFDPNYAEVDHIVPYSISFDDRYKNKVLVLTEENRNKGNRLPLQYLTGERRDRFIVWVNNSVRDFQKRKLLLKEELTPEEENDWKERNLQDTKFVSSFLLNYINDNLLFAPSVRRKKRVTAVNGAVTDYMRKRWGISKVREDGDRHHAVDAVVIACTTDALIQKVSRYESWHERHYMPTENGSILVDPATGEIKQTFPYPWAMFRKELEARLSNDPSRAVADLKLPFYMDADAPPVKPLFVSRMPTRKVTGAAHKDTVKSARALADGLAIVRRPLTALKLDKDGEIAGYYNKDSDRLLYDALKARLTEYGGNAAKAFAEPFYKPKSDGTPGPVVNKVKLTEPTTLSVPVQDGTGIADNDSMVRIDVFRVVGDGYYFVPVYVADTLKQELPDRAVVAFKAHSEWKVMSDGDFVFSLYPNDLVKVTRKKDVILKRSFDNSTLPETIASNECLLYYAGADISTGAISCVTNDNAYSIRGLGIKTLVSMEKYTVDILGEYHPVKKEERQRFNTKRG

SEQ ID NO: 7075 - protein, 1080 aa, synthetic construct
  REGION 1..1080: note = Synthetic
MNYKIGLDIGITSVGWATVNLDSNDEPYKIIDMGVRIFDAAENPKDGASLALPRREARGARRRIRRKKHRLDRIRALIFSKDLLTEDQFNNLFGHKKLKDIYEIRVEALDRLLNQDEITRLLIHLAQRRGFKSNRKSEKLAEEESGKLLKAVEINKKLMLEKGYRTVGEMLLKDPKFADHKRNKSDDYSHTVGRDLVLEEVQMIFDCQRKYGSEILNDEFESKYVEILFTQRSFDNGPGLPSPYSGDQIEKMIGMCRFEKKEKRAPKAAFSAEYANLLQNINNIRVNINGESRFLTGEERRAIKELAFKSPALTYAKIRKELKFTESVLFSTLNYGNKSINDVEKSAKFDYLKNYHKVRVALDKIEKNRICDYSIEALNGIGYAFTVYKTDQKIADYLNDFNISRKDLEVLLLHVGGFSKFANLSTKALDKIIPFLEQGFKYNVACEKADYNFKGHDGKEKQLLLPAEIDEITEVTSPVVRRAIAQTRKVINSIIRQYGESPTFIGIELAREMAKDFSDRNRIEKEMKENQAQNERIKQEISDQGVLYPSGIDIVKLKLWKQQDGICPYSLKEIQIDRLFEVGYADIDHIIPYSISFNDSYANKVVVLASENRQKGNRLPLHYLKGDKADKFKVWVNNTIRDKNKKMNFLKEDITEEDRKRFKERNLNDTKHVSRFMYNYLNDYLLFAENNTGKKKKVTAVNGAVTSYLRKRWGISKVREDGDLHHAVDALVVACTSDGMIQKVSRHCDYKEKRYVQLDEHVVDKKTGEIIEKFPMPWEGFRNELDIRLMDDPMKFLNSIGEFTEDNIKPIFVSRMPKRKITGAAHKETIFSPKLKDEGLILLKRPLEKLKLDKDGEIENYYNPNSDRKLYQELKEQLVKYNNDGKKAFSEPFYKPTKNGEKGPVVKKVKVYEKASLTVDVHDGKGVAYNDSMIRIDIFHVEGEGYYFIPIYIADRMKKELPSKAVVAHKPYKEWKEMNDKDFIFSLYPNDLIRIEGKKELKLSAISIKGTLSKEYICKEIHAYYVKSGINSGVITIINHDNTYTIQSLGIKTLKTLEKYQVDPLGNHYKVGKEKRMPLK

SEQ ID NO: 7076 - protein, 1112 aa, synthetic construct
  REGION 1..1112: note = Synthetic
MWGVISFSEKRRIAMLPYGIGLDIGITSVGWATVALDENDRPYGIIGMGSRIFDAAEQPKTGESLAAPRRAARSARRRLRRHRHRNERIRALILRENLLSEGQLLHLYDGQLSDVYSLRVKALDERVSNEEFARILIHISQRRGFKSNRKGASSKEDGELLAAISANLERMQQQGYRTVAEMYLKDPIYQEHRRNKGGNYIATVSRAMVEDEVHQIFTGQRACGNPAATKELEEAYVEILLSQRSFDDGPGDGSPYAGSQIERMIGKCQLEKEAGEPRAAKATYSFEYFSLLAAINNISIISSGQLSPLTKEQREMLIALAHKTSELNYARIRKELGLSEAQRFNTVSYGKMEISEAEKKTKFEHLKAYHKMRREFERIAKGHFASITIEQRNAIGDVLSKYKTDAKIRPALREAGLTEVDIDAAEALNFSKFGHISIKACKKIIPWLEQGMKYSEACNAAGYNFKGHDGQEKSHLLPPLDEESRNVITSPVALRAISQTIKVVNAIIRERGCSPTFINIELAREMSKDFYERIEIKKEQDGNRAKNERMMERIRTEYGKASPTGQDLVKFKLYEEQGGVCAYSLKQMSLAHLFDPDYAEVDHIVPYSISFDDGYKNKVLVLAKENRDKGNRLPLQYLQGKRREDFIVWVNSCVRDYKKRQRLLKESISEDDLRAFKERNLQDTKTASRFLLNYISDHLEFAQFATERKKHVTAVNGSVTAYLRKRWGITKIRENGDLHHAVDALVIACTTDGLIQQVSRFAQHHENQYSLAGDSRFIIDPETGEVIKEFPYPWPRFRQELEARLSSNPGLAVHDRGFLLYMTENIPVHPLFVSRMPRRKVTGAAHKETIKSGKAQKDGLLIVKKPLTDLKLDKEGEIANYYNPMSDRLLYEALKKRLMAFSGDGKKAFADPFYKPKSDGTQGPLVNKVKLCEPSTLNVSVIGGKGVAENDSMVRIDVFRVEGDGFYFVPVYVADTVKPGLPNKACVAHKPYTDWKEMRESDFLFSLYPNDLMKVTHKKALILTKAQKDSDLPDCKETKSEMLYFVGANISTASLTGRNHDNSYMINGFGIKTLENLEKYTVDVLGEYHPVRRETRQTFTGGNRHGIQEYFD

SEQ ID NO: 7077 - protein, 1087 aa, synthetic construct
  REGION 1..1087: note = Synthetic
MLPYAIGLDIGITSVGWAALALDGNERPCGIIGMGSRIFTAAEQPKTGESLAAPRRAARSARRRLRRHRHRNERIRSLLVSSGVVTPSELDSLFDGQLEDIYALRTRALDEQLCGAELARILLHISQRRGFRSNRKGGVSKEDGLLLDAVNENVARMQKHGYRTVGEMFFRDEVFKDHKRNKGGEYITTVKREMVADEVRAIFSAQLSLGSTAASEELENRYLDILLGQRSFDEGPGGNSPYGGSQIERMVGRCTFFPDEPRAARATYSFEYFSLLEKVNHIRIIRGGEVSKLTDEQRSRTIELAHMAKDVSYAKLRKELGLSDNELFNIRYPNDSTVEQTEKKEKLGSMKAYHQMRTEIDRISKGRFAMMPREQRNAIGTALSLYKTSDKIRAYLESAGLDELDIAAADSIGSFSKFGHISVKACDMLIPFLERGMNYNEACAAAGIDFRAHNAGERAMYLHPTEDDYAEITIPVVRRAISQTVKVLNAIIRKQGGSPTFINIELAREMANDFSERNKLKRENDENRAKNERLLERIKTEYGKRNPTGLDLVKLRLYEEQGGVCMYSLRQLSLEKLFAPNYAEVDHIVPYSISFDDSRKNKVLVLTEENRNKGNRLPLQYLTGQRRDDFIVWVNNNVKDPRKRKLLLKENLTDAEAAGFKERNLQDTKTMSRFLLNYIADNLEFAESRCGRKKKVTAVNGVITSYMRKRWGITKIREDGDLHHAVDAVVIACTTDAMIQQVSRYARFRECEYMHTSSGSIAVDSGTGEVLRTFPYPWHDFRKELEARLANDPARVINDLRLPFYAESGLPLPEPVFVSRMPERKVTGAAHLDTVKSPRELKNGLLIIKKPLTELKLKNGEIDGYYDPDSDRLLYNALRQRLIECGADAKAAFADGFRKPKSDGTPGPVVKKVKICESATLGVPVHGGKGVAGNDSMVRVDVFLAGGKYLLVPIYVADTLKPELPNRAVAAHKPYSEWREVSDDDFIFSLYPNDLICATHKKGIKLSVCQKGSSLPPTVVEKSLMLYYKGTDISTGAITCITHDHSYEARGIGVMTLEKLEKYTVDVLGEYHKVKKEVRQPFNMKRS

SEQ ID NO: 7078 - protein, 1086 aa, synthetic construct
  REGION 1..1086: note = Synthetic
MSYSVGLDIGITSVGYAVLELDHSDEPKRIIKFGSRIFDVAENSKDGSSLAKPRRDARGARRRLRRHKHRLDRIKNLIVNENILTQSQLDCLYDGQLRDIYEIRFIALDESLSDEEFARVLIHIAQRRGFKSNRKSDANEKEAGKLLKAVKENEELLESKDYRTIGEMLYKDIKFSENKRNKSESYSNTFSRDLVLDEVQKIFAKQRNLDMSFASEEIEEKYTEILMSQRAFDEGPGGKSPYGGNQIEKMIGKCTFEKENGELRAPKSSYSFELFSLLQNVNNLRIVTYQNSRSLTNDERKLLIDLSHKVASLNYSRIRKELNLTEEERFGSINYGKKTIYEVEKKTKFEHLKSYHKIRIAFDKISKGYIKTCDKQRLNDIGYVLSVYKTDKNIKECLSERGATSEEIEAVLSLSGFSKFGHLSIKACNKLIPYLEEGKRYDEACTLAGYDFKRHKVFEKQKYLPIVIDEFDNITSPVVRRAVSQTIKVFNAIIREQGCSPTFVNIELSREMSKNYKEREKIKKEMNENKVVNDRIKERIEKEFNKINPTGMDFVKLKLWEEQGGICPYSLESIKVERLFEVGYVDVDHIMPYSISFDDGYKNKVLVKTRENRQKGNRLPLQYLEGKKKEDFIVWVTNNVRNYQKRQILLKENFTDSDLNGFKERNLQDTKYISKVMYNLINDYLEFAPTVTNKKKRVTAVNGVVTSYARKRWGIQKIREDGDLHHAVDAVVVACVTDGMINKISKYSKYQEIEYMQHDNGSEIINLRTGEVIDRFPLPWKDFRKELDIRLCNNPKQMLKEVPLSNYEGVNLDEINPCFVSRRPRRKVTGAAHKETIKSSKFEDEGYVILKRPLSDLKFDKNGELKNYYNPSSDTRLYNALKEQLEMFGGDAKMAFAKPFYKPTKSGKQGPLVKKVKLLEKSNLNVSVHKGNGVAENDRMVRVDVFFVEDEGYYFVPIYVPDTLKETLPNKACVANKPKDYWVEMSDENFIFSLYPNELLKVTGRRDMKLSLINSKSSLPKQLIVSEIMLYYSGLDSSTGAITAINHDNTYKIRSIGKTVKSIEKYHVDMLGNYYKVGKEKRQYFK

SEQ ID NO: 7079 - protein, 1087 aa, synthetic construct
  REGION 1..1087: note = Synthetic
MYPYAIGFDIGITSVGWAVVALDVEDKPFGIINMGSRIFDAAEQPKTGASLAAPRREARSMRRRLRRHRHRLERIRHLLVAENVISQAELDTLFEGRLEDIYALRVRALDAAVSNTDFARILLHIAQRRGFKSNRRSGTSKEDGELLAAVSANRARMVEKGYRTVGEMLLKDPQYRDKKRNKNVQYIATMGRDMAEDEIRAIFKTQRGLGQSFAAETLEEQYLEILLSQRSFDEGPGDGSPYAGSQIERMIGKCTLEPEEPRAAKACYSFEYFTLLQNINHLRLIRGGESSPLSDAQREELIALAHKTKDLNFSRIRKELDIPADTIFNTVSYKNADAYEETEKKTKFCYLKAYHQMKAAFNKLSKNHFDTLTRQQKNELGRVLSTYKTSANIRPRLAEAGLSEPEIDIAETMSFSKFGHISAKACDKLIPFLEKGMKYNDACAAAGYDFKSHGGEPLTRLLHPAEDDFSDITSPVVRRAISQTAKVLNAIIRERGCSPTFINIELAREMARDFAERSKMKKDMDANRARNEKIMERIRTEYGKETPTGQDLVKFKLWEEQHGECAYSQKHLSIEHLFDPDYAEVDHIVPYSISFDDSYMNKVLVLAEENRNKGNRLPLQYLQGRRREDFIVWVENSIHDPRKKRRLLKETVTSEDEKKFRERNLQDTKTMSRFLLNYISDHLEFSAFATGRKKHVTAVNGTITSYMRKRWGITKIRENGDLHHAVDALVVACTTDGMIQQLSRYSALRECAYVQTETGSVAVSMHTGEVLKHFPYPWPEFRRELEARLGDDPRRAVISQRFPVYVNGDIPVRKLFVSRMPRRKVTGAAHKETVKSPKALNDGIVVVKRALTDLKLDPKTGEISNYYMPQSDRLLYEALKEELKKHGGDGSKAFAAPFHKPKSDGTPGPVVNKVKVCEPTTLNVPVLGGTGVADNDSMVRIDVFHVENDGYFFVPIYIADTLKAELPNKACVAHKPFEQWKEMSDENFVFSLYPNDLLRATHKTRLKLAKAQEDSTLPDTYETKQEMLYYISADIAAASITCRNHDNSYRIRGMGIKTLENLEKFTVDVLGEYHKVEKEPRMAFSRK

SEQ ID NO: 7080 - protein, 837 aa, synthetic construct
  REGION 1..837: note = Synthetic
MIGKCTLEDGEQRAAKATYSFEYFTLLQNVNHLRLLRGGEGSPLTPAQREALIALAHKAKELNFSHIRRELAIPADTTFNAVYYKNTDDAEEAEKKTKFSYLKAYHQMRTAFNKLSKNHFDTLTRAQKNELGRVLSTYKTSAKIRAALLPAGLSDAELDIAETLSFSKFGHISVKACDKLIPFLEKGMKYDEACAAAGYDFKAHSGRERTQLLHPTPDDLADITSPVVRRAVAQTVKVLNAIIRERGCSPTFINLELAREMAQDFTERNQAKKSMDDNRARNERLMERIRTEYGKEHPTGQDLVKLKLWEEQHGECAYSQKHISIEHLFEPDYAEVDHIIPYSISFDDGYKNKILVLAEENRNKGNRLPLQYLQGKRREDFIVWVENTIRSTPKKQRLLKEKLTSEDETQFKERNLQDTKTMARFLLNYIGDHLAFADFAAGRKKHITAVNGAVTSYMRKRWGISKIRENGDLHHAVDALVIACTTDGMIQQVSRYAALRECEYVQTEGGSLAVSVHTGEVLKSFPYPWPEFRRELEARLGDDPRRAVISQRFPVYLNNDIPVRKLFVSRMPRRKVTGAAHKETIKSPKALQDGVVVTKRPLTSLKLDKNGEIANYYMPQSDRLLYEALKEQLMKYGGDGAKAFTQPFHKPKSDGTPGPIVNKVKLCEPTTLHVPVLKGTGVADNDSMVRIDVFYVEGEGYYFVPIYIADTLKKELPSKACTRGKPYVEWKEMETKDFQFSLYPNDLMRVTHKNKLKLTKAQKESTLPDTYETKQELLYYISAGISVAAISCRTHDAAYEIKSMGIKTLEKLEKFTVDVLGEYHKVEREPRMAFNRK

SEQ ID NO: 7081 - protein, 1083 aa, synthetic construct
  REGION 1..1083: note = Synthetic
MLPYAIGLDIGIASVGWAAVGLDSEENPCGILQMGSRIFDAAEGERGKSLAAPRREARSVRRRLRRHRHRNERIRALLLREGVLTQEQMDTLFDGKLEDIYTLRVRALDQLVTPEEFSRILIHLAQRRGFRSNRKSGAAEGEDGKLLKAVSENEARMKQCGYRTVGEMILRDKAFADHKRNKGGAYLATVARAAVEKEAMAIFASQREKGACFAAQQLENEYIEILLSQRSFDEGPGGESPYGGNQTEKKVGTCTLEGSSEPRAARACISFEEFTLLDKLNNLRIVSSGSSAALDEEQRAKVLELCFKKDAVDFKAIRSCLKLEPELRFNLVNYYGKDKTQEEAEKKTKFSYLKAYHRIRKEFEKRQPGRYETLSREQLNEIGRVLSLYETTKGIQTALKDSGLTEADLETVDAIGSFSKFGRLSVKACEKLLPYLRQGMRYNEACEAAGYDFKAHSGQERTMLLPAPVEEYDNLTSPVVRRAGSQTIKVVNAIIREQGGSPTYVNIELARELSRDFNEREKIRRDNESNRSANEKLMEQLRKDYGRINPTGLDLVKLRLWQEQHGCCAYSGKNIPAEHLFDENYAEIDHIIPYSISFDDTRSNKVLVLAGENRDKGNRLPMQYLSGEKRERYIVWVERFIRDPRKKAKLLKEQFTEEDEKRFKERNLQDTKTMAVFLKNYIEDHLLFAPSSRRIKRVTAVSGAVTGFLRKRWGIAKVRANGDLHHAVDALVIACTTDGMIRRVTQYANSRETRYQSAQSARNREEFPQPWPHFHRELEARLEPDPQAVIAQLRLPFYMNGNVPEVRPLFVSRMPRRKVHGPAHEATVKSARMLEDGYTLKKVELTALRLDKDGEIKDYYNPESDRLLYDALRARLDECGGNGEKAFKDMEFRKPKRDGTPGPVVKKVKRMEKSTLNVSLPNGGVAIHDKRVRIDVFLVPGDGYYFVPIYVADTLKAELPDRASVAHKEYKDWKQMREEDFIFSLYPNDLVKVTHKSGMTFARANKESTLPESYQTKSEFVYYKSANISKGSLTVINHDNTYGIDSLGIKTLRGLEKYTVDMLGNVSPVGREKRQPFCFKRRG

SEQ ID NO: 7082 - protein, 1138 aa, synthetic construct
  REGION 1..1138: note = Synthetic
VGYYDKVTHRGALTPCHLARRYLFYGDKIQRRVGKIMAYGIGLDIGIGSVGWAVLALDHEENPWGIIDLGSRIFDAAEQPKTGASLALPRREARSMRRRLRRRRHRLERIRNLFIKCGLLTTEQLDHLYDGKLEDIYTLRVRALDERLTDEELARVLLHLAHRRGFKSNRKAESQSTEAGELKKAISLNQKTMEENHYRTVGEMFCKDPRYTEYKRNRGGNYLNTVDRAMVEDEARKILETQEKLGNRKLNGDFQESFLSILLSQRQFDEGPGGNSHYGGNQILNKVGTCTFEDGSNGEPAEKRSPKVCYSFEYFNLLQKVNHLRLTSSKDNRGLDKAERKRVIARAKNEADLRLGEIRKVLQIPSEYRFQGVSYNTKELPEETEKKTKFNYLPFYHQMRKLLESKAQFDIRNYSLDVLDKIGQILAFYKGDDARRKELEKLQLAPKAVEALLEMNGTTKFSHLSLKAIRKITPFLEQGMTYDKACEAAGYDFRAHRANKSFLLPANAPELEDITNPVVRRAIGQTIKVVNAIIRKQGSSPLYVNVELAREMAKDFQERVKIKNENEANQSQNDTLMKEIKETYQRMNPSGLDLVKWKLWKEQDGKSPYSQNSIVSERLFETGYVEIDHIIPYSISFDDSYKNKVLVFSWENQDKGNRLPYQYLLQKYGQGAADRFKVWVNNNVRDYRKRQRLLKEEMTEEEISGFKERNLSDTKYISRFMYNFIRNHLEFAPSETGKKKRVLAVNGRITSYLRKLWGIRKIRANGDKHHAVDAVIIACTTDKEIQDLTVYSEEREKKYEADENGGHLVNTSTGEVLKRFPFPWDGFQQELEARCSVHPERELAGLPFYMNKDLNDIKPIFVSRMPRRKVTGAAHEATVRCARQIEDEIALSKTALTDLKLDEDGEIKNYYNPDSDRLLYEALKEKLIQCKGQAKVAFKDPFYKPKTDGTPGPLVKKVKLKVKATLAVPVEGKTGVADNDSMVRVDVFKIEGEGYYLVPVYVADTVKKELPKKAIIAHKPYKKWKDMDEKDFLFSLYPNDLIYVESKKEMIFKIPPQKRKNSTLEPEFSCHKIFGYYQGTDRYAGAIDILTDDGAYLDHGQGVKRLLKIKKYQVDVLGNIHLVKKEIRRKFIIKQKAR

SEQ ID NO: 7083 - protein, 643 aa, synthetic construct
  REGION 1..643: note = Synthetic
MEEGGKVMKYGIGLDIGIGSVGWAVLALDHEENPWGIIDLGSRIFDVAEQPKTGASLALPRREARSMRRRLRRRRHRLERIRNLFINGGLLTEEQLEHLYDGNLKDVYGLRVKALDARLTDEELARSCCIRPIGGDLKAIGKQNHLSTEAGELKKAISLNQKTMEENQYRTIGEMFFKDSRYAEYKRNRGGNYLNTVDRSMVEAEACKILETQEKLGNSKLTKAFQDTYLSILLSQRQFDEGPGGKSHYGGNQILNKVGNCTFEDGSHGEPAEKRASKVCYSFEYFNLLQKVNHLRLTSAKDNRGLDKGEREKVIALAKDKADLRFEKIRETLQISPEYRFQGVSYSTKESREDIEKKNKFNFLPFYHQMRKILKSKAKIDIREYSLDKLDKIGQILAFYKGDDTRRKELAGLEIAPKAVEALLELNGASKFSHLSLKAIRKITPFLEQGMTYDKACEAAGYDFRAHQEDKSFLLPANASELEDITNPVVRRAIGQTIKVVNAIIRKQGSSPLYVNVELAREMAKDFQERKKIKDDNEANQSQNDKLMQEIKENYQRLNPSGMDLMKWKLWKEQDGKSPYSQKSIATERLFETGYVDIDHIVPYSISFDDSLKTKYWCFPGKTGIREIICPINIFCRSMDRMQ

SEQ ID NO: 7084 - protein, 1094 aa, synthetic construct
  REGION 1..1094: note = Synthetic
MRRIHMKYGIGLDCGIASVGYAVMQLDENDDPCRIIRLGSRVFNKAENPQDGASLAAPRREARGMRRRIRRHQHRLERIRYLLVSSGVLSKTELDNLFCGQLSDIYMLRAKALDEPLTAAEFSRVLIHLAQRRGFRSNRKTDAQDKEAGKILSAVSENTSEMERGGYRTVGEMFYMDEKFRQYKRNKGDDYAATVARSMVEDEMHKIFEAQRRFGMSFASKALETQYTEIALSQRPFDLGPGAGPKNAPSRYAGDQIGRMIGPCTLLPEEKRAPKASYSFQVFTLWQNINHLRIAAPGKEAHGLTDEQRWAVFELCHQKKDVKYTALRKLLALRDDEFFSILSYGAKEAVEVEKAAFNFLKPYHQIKTALNKLGKDYIRNLSADELDDIGYILTVQKTDDSIRPALEEKGFAPEVIDALLSCGSFSKFGHISVKACQMLIPYLEKGMTYDKACDAAGLDFRAHSKTEKSLYLSANSDYLCDIVNPVVRRAVSQTIKVVNAIIREQGCSPTYLNIELARELSKTFDERKKAEKSMKDNAALNSRVVERLQTEFGIVSPTGLDIVKFKLWQEQDGICPYSQKPILLEKLFAPGYVDVDHIIPYSICFDDSYNNKVLTFSKENRQKGNKIPMQYLTGKARDDFEIWVANTIHNRVKRQRLLKTELKPEDTEGFKTRNLNDTKYLSRVLYNFINDTLLFADFASDRKKHVRAVNGKVTSYMRKRWGIAKIRADGDLHHAVDAAVIACVTERMIQKVSTYSKYHEIYYVSDDEKSFAVDFNGEVIDEFPQPYPYFRKELDARTMADAKRAVKDCRFPHYSAAQEDAVQSCFVSRMPMRKVTGQAHDSTIRSGREPGFVISKVPLAKLKLGKDGEIENYYNPKSDTLLYNALKARLAEFGGSGEKAFPPDKPFYKPTASGEAGPLVKKVKIIEKSTFSPPIRGKCGTTKKQAVVRIDVFKPENDGYYFVPIYVSDTVKPELPNKACVAFKNASEWKEMQEADFLFSVYPNDLLRIKAKKDIKFTVSNKDSSLPKEILRNDVLVYYNSANIHTASILVLLHDNSYRLEGLGIKTLLSLEKYTVDPLGNCSKVGKEPRQRFR

SEQ ID NO: 7085 - protein, 1087 aa, synthetic construct
  REGION 1..1087: note = Synthetic
MYPYAIGFDIGITSVGWAVVALDGEDKPFGIINMGSRIFDAAEQPKTGASLAAPRREARSMRRRLRRHRHRLERIRHLLVAENVISQAELDALFEGKLEDIYTLRVKALDTAVSHADFARILLHIAQRRGFKSNRKSGTSKEDGELLAAVSANRALMVEKGYRTVGEMLLKDPQYGGSKRNKGSKYLATVGRDMVEEEVRAIFKAQREQGQAFATAELEEQYLEILLSQRSFDEGPGEGSPYRGSQIEKMIGKCTLEAGEPRAAKASYSFEYFTLLQNINHLRLICGGESRPLSDAQREFLIALAHKTKDLNFSRIRKELDIPADTTFNAVSYKSADGYEDAERKAKFCYLKAYHQMKAAFNKLSKGHFDSLARQQKNELGRVLSTYKTSANIRPRLAAAGLSEMEIDIAETMSFSKFGHISVKACDKLIPFLEKGLKYNDACAAAGYDFKGHDSETRTRLLHPTEDDFADVTSPVVRRAISQTAKVLNAIIRERGNSPTFINIELAREMARDFTERSKMKKDMDENRARNERIMERIRTEYGKEHPTGQDLVKFKLWEEQHGECAYSQKHLSLEHLFDPDYAEVDHIIPYSISFDDGYKNKVLVLAEENRNKGNRLPLQYLQGERRDDFIVWVENSIHDYRKKQRLLKEAITAEDEKGFKERNLQDTKTMSRFLLNYISDHLEFSDFSTGRKKHVTAVNGAITSYLRKRWGIAKIRENGDLHHAVDALVVACTTDGMIQQLSRYSTLRECEYVQTEAGSIAVSMHTGEVLKHFPYPWPEFRRELEARLGDDPRRAVISQRFPVYANGDIPVRKLFVSRMPRRKVTGAAHKETIKSPKALNDGIVVVKRALTDLKLDPKTGEISNYYMPQSDRLLYEALKEALKKHGGDAAKAFAAPFHKPKSDGTPGPVVNKVKLCEPTTLNVAVLNGAGVADNDSMVRIDVFHVENDGYYFVPIYIADTLKKELPNKACTRGKPYAEWKEMDAEDFLFSLYPNDLIRVTSQKGLTLSKAQKESTLPDTYETKQEMLYYTSASINTAAVACRTHDNSYEIKSMGIKTLEKLEKFTVDVLGEYHKVEKEPRMAFCRK

SEQ ID NO: 7086 - protein, 1096 aa, synthetic construct
  REGION 1..1096: note = Synthetic
MAYSIGLDCGISSVGYAVLELDSKEEPKRIIRLGSRIFDKAENPKDGSSLAKPRREARSARRRLRRHRFRLERVKSLIVEAGVLTKQELETLFEGRLPDIYALRVEALDRALLPAEFARVLIHLAQRRGFKSNRKTDASAKEEGELLGAVSKNEALMREKGYRTAGEMFARDALFSVCKRNKGENYLNTVSRSMVEDEIKLIFDAQRRAGNPHASQAMQARYLDIVLSQRSFEDGPGGNSPYGGNQIEKMLGACTFFPDEKRAVKASYSFQYFTLLQNINNLRIVCAGETRTLTSDEREAVKAAAFASAELTYDKLRKALGLADDEYFVALRYGKGDIAETEKAAKFNYLKAYHEIRKALKREKLDIGLLTKEQLNAVGYAFTVYKNDEKIGEALKQAGIGGRVLEALMKLPSFAKAGHISVKACEAIIPWLEQGLKYDQACEAAGFDFKAHIAGKKRFLPADEKEAPELGAITNPVVRRAVSQTVKVVNAILREMGGPPVYINIELSREMSKTFDERRQDESRMKENMAFNERIKQEIKDHFGKTNPTGMDIVKLKLWKEQDGRCPYSLESIDYARLFEDGYVDIDHIIPYSVSFDDSYKNKVLVMSAENRQKGNRLPLQYLQGKRRDDFVVWVGAHIRDARKRQMLLKEKLTEEDEAGFKQRNLQDTQYLSRFLLNFIWDHLDFAVSVTGKKKRVTAVNGAVTGYMRKRWGIQKIRENGDLHHAVDAVVVGCVTDGVIRKVSEYAKRREQYADAGGRIVDRRTGEVKDVFPPPWPDFRTEVEIRLMKDPARMLKEKPLANYAFVNPDGISPCFVSRMPQRKATGAAHKDTVRSPKALGEGLIVSKKPLTDLRLDAAGEIAGYYMPGSDPLLYGALQARLKEYGLYAGSGSAKDLEKRAAAAFAGPFFKPKADGSPGPVVKKVKIAEKASLTVGVHGGRGAAVNDSMVRIDIFYVAGEGYYYVPVYVADTVKPVLPNKACVQAKPYEQWKVMREEDFLFSLYPNDLVRVTAKKPLKMGLVHPASTIPKEMAVNGALLYYTGAGISAASITVINDDHTYVIHSLGVKTLVKLEKYQVDVLGNVSKVGREKRLGFAG

SEQ ID NO: 7087 - protein, 1088 aa, synthetic construct
  REGION 1..1088: note = Synthetic
MGYKIGLDIGITSVGWAVLELNNEDEPKRIIDLGTRIFDAAENPKDGSSLAKPRRDARGARRRLRRHRHRIERIKQLIKNSNLLTSSELESLYDNVKKDIYEIRVKALDSEIDRFDFARLLIHLAQRRGFKSNKKSDANDKEAGSLLSAVEANKKLMAEKGYRTIGEMLYKDEKFKDHKRNKGDDYSHTVDRKSMEDEIKLIFKSQRQFGNPFATQEFEKKYLDIYLSQRSFDEGPGGNSPYGGSQIEKMIGNCTFEDGEKRAAKACFSFEYFTLLQKVNSIRLNTPKGIIPLNKEQRDLVINLAFTTPDLKYAAIRKKLDLSDDETFVGLSGKDIEETEKKTKLGCMKAYHEIRKALDKVSKGRIKALSHEQLDDIGLIMTKYKSDENIRNGLLNAGIDKVDVEALLLLPGFSKFGHLSLKACRKLIPFLEQGLTYDKACEAAGYDFKAHSDNNKRPLLPQSAPELEDITNPVVRRAISQTIKVINAIIRKYGSPSFISVELAREMSKDFTERKKLEKLMKENQEYNERIAAYLKDELKIISPTGQDIVKYKLWKEQDGICPYSLTTLEINRLFEPGYCDVDHIIPYSISFDDSYKNKVLVKSNENRQKGNRLPLEYLSGERKEKFIVWVNNNVKDTEKKLRLLKEKITEEDINKFKERNLNDTKYISRFMLNYINDYLQFADSSAGRKKRVTAVNGAVTSFVRKRWGIAKIREDGDLHHAADAAVIACITDGMIQKISRYSKYHENYYYDHDLDKNTGELLEKFPMPYPTFRKELEIRLSNSPSEYLKEIILPNYEGIDPDDIKPVFVSRMPKRKAKGAAHKDTLKSPKALSEGYTIVKRPLNMLKLDKDGEIEGYYNPSSDLLLYNALKERLKEFNGKADKAFAGEFRKPTSSGKPGPIVKKVKIMEKSSLVVGLNKGRCVADNDSMIRIDVFYVENDGYYFVPIYVADTLKPTLPNKAVIAFKPADEWKEMNDKDFIFSLYPNDLIKIKTKSKKKFSLVNPGSTLDKELLSNEFFAYYISANITIGTISIINHDNTYQIKSLGIKTLESIEKYQVDVLGNYSKVKREKRQYFRGCCDCHTEIFL

SEQ ID NO: 7088 - protein, 807 aa, synthetic construct
  REGION 1..807: note = Synthetic
MNNVRIKAREGMHMHQYAIGLDIGITSVGWAALALDADENPCGILDFGSRIFTGAEHPKTGASLAAPRREARGARRRLRRHRHRNERIRNLIVSSGLISQEQLDALFDGQLEDIYALRTRALDKTVTREELARIMLHLSQRRGFRSNRKGGTDAEDGKLLEAVGDNKRRMDEKGYRTAGEMFFKDEAFAAHKRNKGGNYIATVTRAMTEDEVHRVFAAQRSFGVDFASEKLEAEYLDILLSQRSFDEGPGGDSPYGGSQIERMIGTCTFEPDQPRAAKASYSFEYFSLLEKLNHIRLIEGGKSEPLTDAQRKKLIELAHKTDTLSYAKIRKELDLNEAVRFNSVRYTDEAPIAEQEKKEKIVCMKAYHAMRKAVDKNAKGRFNYLTVPQRNEIGRVLSTYKTSAKIEPALAAAGIELCDVEALEELSFSKFGHLSVKACDKLIPFLEKGMNYNDACTAAGYDFRGHSKDGRQMYLPPLSDDCTEITSPVVRRAVSQTIKVVNAIIRRYGTSPVYVNIELAREMSKDFSERAKIKKQNDENRSKNDRIKDQVAEYKHGTATGLDIVKMKLFNEQGGICAYSQRQMSVERLFDPNYAEVDHIVPYSISFDDRYRNKVLVLTEENRNKGNRLPLQYLTGERRDHFIVWVNNSVRDFRKRKLLLKEELTPEEENDWKVRNLQDTKTVSSFLLNYINDNLLFAPSMRRKKRVTAVNGAVTDYMRKRWGISKVREDGDCHHAVDAVVIACTTDALIQKVSRYESWHERHYMPTENGSILVDPATGEIKQEFPYPWAMFRKELEARLRALESGN

SEQ ID NO: 7089 - protein, 1086 aa, synthetic construct
  REGION 1..1086: note = Synthetic
MIPYAIGFDIGITSVGWATVALDGEDKPYGIIGMGSRIFDAAEEPKTGDSLAAPRREARGMRRRLRRRKHRLERIRHLLVAENVLTQTELDTLFAGRLEDIYALRVKALDEPVSHLEFARILLHIAQRRGFRSNRKAETSKEDGELLSAVSGNRTRMAKENYRTVGEMLLKDPLYAAYKRNKGGSYIATVGRDMVEEEVRAIFRAQRALGQPFAAESLEEGYLAILLSQRSFDEGPGEGSPYAGSQIERMIGKCTFEEGELRAAKASYSFEYFTLLQNVNHLRLIRGGEGTLLTDDQREALIALAHKTKELNFAHIRRELDIPADTTFNAVYYKNTENTEEAEKKAKFCYLKAYHQMRTAFNKLAKNHFDALTREQRNELGRVLSAYKTSAKIRPPLTAAGLSEAEIDIAETLNFSKFGHISVKACDKLIPFLEKGMKYDEACAAAGYDFKAHGGEERTHLLHPTPDDLADITSPVVRRAVSQTVKVLNAIIRERGCSPTFINIELAREMAQDFSERNQAKKRMDENRARNERLMERIRTEYGKENPTGQDLVKLKLWEEQHGECAYSQKHISIEHLFDPDYAEVDHIIPYSISFDDGYKNKVLVLAAENRNKGNRLPLQYLQGKRREDFIVWVQNSIHDSKKKQCLLKEKLTPEDEKQFKERNLQDTKTMARFLLNYIGDHLEFAAFTAGRKKHITAVNGAVTSYMRKRWGIGKIRENGDLHHAVDALVIACTTDGMIQQVSRYAQLRECEYVQTESGSLAVSLHTGEVLKSFPYPWPEFRRELEARLGDDPCRAVISQRFPVYLTGEIPVHKLFVSRMPRRKVTGAAHKETIKSPKALQDGVVITKRALTDLRLDKNGEIANYYMWESDRLLYEALKKRLQEHGGDGSKAFTEPFHKPKSDGTPGPIVNKVKICEASTLQVPVLRGDGVADNDSMVRIDVFRVEGEGYYFVPIYVADTLKKELPSKACVAFKSYADWKEMTDENFLFSLYPNDLMRVTHKNKLKLTKAQKESTLPATYETKQEMLYYVGAGIAVASIACRTHDAAYEIKSMGIKTLENLEKFTVDVLGNYHKVEREPRMAFNRK

SEQ ID NO: 7090 - protein, 770 aa, synthetic construct
  REGION 1..770: note = Synthetic
LDFAKLRKALELSPSQTFNLVYYRADETQEASERKQKFSFLKAYHELRRAFDKLSKGYINGMSREKRNAIAYALTAYKTEKSIRTGLENAGLTEDELNTALTIGSFSKFGHLSVKACDKLIPYLEQGMKYNDACAAAGYNFKAHDGEKRSRLLHITSDDMEPITSPVVRRAVSQTVKVINAIIRERGCSPTFVNIELAREMAKDFQERGRLKKEMDANASQNERVMEQIRELGKTQPTGQDLLKYLLWQEQDGRCAYSLKSIPIENLFDEGYAEIDHIIPYSISFDDSRRNKVLVLSKENREKSNRLPLQYLSGKRRDDFIVWVNTAVRDQKKRRNLLKEEISDADRGKFIERNLQDTKTMSSFLMNYLNDNLEFAPSDKRRKRVTAVNGAVTSYLRKRWGIRKLRANGDTHHAVDALVIACTTDSLIQRVSRYSRWHESSTVEVDPETGEVIERFPYPWPQFRKELEGRLTSDPMKNLRELNLPLYGDPEVPLRPLFVSRMPRRKVTGAAHKETIKSPAALDDGFLVVKKPLTELKLDKDGEISNYYMPQSDRLLYEALKRQLSAHGGDGKKAFTEPFHKPKSDGTPGPVVNKVKICEPSTMSVPILGGSGAADNDSMVRVDVFRVEGEGYYFVPIYVADTLKPELPNRACVGSKPYSKWKIMDDRDFIFSLYPNDLFKATSRKTLTLKLSQPDSTLPPEYCVKSELLYFKGADISTASFAAINHDNSYKVKGLGIKTLENLEKCTVDVLGTYHAVGKETRQPFYKKRG

SEQ ID NO: 7091 - protein, 1073 aa, synthetic construct
  REGION 1..1073: note = Synthetic
MNYRLGLDIGITSVGWAVLEHNEEQEPIKIVDLGVRIFDRAENPKDGSSLAQPRREARSARRRLRRHRHRLERIKRLLEEYDTISQSDLEDLFHSPQPLADVYELRHQGIHRQLANHEWARVLIHLAQRRGFKSNRKNEKDKEKEDGKLLAAVKTNQEIMLEKGYRTVGEMFYLDHKFASHKRNKAEDYGHTISRQQVLDEVSLLFERQRDFNNPYAKVEFEQAYTDIVSGQRSFDLGPGDPSPYGGNLIEKMRGNCTFEKDEPRAAKACYSFELFNLYQKINSIRIESSQDISRFLASEERELIVQLAHQKADLNYGIIRRTLGLTEEQRFNSLTYGSDDIVETEKKSKFNYLKSWHEIRKALDSVSKGRIQQLSIEQADLIGETLTLYKNEETISKKLLAADFSKHDVEALLPLTPRGFSHLSLKAIRRILPHLEQGYVYSEATTLAGYNFRAHDNSTKYKFLPLSDPQLNDITNPVVRRAVSQSIKVINAVVRKYGSPQLICIELSREMGKNFNDRKEIEKQIKQNTALNEQVRNKIIEYGNPNPTGQDIVKMKLWQEQDGRCAYSGDHIPIERLFEPGVADVDHIVPYSISFDDSYTNKALVKSSENRQKGNLLPCEYMKNDPAKLERFTVWVNTSVRNYNKRQRLLKRAITDEDRNKWKERQLNDTKYISRFMLNYIRDNLQFAPAEYLGKRRVIAVNGSITAYMRKRWGLKKDRLAGDLHHAQDAVVVACVTETMIRRITRYSQYYETRYSPNHFVDHETGEIINARQERFGVKFVEPWENFRLELESRLSDDPAIRISAYNLKNYLNPEEVKPIFVSRMPTRKNRGPAHKETIRSPRLAEEGFFVSKVNITDLTLDADGQIKGYYQPQSDLRLYEALRSRLREFNGDGKKAFKEPFYKPTDTGKSAPQVKKIKVIERSNLNVSVGSGIAANGDMVRVDVFKTEEGYYWVPIYVADTVKGNLPNKASVASKPYDLWKTMKDDDFVFSLYPNDLIRFQREKDKDEFMYYKKAGISTASISVESHDRSCSIPSLGVKTLLLLEKWEVDVLGDRNRVKKENRQYFPGQIR

SEQ ID NO: 7092 - protein, 1116 aa, synthetic construct
  REGION 1..1116: note = Synthetic
MRYMSYGIGLDIGIGSVGYAVLDLDHEEKPWGIIRLGSRIFDKAEVPKTGGSLARPRRDARSSRRRLRRHRHRLERIRQLFLKSHLLSQKELDTLYEGKLPDIYELRVKALDERVTNSELARILLHLATRRGFKSNRKAELADSEAGALKTAISENARIMAEKHYRTVGEMFLHDFRFKEHKRNKGGSYTTTVDRSMVAEEAELILDTQQKLGNIVVSDAFKDDYMTIMLSQRAFDEGPGGKSPYGGNMIEKMVGNCTFEDGSHGEPEEKRAAKACYSFEYFNLLQKINHIRLVSDKESIPLSNDQRNVLISLAHKVEKLTFARIRKELGISSEYSFNMVRYNEVNKDNIAEAMKAAEKKEKFEYLSAYHRIIKTLKSKGKDRIVAYTPEILDQVGWYLTIYKGDDKRREALKTVGIPDDDVEKLLEISGVRKFGHLSLKALRKINPFLEQGMTYNEACEAAGYDFQAHLVEKSMYLPAKAPELDDITNPVARRAISQTIKVVNAIIREQGESPLYINVELARELSKNFQERGKIEKENESNRHKNEMVMEKLRENFTNHKPSGQDLVKFKLWHEQDGISPYSQKKIEYGRLFETGYAEVDHVIPYSISFDDTYKNKVLVLASENRDKGNRIPLAYLSEDKGQEAANRFKVWVNSNVRDYRKRQRLLKESLTEDDFKGFKERNLTDTKYISRFMYNYISDHLLFAPSETGKKRRVTAVNGMITSYLRKRWGINKIRGNGDKHHAVDAVVIAAATPSLIQEISGYTAYRETGRYKKNYAYEQGLNGGYLIHKGTGEIKAEFPYPWEGFRNELIARSSDRPTMGLEKSPYYVNRDLSEIKPIFVSRMPRRTITGPAHKDTVMGARHLEEGYTLSKVSLTDLKLDKNGEIKDYYNPNSDRLLYNALKERLTAYGGKSQEAFAEPFYKPKTDGTPGPLVKKVKIMNKTTMPVMVQNKTGAAGNDSMVRVDVFHVEGEGYYLVPIYVADTVKKQLPNLAIVANKPISQWKVMDEKDFLFSLYPNDLIYFKSKGVKTFSRVNDDSSLREKYETNEGLVYYVKTGINTASITIISNDHSYILNSFGVKSVSLIEKYEVDVLGNYHKVKREKRRPIVFKKKKNC

SEQ ID NO: 7093 - protein, 1089 aa, synthetic construct
  REGION 1..1089: note = Synthetic
MKYAIGLDCGISSVGYAVMALDLKDEPCRIIKLNSRIFNAAENPKDGSSLALPRREARGGRRRTRRHRHRIERIKHLMLKSGLLNESELSTLFSGQLSDIYMLRTKALDEKVTNAEFARILINLAERRGFKSNRKSEAIDKETGRLLTAVSENEALMQKSGWRTVGEMLYKDEKFAKYKRNKGENYTNTVSRKMIENEAEQIFSAQRRLGNTFATEENEQLYLDILLSQRPFDVGPGEGNANSPSPYAGDQIFKMIGNCTLFPKEKRAAKATYSFQMFNIWQNINHITLSDESGNKTTLTDDERKKIYRLCRNTANVTYKRIRKELEIGREYTFNSISYGSKDAEEVESKAKFNYLNAYHDIRKALNKYEKNYIEKLTPDELDSIGTIFTVYKSDDKIIENLKKAGIDEALYDPLLDLKGFSKHGHISIKACKELLPYLQEGMTYDKACAAAGIDFKSHSRSEKGALLPANADELDDITNPVVRRSVSQTIKVINSIIREMGSSPVYINIELARDLSKSKSERNEIEAQNKTNRAENERVKERIINEFGIRYPTGQDIVKFKLWLEQDGICPYSQKPIKAEMLFSDGYVDIDHIIPYSISFDDSYNNKVLVFSAENRRKGNKLPLEYLSGKARDNFIVWVENNVKRFAKKRNLLKEKLSEADFSGFRERNLNDTRYLNRVLMNFITDHLEFAPYSEGRKRHVMSVNGRATDYMRKRWGIAKIRENGDLHHAADAAVIACVTQSNINKISLYSQQKETKYTEPGENGSAAFNINTGEVKDVFPLPYPEFRKELEYRLSDDPRHYLRMDPLGNYTSEEIEATKPAFVSRMVNRKVTGAAHEDTIRSGKEKGYKISKVPLSKLKLKNGEIENYYNPEDDRLLYEALKTRLEKFGGDGAKAFPAGFEFHKPKADGSDGPAVKKVKIKEKTSSWVNAQDGVADNGRMVRIDVFHVENDGYYFVPIYVADTVKPELPNLACVAGDKPWKPMDDRDFCFSLYANDLIKITAKKDMKLSLKFKESTLPKEKYGNEMLLYYVKAGINTASITVENHDGSYIISSLGIKTLNRIEKYTVDAIGNIHMVHHEKRMRFNKK

SEQ ID NO: 7094 - protein, 1090 aa, synthetic construct
  REGION 1..1090: note = Synthetic
MAYAIGLDCGITSVGWCVMEVDENEEPIKIKKLNSRIFPAAENPKTGASLSKPRRDARGIRRVNRRRRHRKERIDFLLQSQGVINKDELNDLYKGTLEDIYELRTVALDKLISRDQFVKVLRNYAQRRGFKSNRKHEKKGDDGKLLLAVSANEKLMQEKGYRTVGEMFFKDAKFAEKKRNTTDSYMCTVSRADIEKEVKLVFDRQRNFGNKYATQELEKQYLEILLSQRSFAEGPGEPSPYSGVQIENMIGPCTFYPEEKRAVKATYSFEYFNLLQKVNNIRIFHRGEKRNLTDSERKLIIEKAHKSQALDYSIIRSMLNLDETEYFATVNYNFDKEIDEIEKKAKFQYLSAYHEMRKVLDKIKKDFIKTLSIEKRDKIAYIFTVYRTDSSIKKALKEERFDEIVIEALLNLKSFSKTSHLSLRAIKQITPFLEKGMRYDEACKNAGIDFRAHNKNEKSKFLPSNSEELNNITNPVVKRAFSQTTKVINAIIREQGESPCYINVELARELSKSLDDRRDVEKKNEENKANNEKIKDEIIENFGMLSVSGQDIVKLKLWKSQDGISPYSQKPIKYERLFEDGYAEIDHIIPYSISFNDSYNNKVLVLSEENRQKTNRLPMEYLSGKEQENFVVWVENNIKNLTKKRNLLKTKITEEDKKFFKERNLNDTKYLSKVLYNFINDNLEFNEVKKDKKRRVNAVNGAATAYIRKRWGIHKIREEGDLHHAVDACVIACTTNAFIQKISRYAKINETAEVKTENGKTILISKNTGEVINEDLDAKFPQPYNKFRDELVARTSEDPSYFLKSLALPTYTKSEIEEIKQCFVSRKPNRKVTGPAHEDTIFGEKNGVKLLKTKLVNLKLDKDGEIKNYYNPSSDILLYEALKKRLQDFEGDGKEAFKESFYKPKSDGTKGPVVKSVKLINEISKSVSVRDGIGQAKNDTMVRIDIFYVYNDGYYFVPIYVADTVKDKLPNKACVRSKPCSEWKEMDDKDFLFSVYPNDLIYVESNSKFKLKKITDKSVIKEKKSTLLYYIKSSINTASITVINHDKTYKLESLGIKKLSKIKKCQIDVLGNVHFVEKEKRQDFSNRKRK

SEQ ID NO: 7095 - protein, 667 aa, synthetic construct
  REGION 1..667: note = Synthetic
MAYGIGLDIGIGSVGWAVLALDHEENPWGIMDLGSRIFDAAEQPKTGASLALPRREARSMRRRLRRRRHRMERIRNLFINDGLLTEEQLNHLYDGNLEDVYALRVKALDEQLTDEEVARVLLHLAHRRGFKSNRKAESKSAEAGELKKAISLNQETMEENRYRTVGEMFFKDSRYAEYKRNRGGNYLNTVDRSMVEEEARKILETQEKLGNSKLNKDFQNSYLSILLSQRQFDEGPGGNSHYGGNQILNKVGTCTFEDGSNGEPAEKRAPKVCYSFEYFNLLQKVNHLRLSSAKDNRGLDEEEREKVIALAKDKADLRFGKIRETLQISPEYRFQGVSYSTKEPREDTEKKAKFNFLPFYHQMRKILKSKAQIDIKEYTLDELDKIGQILAFYKGDDARRKELGKLRIEPKAIEALLELNGASKFSHLSLKAIRKITPFLEQGMTYDKACEAAGYDFRAHQEDKTFLLPANAPELEDITNPVVRRAIGQTIKVVNAIIRKQGSSPLYVNVELAREMAKDFQERKKIKKINKENQENNDSLMDKIRKENNRLNPSGMDLMKLKLWNEQDGISPYSQRHIDRERLFETGYVDIDHIVPYSISFDDSYKNKVLVFSSENRDKGNRLPYQYLLKKYGQDAADRFKVWVGPGLSETAKAVERKNDGRRNVRL

SEQ ID NO: 7096 - protein, 938 aa, synthetic construct
  REGION 1..938: note = Synthetic
MYPYAIGFDIGIASVGWAVVALDGEDRPFGIINMASRVFDAAEQPKTGDSLAAPRREARSARRRLRRHQHRLERIRRLLAAEKVVSQAELDTLFEGKLEDIYALRVEALDAPVSNTGFARILLHIAQRRGFKSNRKSGTSKEDGELLAAVTANRALMSEKGYRTVGEMLLKDPQYSGNKRNKGGKYLATVGRDMVEEEVRAIFKAQREQGQPFAAAELEEQYLEILLSQRSFDEGPGQGSPYGGSQIEKMIGKCTLETGEPRAAKASYSFEYFTLLQNVNHLRLMSGGESSPLSSAQRETLIALAHKTKDLNFSRIRKELGIPAGTTFNTVSYKNAEDYEEAEKKTKFCYLRAYHQMRAAFNKLAKNHFDGLSRQQKNELGRVLSTYKTSANIRPRLAAAGLSEIEIDIAETMSFSKFGHLSVKACDKLIPFLEKGMKYDEACAAAGYDFKGHDGETRTRLLHPAEDDFADVTSPVVRRAISQTVKVLNAIIRERGGSPTFINIELAREMARDFAERSKMKKDMDENRARNERIMERIRTEYGKERPTGQDLVKFKLWEEQHGECAYSQKHISIERLFEPGYVEVDHIIPYSISFDDGYKNKVLVFTEENRNKSNRLPLQYLQGKRREDFTVWVESSIRDFRKKQRLLKETITAEDEKKFKERNLQDTKTMSRFLLNYISDHLEFADFASGRKKHVTAVNGAVTSYMRKRWGITKIRENGDLHHAVDALVVACTTDGMIQQVSRYAALRECEYVQTEAGSMAVSQHTGEVLRQFPYPWPEFRRELEARLGDDPRRAVISQRFPVYANGDIPVRKLFVSRMPRRKVTGAAHKETIKSPKALDSGNVVVKRALTDLKLDPKTGEIANYYMPQSDRLLYEALKEELKKHGGNGAKAFDELDRPPSGRYASMRETAWRSTICFRRTIGRCWRGDDISNALLP

SEQ ID NO: 7097 - protein, 894 aa, synthetic construct
  REGION 1..894: note = Synthetic
MVEEEVRAIFKAQRERGQPFAAAELEEQYLEILLSQRSFDEGPGQGSPYGGSQIEKMIGKCTLETGEPRAAKASYSFEYFTLLQNVNHLRLMSGGESSPLSSAQRETLIALAHKTKDLNFSRIRKELGISAGTTFNAVFYKNAEDYEEAEKKTKFCYLRAYHQMRAAFNKLAKNHFDGLSRQQKNELGRVLSTYKTSANIRPRLAAAGLSEIEIDIAETMSFSKFGHLSVKACDKLIPFLEKGMKYDEACAAAGYDFNGHDGETRTRLLHPAEDDFADVTSPVVRRAISQTVKVLNAIIRERGGSPTFINIELAREMARDFAERSKMKKDMDENRARNERIMERIRTEYGKERPTGQDLVKFKLWEEQHGECAYSQKHISIERLFEPGYVEVDHIIPYSISFDDGYKNKVLVFTGENRNKSNRLPLQYLQGKRREGFTVWVESSIRDFRKKQRLLKETITAEDEKKFKERNLQDTKTMSRFLLNYISDHLEFADFASGRKKHVTAVNGAVTSYMRKRWGITKIRENGDLHHAVDALVVACTTDGMIQQVSRYAALRECEYVQTEAGSMAVSQHTGEVLRQFPYPWPEFRRELEARLGDDPRRAVISQRFPVYANGDIPVRKLFVSRMPRRKVTGAAHKETIKSPKALDSGNVVVKRALTDLKLDPKTGEIANYYMPQSDRLLYEALKEELKKHGGNGAKAFTAPFHKPKSDGTPGPVVNKVKLCEPTTLNVPVLKGAGVADNDSMVRIDVFHVENDGYYFVPIYIADTLKKELPNKACVAYKPYEQWKEMADKDFIFSLYPNDLLRVTHKTKLKLTKAQKESTLPDTYETKREMLYYISANIHTAAIGCRNHDNTYEIGGMGIKTLEKLEKFTVDVLGEYHKVEKEPRMAFCRK

SEQ ID NO: 7098 - protein, 815 aa, synthetic construct
  REGION 1..815: note = Synthetic
MEEGGKVMKYGIGLDIGIGSVGWAVLALDHEENPWGIIDLGSRIFDVAEQPKTGASLALPRREARSMRRRLRRRRHRLERIRNLFINGGLLTEEQLEHLYDGNLKDVYGLRVKALDARLTDEELARVLLHLAHRRGFKSNRKAESLSTEAGELKKAISLNQKTMEENQYRTIGEMFFKDSRYAEYKRNRGGNYLNTVDRSMVEAEACKILETQEKLGNSKLTKAFQDTYLSILLSQRQFDEGPGGKSHYGGNQILNKVGNCTFEDGSHGEPAEKRASKVCYSFEYFNLLQKVNHLRLTSAKDNRGLDKGEREKVIALAKDKADLRFEKIRETLQISPEYRFQGVSYSTKESREDIEKKISLIPAILSSDAENLKIKGKNRYQRIFFGQVGQIGQILAFYKGDDTRRKELAGLEIAPKAVEALLELNGASKFSHLSLKAIRKITPFLEQGMTYDKACEAAGYDFRAHQEDKSFLLPANASELEDITNPVVRRAIGQTIKVVNAIIRKQGSSPLYVNVELAREMAKDFQERKKIKDDNEANQSQNDKLMQEIKENYQRLNPSGMDLMKWKLWKEQDGKSPYSQKSIATERLFETGYVDIDHIVPYSISFDDSFKNKVLVFSWENRDKGNHLPYQYLLQKYGQDAVDRFKVWVGNNVRDYRKRQRLLKEKMTEEEISGFKERNLNDTKYISRFMYNFIRDHLEFAPSETGKKKRVLAVNGMITSYLRKRWGIRKSRANGDKHHAVDAVVIACTTDKMIRDLTLYSEERESKYDVDERGSRLVNESTGETPRRIPSLGTDSDRNWKPVVLNTRAGDWLV

SEQ ID NO: 7099 - protein, 1202 aa, synthetic construct
  REGION 1..1202: note = Synthetic
MLSGNHRKVLGLDIGANSIGFALLKLDEQKGETLFEELASNSIVFSSPNGAEDRRKARGNRRIHERKSLRNRNSRKIFVRYGLAQQAFIDNTTQYLNDFKMKDRDVYSIRQRAIEGEMLTQEEFVLATYSILTDRGYSNMFAPIKKDTKEKEEENEEGVINEAVNHNAMLYKQAEYPLPSMVLTQKRQTLQNAFQNVAVRNKKEDYSNSLGREMHKEEFKAVVVSQSKNKNLFCNEEECLAFVDEILDEETPNRAFFQRPLKSFDNMVEYCAFYDAFNPKGSHKRMPLANIANIELTLRQSIDNYEAIHSKTGEIRIFSDEEKQKIVDFWIETPDADEIKSNNIYKNAGFKDIVIHLAETKEFRVLNIKAHRALLEVLRAYSVDFRNKDNAFYNELLLVLYYYKNSSSRIKYIEELIAKYVMAIDGAFVKECANLKNMDGFGSFSLKFANEVLELMQKGVIHSKALEELGYKSKYLNMPTYSYLPPLEPTPKDREWLQSNLPYFQTQHLFYQPKISPKVKRVIGVLRKLVNELIAKYGAIDEIRIETARELNSQTEEKAIEENQKKNDTQNREAQKFLKDKNLAQSPKNLERVKLWKEQGGFCLYSGEEIVEEEMLDENQTEVEHFIPRSVIWINSFKNKILVKKKYNQNKGSQNPITYLKSKGEWENFKGRIKLDPKSPKYKWLTHEEHIENVMQKEHWQESYLNDTRTATKTIAKYLNHYLYPNQNLYGKGEKRYIASVTGKAIGELKHIWGIHKVMPKDENDKKDRDTQYHHTLDAFAIALCSNGAMKTLNDSFKQNENHFQTKAQKAKLKEGVPTTTDGVSIVEYLKSIVEKYETHQRLVCPYNKRKTNMKGFKDGNLKLYITQDPKDKNKEILAEMEKVAIDSSLLIKKVNGFDKPRSDDEVKKVIQSIQSRLNPQKQANIIEAIEIYANRLLELRKGIDALDLEIKTEQKRLKTGKQHKEDNDSIKKQTIAPLQAQKKELSLEMQNLKCSFATQKGKRQIVRKLNLYREKIEKSSADSIIFTQRKERTIERLSVDNFREALENKEPFVIKENKNIFCVELYAHPKQNQVVGLKYFSSLANLHIKTKINEKYGDYFEDKKPMLTLYKNDIIKVFYTKEARAEYYVFNGGGDMTGTNNKVSIKKINHRTFTATNKKGVVEVSKEGAITPNSTTVVSKVTIDFFGNIEEVKQNAKSTWL

SEQ ID NO: 7100 - protein, 1095 aa, synthetic construct
  REGION 1..1095: note = Synthetic
MPKPYRLALDVGATSIGWCALELGSEKLEPAGILRMGVRVFPDGRDPQSGTSLAMDRRLARGARRRRDRFLERRRRLLAALVRLKLVPADGVGRTAQAALDPYALRAAALERALAPLELGRVLFHLNQRRGFRSSRKGGEAPDEAGKIAEGVSRLEDQITAAGVATLGAWLAVRRRRRTPDLRPGEDKALYTVRARLEGAGAKAQYRFYPSRTLAEREFDHIRQAQALHHPAITPQDWDHLRGVIFHQRPLKPVDPGRCTFFPEDMRLAWAHPVAQRFRMVQEVANLRVLARGRPPRKLAPEQRTALLDRLAVKKDLTFTAIASLLGLAEGEVLNLSDERRDRLAGDGTSAALSAKKAFGKLWFGLAPEDQDEVVRRLLETEREDDLLPWLRDRFGLTEDQAKAVSAAPLPEGHCRLGRRAITALLPRMEEQGEDYAKAAAAIGLHHSDLRGTGQGLATLPPYAEVPALERFLSFGTGEEKDQDPFVRIGRIANPTVHIGLNQIRTLVNDLIREYGKPHDIVVELARDLNDSAEDRRKRLREQAENQRANDRRRRQLADLGRPVTGDNLIRLRLYDELPFDGVQRRCVYTGEPIGLTRLFDGDIDIDHILPYSRTLDDSVANRILCVRHANRDKRNQSPWEAYGDGRRAGYDWADILDRVWRLPRNKQWRFQPDAMDRFDDQDRFLERHMNDTRYLSRLARQYLGCLYDLRVEGERVRAMPGTLVGLLRRKWGLNALLALDGEKNRNDQRHHAVDAAVIAILDQGTIQAVQRAAKVAEDKDLDRLLEDFDPRHNWFRDHVRDHLARIVVSVKPDHGVTGRLHEDTNYGILPAARPEDDPEGKRAPYVRAGHTLVYRKGFDTLTPAEVARIRDPLLRGALQTHIASEAIQGRDHRQALQTFVERTDHAWQGLRHVRLTKPEASFEVIRHRRTGAPYRAIVPGDNLCVDVVRLPDGRWMGQAVTLFAAARQAGSGGRLHPPGPDVVMRVYKGDMIRLVQDGRLQVMRVWRLEVANQRLRLAPHQEGGEMDKRHNDPDDPFRWTFASFDTLRRKAARKVVVTPSGRLRDPGPPPDAVSGADPAPSAPALLAPASSAVE

SEQ ID NO: 7101 - protein, 1074 aa, synthetic construct
  REGION 1..1074: note = Synthetic
MPKPYRLSLDVGATSIGWCALELSAEKFEPVGILRMGVRVFPDGRDPQSGTSLAMDRRLARGARRRRDRFLQRQRRLLATLARLGLVPGDPAGRTAQAAVDPYPLRAAALDRALAPLELGRVLFHLNQRRGFRSSRKGGEDANEAGKIALGVNQLQEEITAAGAATFGAWLAARRALRAPGVDKHLYTVRTRMEGAGAQARYPFYPSRPLLEREFDAIRAAQAPHHPGIAPEDWEHLRGVIFHQRPLKPLDPGRCTFYPQDQRLAWAYPAAQRFRMAQEVANLRVLARGQNPRKLTLAQRTALLDRLAVKGDVTFTAIATLLDLAEGEVLNLSDERRDRLKGDGTAAVLKQPKRFGKLWLALPEEEQDEVVHRLLETEREEDLLPWLRDRFGLTEEQARAVSSATLPEGHCRLGRRAITELLPPMEQQGLDYTKAAAEIGLHHSDLRGVGEGLPTLPPYAEVPALERFLSFGTGDEKDRDPFVRIGRIANPTVHIGLNQIRTLVNDLIREYGKPHEIVVELARDLNDSAEERRKKLRKQAENQRDNDRRRRQLADLGQAVTGDNLIRLRLYDELPFDGVQRRCVYTGEPIGLKRLFDGDIDIDHILPYSRTLDDSVANRILCVRHANRDKRNQSPWEAFGDNRRPGYDWADILDRVWRLPRNKQWRFQPDAMDRFDNQDAFLERHMNDTRYLSRLARQYLSCLYDLRNQGDRVRAMPGTLVGLLRRKWGLNDFLAIDGEKNRNDQRHHAVDAAVIAILDQRTIQAVQTAARAAEAKDLDRLLEDFHPRHNWFHDQVRDHLARIVVSVKPDHGVTGRLHEDTSYGILPAVGAGADGKSAPYVPAGHTLVHRKGFDTLTPKEVLRIRDPLLRETLLTHIAAEAIQGRDHRQALESFARRKDHKWPGLRHVRLTKPEASFEIIRRRHTGAPYRAVVPGDNLCVDVVRLPDGKWMGRAVTLFAAAKQAGAGGRLPEPGPDVVMRLYKGDMIRLEQDGKLQVMRVWGLDVANQRLRLAPHQEGGEMDKRHADPADPFRWTFASFNVLRRKAARKVVVTPSGRLRDPGPPADAASPAVAE

SEQ ID NO: 7102 - protein, 1167 aa, synthetic construct
  REGION 1..1167: note = Synthetic
MEKVLGLDLGITSVGSALIDLDYENLKNTNILHSNIRIFEAPITPKEKTSLQLIRGENRRARNSKENNSIRRKKIVNILLKYKFIDKNEIKNINTNLPKSKVKREIIVKVANYLFEDKKNANNILELRYKALNEKLSTIQLARLLYSMNNHRGVSYEDTRSSKNIPEKKLEEFSKKDINEYADGSSDKLLYGLLNFKNAFINSSKYQTVGEFLYKEYKEKFRNSPKRFKDTKQSDFMFVIPRKNIVDELNFIFKKQKEFKNEVINDDFIKEYLEAFEWEEDSPAYDELVANCSIKENEKAASKYLVESQFYIYLEKLYNLSYKTKDEYRYKNLDIETIVKIIKHINTKTIKYSKLRELIEKELNIQDVMFKGVSDYSKYFIDLTIFVNLASILSFPINILELFKDIEAKELFNKVVNILAYEPKISQKEKKLEELKIVDEKIVDKLLEIKIKGNLSYCKEVLEQICNGMLSGLIPHYAKEEVQKAYPKKPIIKGHLLPPLLDTDFPIKNNQVVVRALSQMRLVINDTLKHYRKVYENPNWFFDKVVIETAREFLNKEQVKKYDDRAKENEKLNKQAIEFCEKYGKAYPAKEEILKARLFLQQDGLELYPSEYNISTNSANFNKIDAQRLFDEAYCEIDHTLPISRSLDDSFSNKTLVLSSTNQNKGNKTPYEFLNKELFEIMEDSLNKKINILGYKKVSNLTNKEFKELDGFIARDLNDTRMITKYAGLYIQNYLAFPKNDKIKRRVFANNGKITSLLRKSWGIGAKNRNNHLHHGEDAILIALSDNSLIKNISTYYGIQTELEKLDFSKDGFDKLFKNNKNIKEYIVTELKKEDIDIENIDFSKISKKEISSKIFRIIAQKSYPREDFLDIFRKAIHSAIVTHQERVKINGQIHKDTLEKLSKKTNDDVVLVRGGFATNGEFIRYDVFKNSKNRFEFIKITAKHHGVSLDKLPLPQDINSNFLFSIYPKTCLNFIIEEQKEFKELKGLFRKISSSLYIDSIKSIEDEFFKFKLESLSIDYLLSDDLPNFEKEHLKKIQELLNIGKLDKKNKIETLANFVEESLVKIRKYIEEYFSSYKIFFTFDKTTSNETFLLKRKLKDLGSIEELNDILISTNTIIFKISEKKLISPYFVLASTKIKSIKKIKSDIFGNEEIIENEKREPLLEK

SEQ ID NO: 7103 - protein, 1174 aa, synthetic construct
  REGION 1..1174: note = Synthetic
MEKVLGLDLGITSVGSALIDLDYENLKNTNILHSNIRIFEAPITPKEKTSLQLIRGENRRARNSKENNSIRRKKIVNILLKYKFIDKNEIKNINTNLPKSKVKREIIVKVANYLFEDKKNANNILELRYKALNEKLSTIQLARLLYSMNNHRGVSYEDTRSSKNIPEKKLEEFSKKDINEYADGSSDKLLYGLLNFKNAFINSNKYQTVGDFLYKEHREKFRNSPKRLKDTKQSDFMFVIPRKNIVDELNFIFEKQKEFKNEAINDDFIKEYLEAFLWEEDSPAYDLLVANCSIKESKKAASKYLVESQFYIYLEKLYNLSYKTKDEYRYKNLDIESIVKIIKNLNTKTIKYSKLKEFVEKELNLQDVMFKGVSDYKKDFIDLSIFVNLASILSLSTNILELFQNIEAKNLFNQVVNILAYEPKVSQKEEKLKELNIVDEKIVDEKIVDNLLEVKIKGNLSYCGEVLEQICNGMLSGLIPHYAKEEVQKAYPKKPIIKGHLLPPLLDTDFPIKNNQVVVRALSQMRLVINDTLKHYRKLYNNPNWFFDKIVIETGKEFLNKEQVKKYNDRAKENEKSNKEAMEFCEKYGKAYPSREEILKARLYLQQNGEELYPSNYDISTNSAKFQQIDAQRLFDEAYCEIDHTLPISRSLDDSFANKTLVLSTTNQNKGDKTPYEFLSKELFEIMEDKLNKNINSLGYKKVSNLTNKEFKELDGFISRDLNDTRIITKYAGLYIEKYLAFPKSEKTKRRVFANNGKITSLLRKSWGIGKKNRNNHLHHGEDAILIALSDNSLIKNISTYYGIQTQLENIDFSKDGFDKLFKNNKSIKEYIINELKKDGIDIENIDFYKYNKKEISSKIFRIIAQKSYPREDFLDIFRNSIENAIVTHQERVKINGQIHKDTLEKLSKRTNDDVVLVRGGFATNGEFIRYDVFKSDNKIEFKRIAPKYCNKKVELLPQANDNSAKFMFSIYKNGLLKVDFIKDDELFNIKGIFSKIDADAKGILTYIYLNSVRNTEDNLFISFVSGFLNSTIYDDAIIGDDRKKIEELLKKNKIKITDSVRDKDTIKSKIVDFMNIVKSNTELVIGFNIIRNNNILNSIHNDLSEYLYKKDLKYDVIINIDGKPATPILKIKLPIDDKKTNLPKMVNIIKLKTDTFGNEEIIENEKREPLIKK

SEQ ID NO: 7104 - protein, 1073 aa, synthetic construct
  REGION 1..1073: note = Synthetic
MKYILGLDLGVASVGWALVPCNPEDISPETLIMGSRVFEAGTDESDGKREEGKDKSRSAIRRKNRGARRNIWRRRRRAVKLFNILQNAGLLPNAGCHTPKARQDMFNALDGRLFQEYFPNATRKEAQTYIYALRAKALDERLSLEAIGRVFYAFGQRRGFLSNKKTDFDETDEELGKVRGGISELEKLIAESGSRTLGEFFSTLDPEEKRIRKRWTARKMFIDEFNAIWDAQKGFYPDILTDALRDDVFKAIFLQRPLKSQKGLVSRCKLEPGCRCAPKGDPIFQEYRYWQKIIDLRVSDPANEGRYRFLTREEQDVLAELFEYNEKLSFAEMRKKLGFKAPKNNKTAYRFNFELEDGDKDIKGNVTRARIRKALTETGAGDLPTEDVDKIACEILYYDRVKALAAKLARLFPDFSPETVAKLSEATVEPDYCSLSRKALSKVLPVMKEKRISFETARRLLYGKGSQTYDFLEPVTAVLGSVRNPTVTRTLTEMRKVVNEIIRRFGKPEIIRVELARDLKRDRKERERIFRSNKERENERVRLEKEIREKLNGYEPNKRDVLKYQLWKECRETCPYTGQGIDLRTLFSDASPVDIEHIIPFSVSLDDSFGNKTLCYAEANRNEKRNRTPFQAYGDTDKWSGILERVKSFQGPFARHKLELFRKEDVSTEDAVSRLLNDSRYISRLALKYLDTLYGATDGNDAEGKKRVQVATGNTTAWLRDAWNLNTILLSPDEKQKHDVQRGAVDVVEKNRGDHRHHAIDAAVIALTGPEVVKKLSENAEEFYKLKGRGWFALRLFAPPCPGFREILQTVVDRIVVSRRVDRKVSGSMHKETNYKVLEDGTERRAVRKPVAEMKKNEIDNICDPVIRKIVQEKFLEVGGKTKKFEENPPCIVTKTNPKRKIPIKSARYWASVTTDPVGKPGHARNVQIFLNHHMEVYAELDESGNELKKWKVDVVSLMEAYQRVRMKKPVVQRDFGPNKRFKFSLAIGEAFVFENDEKKAIYVVRKMTKSGQLFFKLHTDARAAGEIGEKGLSSRPGKFKERGMRKGYIDVLGNIDLWKNLDVCKKVYPSND

SEQ ID NO: 7105 - protein, 1085 aa, synthetic construct
  REGION 1..1085: note = Synthetic
MGKARLGIDLGTNSLGWALFDMEEDHPFQLKDAGVRIFPDGRESAAPNKVGESKAVQRRVARSMRRRRDRKLSQKSKLVQVLIDNELLPQNQFDRKNLARKDPLRLRAEALDRKLARWELGRVLFSLVLRRGFKSNRLEQQKDPDSVNYKMMDALSKAIEDSGKRTLGEFLYDRHKRRQPIRFRPESGFYPQRDMYEKEFDLIREVQEPYYANVNWDYINRIIFFQRPLKPQPRGVCEYMSDKLRAYKALPSSQQFRIWQDIENLRFLNSDGSSIPLANDQKNSLYHILSNQKSVTFKKLHTLFFPNIEGKFNFDIAKKTGMKGNELEVFLRKSTNFGPLWDSLSLVEKDAYVERILSLYTDEEEVKLTEDLLKIGVPEANIDEILGHHYPEGTTSLCKEIQQELCSVIAEQHIPYDKAVVVLGYHHSVRDIKGGLDTLPYYGEVLTTSCIGGSKKEEDKGNPEKYYGKIGNPTVHVALNQLRAVVNDLIRKQGKPTQIVVELSRDLKNSRQKVEEYRRLQANNEKENEAITKEIVENPNYGIRQASRSDIRKYKLYKEQMIAGDGLGSKCPYCGKVIGASEIFTPNIEIEHILPYSRTLDDSMMNKVVAHRTCNQIKRNSTPYEAFSHDPEGYSYSDILRITGHYPKAKARRFRQDAMERYLEEGGEGFYASQLTDNAYIARVAIQYLRSICPDVWSSTGKATALLRAKWGLNTILSKSKLKSRADHRHHAVDAAVIAHVDRSLIKKMADLNRNNLLGSITVPSNPELRQQLEARIDRMIPSIKPDHGVEGKLFQETAYGKVTLNLPLAVSLLKEDHIRLISGHKLRSEYESRIKEMSFKKFKAQLIQEGVTDVYLRKEVWVTTVPVDEDHIKYKDLAEMTWDGKLQGICDPHMRKKLASYCSKDGDLSKNDLKKFVQDSGIKRVRYIPKSQEITPIASMPQKGYQVNDYVYVDIWEVPSKKKGGAVSYKGVFVSRYDANQKGYHYTKPHPAAKRLMRLYKNDVIKVSHEQDVWYYRIAGYSTTTNCLDIRSVWASEDNKNWIECTSSKRIKAEYPDASGQVFKTLTFIFKQGKVEKVKITPVM

SEQ ID NO: 7106 - protein, 1178 aa, synthetic construct
  REGION 1..1178: note = Synthetic
MKKVLGLDIGVNSVGYALIENDSEGKDLNIIKTGVRIVNEDPNFHGNFYQGNSASKNEARRTKRMIRRGNQRFKARRDALYRILRKNSMFPSDQLLNRVGERTLYRLRAIAVSERLSLDEIGRVFIHLNQRRGYKSSRKSGQRVEEGSYLTRIAELGELTKSLTIGQFWDAYINFRCNTVDNIPSALLDWFRIRAEAEPGFRIRENIFPRDSYIAEFDKIWECQATFYPTVLTGMPGKTFRENKGTLYQKIRNEIIFYQRKLKSQKHLVSDCSFEKGHKVTPKSSPFYQEFRIWQQINNLEVTDQSNNIMPIEWEGRKRLFDALHDPDQLTKRNTMPYSVVLKILGYTGRSYHLNYNLLEGNKTYHTIFNALKKAGIEQPGRYLSFDNTQKIHSPGLYDLWHITYSLDDESDVIKTLVKRYGFTNNQAEIIASEVGYTSDYGSISTRAIRKLLPQLEEGKNYYEACVEVGYQNPDHVRREELKIHMDRIFPNSLRNPVVEQVLNQVVNVVNGIIDTYGHIDEVRVELARDLKNNAKQRRELTQKNRNLRKLNDTIALRLKQEHGFNRVSGSDLLRYRLWDETEKRCLYCGQNITVSQLYNGEAEIEHLIPWSRSFNDAMTNKIIAHSKCNRDKDQMTAYDFMSSKGETELGRYVADVNRLFTEGSGRLDSDKKVKITRAKKDNLLCKGSDIKGDFLARQLKDTQYIVLETVTRLKEVFPKVTTTTGSVTDYLKESWQLKSLIDEINIDKYRAVGETEWREEKDRENGLKKVERIKNWSKRDDQRHHALDALVVALTTQGIIQRINNANQLFETTREMKEKTFGFPIPAPDLRRKTMESLGEILVSFKKPGSKVLSRKLNIINTSKGQKEQVTWAPRGSLHKDTVFGMIRWYEKIKINKRLDEETASRIVGEAVRSAVLERLAAFNGDPAKAFKKPVFQGEKEIKEVTVLRVRFTKRILLSETLTPTEVEKIVDPVAQKLVRERIDVKGGIKQAFRDYLNDPIWQNREKGIMLKHVTVFDDGNLESVRDGYVYTKGNHHSLIYLDENGRYTDRVVSFWEAVSRCLDNLNTNGSIYPVIDRNDKDGLRFLFSMQINDLFVFDVNPEDVNFFDPLNRALLGEKMYRVQTISKGDYRFRHQYETTVSKDYDFSFKRLQSADALKTAVKVRVNHLGDIISIGE

SEQ ID NO: 7107 - protein, 1178 aa, synthetic construct
  REGION 1..1178: note = Synthetic
MKKVLGLDIGVNSVGYALIGSDTEDNSLKILKTGVRIVNEDPDFHGNFYQGNSASKNEARRTKRMIRRGNQRFKARRDALYRTLRKNSMFPSDKLLNRVSEGTLYRLRAMAVSERLTLEEIGRVFIHLNQRRGYKSNRKSEKKTEEGSYLANIAELGELTKDLTIGQFWDAYISFKSNNIDRIPIVLLDWFRFRTETEPDFRIRETIFPRDSYISEFDKIWECQASFYPTVLTGMPGKTFRENKGTLYQRIRNEIIFYQRKLKSQKHLVSDCSFEKGHKVVPKSSPFYQEFRIWQQINNLEVTDLSNNKMPIESEGRKRVFDALHDTDQLNKRNTLPYTAILKILGYSGRSYHLNFNMLEGNKTYITIFNALKKAGIEQPDRYLSFDNTQKIVSKGLYDLWHITYSLDDESDVIKTLVKRYGFTYNQAEIIAGEVGYTSDYGSLSTRAIRKLLPYLEEGKNYYEACVAVGYQNPEHVQREELKIHMDNIFPNSLRNPVVEQVLNQVVNVVNGIIDTYGHIDEVRVELARDLKNNAKQRKELTKKNRNLRKLNDTISLRLKQEHGFSRVSGSDLLRYRLWDETEKRCLYCGQNITVSQLYNGEAEIEHIIPWSRSFNDAMTNKIIAHSKCNRDKDQMTAYDFMASKGEAELGRYVADVNRLFTEGSGRLDSDKKVRITRAKKDNLLCKGSEIKGDFLARQLKDTQYIVLETVSRLKDVFPKVTTTTGSVTDYLKETWQLKSLIDEMNIDKYRSVGETEWREEKDRENGLRKVERIKNWSKRDDHRHHALDALVVALTTQGIIQRINNANKMFETTREMKEKTFGFLPPAPDLRRKAMESLGEILVSFKKPGSKVLSRKVNVINTSKGKKEQVTWAPRGSLHEDTIFGICRWYEKIKVNKKLNEKTASQIVGEEVRMAVLERLATFNGDSSKAFEKPLFLGEKEIKEVTILSTRFTKRVTLSEKITPAQVEKIIDPTIQKLVRERIESKGGIKQAFRDYLNDPIWQNTEKGIMLKHVTVFDDGNLESVRNGYVYTKGNHHALIYSDANGRYFDHIVSFWEAVSNCLVNLDTNGSIYPVIDRRDKGNHKFVFSMQINDLFVFDVNPEEVNFFDPVNKPLLAKNLYRVQAMSKGDYLFRHQYEATVQKKYDFTYKRITSMDKLKGAVKIRINHLGDIIKIGE

SEQ ID NO: 7108 - protein, 1171 aa, synthetic construct
  REGION 1..1171: note = Synthetic
VPYILGLDLGIASIGWALIQVQPKDKDKKTEESLCALLDCGVRIFKKAEVPKSGASLAAERRQKRGQRRIIRRRAHRVARLKYELKKAGFLHDGDFIDSALKIIKPAPMTWLNQETGEIITQQSMEGDDKKFLPIGIWGWRVLALDQKIPDRFLALVLLHLVKHRGYFSTRKKMDLENLKNSGEPNKEKKERKVLKGVTENDQLLAQSLAENNPSYRTPAELAVKKFGKETGHIHNKKNDYSHTFNRERIEEELIEILHIQQRLGNDKVTDDVIDTVKNLLKSQRAALSGDALKKMWGKCTFEKDEYRAPKHTYSAERFTWLSRLNNLAIKSGNFLDRWPTLEEKEILKELPYEQSKLIYAQVRKKWHLTENQRFNISYTVPFKRKKGKKKAAVDQKVEKKDKTVAWQKIEERTFFEPVAFHTIKKALQKEGKEDKWLILKGNRSLLDTIGVAFSLYKSDEDIENYLYEKVETRDKNLLDAIFPSLLKHISFSGTIHLSLKALDKILPYLEEGIRYDETCEKVYGSHSIFAKNTQKLLPPVPAGTIRNPVVLRSLSQMRKVVNAIIRTYGSPYKVHIECTRDLGKSHIQRTQEEERQLQNREFNEKASKKFKELFPDHPPKPREVLKYRLYEEQQGKSLYSGQEIDVRRLLEPNYIEIDHVLPLSRTWDDSYFNKVLVLKKENQNKGNQTPYEWLKGKEYSQEWQEFQGRVQSLYATIPAKQGYILHKDLPGNPNAAEPETEKVEQFLNRNRSDTRYITRQAAQFIENNLQFRDSEIKKKVFTPSGRITKIMRERWCLKKDRGNHRHHALDAVVVACTTQGMEQKITRFFQQKETGKKESLGFPEPWDFFREEIKARIFSSTPKAELQAKAWDRLPYVPHIEQEDYDAQYALFVSRMPERKGTGEGHEEILRSPKFLKEGKSAAKKPLTKLTKGDIGNIVGYQAGKKGREPAFYEDLQKRLDQFGGKAKTVFETDFYKPNREGRQGALVKSVRVFSTKTGILLGPDKTKPEAIVERSSMARIDIFSKVAHKGKRAGQKNYYAVPVYTYQVATGVLPDKTVPDDLSVVDLQFEFALYPNDLVYFKSKSIDAGFYYYRYYNRNTGAIDLQTPDFSSGDKSVKKKKATEKKSFGLFQGVGIKQAEIFEKYTVDVLGRNKRKVHERKRPGVIVKK

SEQ ID NO: 7109 - protein, 1038 aa, synthetic construct
  REGION 1..1038: note = Synthetic
MKTLGLDLGTNSIGWSVVDASQKVILGAGSHIFQEGVNIDAKSKAETPKNAKRREYRQKRRQLFRRKFRNNLLQKALKQASLMPASLEENDAYWQGCPYQLRKKALSEPLTAHEIGRVIFHLNQRRGFKSNRKSGSNEEGALYKGGNGKTGIDDTLADWQNGDFRTFGEYLASLDPHLQRLRNRYTLRSWYERELEEIWQVQQRYHPDKLTPELKKQLACPDFGIVFYQRPLKSQKHLVGKCTLEPQKPRVPVCHPDFEEFRMWQIINNLQVAGPGRFNELLDDEEKTKLVELFYTRDKIKISDIRKKLKLTEDYTFNYEEKEQFTGNETSIKLSKLFGKAAWDALPDEDKTLRTSKTEEKSISKLDVWHTLYFAQDQDWLQKYAAEKWGFTDEQLSKLSKTHLKEGYGSLSLNAIRKMLPLLRQGIKYDKAALQAGYHHSQISEYKTGLEKLETPKNLRNPIVQQALYELRTLVNQLIQQYGKFDIIRVELARDLKVSATKRADIRIEQFKNRARNDRYYQELVQQGVQRPSKNDIDKYLLWEECKKTCPYTGQAISFNDLFLHGRFDIEHILPYSRTLDDSIANKTLCEKGFNIKKGNQTPHECLSGDQANYMLVLERVQKHMPRKLARFKQEKLDEDFAQKQLNDTRYISKEARAYLKSICDRVDVTTGTATAPLRHFWGLNSILNEGRNKKTRDDHRHHAVDALVVALTTPGILRELSNWNKLDRSPQMHNFEMPWDTFYRDARTAIENILVSQKKNGKTVTSWNRKVKDKDGKTTTQRQVAARGQLHKETVYGKRQDLQGKEFYAVRKSLETLTPAMIGKIVDPVVREIVKDRLRAFGVDPDSKKFEIPKTAFNEPLYMPNIKGKSGRQNQIKKVRIRENSSGMVKLKQDINQWVEPGSNHHVAIYQDEQGKLHERVVTFYEAVERKKQGIPVVQPTTVEGYTLAQTLQINDMFLLGLTEEDINWHGPNLHRLLNPYLYRVQKLSSGDYSFRLHIASTIEHSAEEIRIRSMKAWEQQNPIKVQITPTGQLKKL

SEQ ID NO: 7110 - protein, 1064 aa, synthetic construct
  REGION 1..1064: note = Synthetic
MTQKLNYRIGLDVGVGSVGWAAIQDDKNGHPIKILDLNSYLFPSGEDARGNSPAQNRREARSARRLKRRHQFRKLRVRNFLVKEVGLIKPQELTEVLHTSLYNDLTALRSQALDHPLNNPALFRIFYYFAGHRGFQSTRKAELKDSEAKGMLAELNKTETALKGYRTLGEYYAKAPQFKGGFHNKGYLSGYSGTAKRAWLIKEITLIWHTQHDQFHNPLLTEDKLQAYLKLFKQQRSFDEGPANGPFSGGIAKLVGKDPFNKTELRAAKATDSFVKANLLIQLNNLKYLSRDPVNHKAISFAINGDNKTKIVKACLFKKKKVTLATITKILGLPKDTHYNLQLKGETPGKHILIDLTANTNLHKILKGVNVSSKEYDQIADILTKFKTDSTRLKKLAEVTALKPLIQSHDKRIDDLLLETPSQFGHLSVKTLRQIMPSLKQGFTYDQAMQAAGHQFSTLTTSLDDIRAIANPVVKRSVLQTIKVVKHLIARYGNPDYICLEMARELGKTKLERNQILANNLNYQNKYRDDQKKLADSGFGQVNATQVKKYELWKQQNHVDIYSGQPISIKAALTAATEIDHIVPYSLTLNDSLNNKVLTTVKNNRQKGQRVPMDYLSGAALTNFQTLVSNLFSNKKISYTKLNNLLSKKTPEHQDILKTWRTSAVNDTGYINKLLNNYFKNSGDIHYHNPQGAKKNHLTVVVINGRVTSYMRKIWRLNKNRADGDLHHAQDAAVIAVTTPGTVQKIVRYYQFKETGRPLTHKLYAEQPFEGFTKQLKVLLADDPLSMNQQLHAFKDGTDLKPKIPVWKPDHHIAGKVNGDTRYSGKLISQNKVLIRKPITSLMAGKDPDGRDVLYYSSNGTKKANPKTVAYNYLTSGKLVNDKLCELIKQKDPKELSGANAFPDGVAIFEHNGQTVRVTKVRLIKTMNINPVNVLKVKSNNSVMDLANNAYLNIFWNKAKKKYEFGPEFSYQIHQSKMTGKPIQHFVQKDFKNIILQNKNQKLLFKLFKRDLVELTLNKELVLKPNTDSSNQNQKIIPAGDPILMHLCNKTGIQLGFSEVRGRF

SEQ ID NO: 7111 - protein, 1121 aa, synthetic construct
  REGION 1..1121: note = Synthetic
MNYILGLDIGIASVGWAAVALDANDEPCKILDLNARIFEAAEQPKTGASLAAPRREARGSRRRTRRRRHRMERLRHLFAREELISAENIAALFEAPADVYRLRAEGLSRRLDEGEWARVLYHIAKRRGFKSNRKGAASDADEGKVLEAVKENEALLKNYKTVGEMMFRDEKFQTAKRNKGGSYTFCVSRGMLAEEIGELFAAQREQGNPHASETFETAYSKIFADQRSFDDGPDANSRSPYAGNQIEKMIGTCSLETDPPEKRAAKASYSFMRFSLLQKINHLRLKDAKGEERPLTDEERAAVEALAWKSPSLTYGAIRKALPLPDELRFTDLYYRWDKKPEEIEKKKLPFAAPYHEIRKALDKREKGRIQSLTPDALDAVGYAFTVFKNDAKIEAALSAAGIDGEDAVALMAAGLTFRGFGHISVKACRKLIPHLEKGMTYDKACKEAGYDLQKTGGEKTKLLSGNLDEIREIPNPVVRRAIAQTVKVVNAVIRRYGSPVAVNVELAREMGRTFQERRDMMKSMEDNNAENEKRKEELKGYGVVHPSGLDIVKLKLYKEQGGVCAYSLAAMPIEKVLKDHDYAEVDHILPYSRSFDDSYANKVLVLSKENRDKGNRTPMEYMANMPGRRHDFITWVKSAVRNPRKRDNLLLEKFGEDKEAAWKERHLTDTKYIGSFIANLLRDHLEFAPWLNGKKKQHVLAVNGAVTDYTRKRLGIRKIREDGDLHHAVDAAVIATVTQGNIQKLTDYSKQIERAFVKNRDGRYVNPDTGEVLKKDEWIVQRSRHFPEPWPGFRHELEARVSDHPKEMIESLRLPTYTPEEIDGLKPPFVSRMPTRKVRGAAHLETVVSPRLKDEGMIVKKVSLDALKLTKDKDAIENYYAPESDHLLYEALLHRLQAFGGDGEKAFAESFHKPKADGTPGPVVKKVKIAEKSTLSVPVHHGRGLAANGGMVRVDVFFIPEGKDRGYYLVPVYTSDVVRGELPMRAVVQGKSYAEWKLMREEDFIFSLYPNDLVYIEHEKGVKVKIQKKLREISTLPREKTMTSGLFYYRTMGIAVASIHIYAPDGVYVQESLGVKTLKEFKKWTIDILGGEPHPVQKEKRQDFASVKRDPHAAKSTSSG

SEQ ID NO: 7112 - protein, 1118 aa, synthetic construct
  REGION 1..1118: note = Synthetic
METEQMKYVVGLDIGITSVGWATLLLDVHDEPVRILDLNSRIFDKAEVPKTGASLAAPRRIARGTRRRLRRRKFRLHRIRQYILRRHILDKDGLDRLYKPEHTIDIFELRTAGLDRKLESEEWARILLYMAKHRGFKSNRKSASLADGDEGVMLQSIAKNREILSQYRSIGEMIYKNDKFADHKRNKGGSYEFTVARSMLIDEIKLLFAKQRDFGADFADTEAEEEYITLFSAQRNFDEGPGGDSPYGGNQIEKMVGTCIFEDGKNGTKEEKRAPKASYAFMATNLWQKINQIRLIDSTGEERPLTSEEAGKVAEKAWKKEAMTYADIRTEIGMSDDAYFKGLPYKWGNGAQKDETEKKSKFSWVKEYHKLRKVLDKIQKNRIAKLSNDDIDNIAYIFSVYKNDEKIRTALEEKHIDAQDIEVLLEHLGTFSKFGHLSLKACYNILPYLERGMVYSDACQEAGYDFRKSNEDTIADIPNPVVKRAVSQTMKVLKAIKQKYGCPPVEIHIEMARELAKNFDDRRKMTKSMEENQSKNERIKERLKTDFGIAYPNGQDIVKLKLYEEQNETCAYSQKHIDAHRLFHDSNYAEVDHIIPYSRSFDDSYSNKVLVLTAENRQKGNRTPMEYLGSDKGRKQQFIAWVKSDIKQPRKRENLLREKFTADMEKDWKARHLQDTQYISRFMLNYLQDNYKLMPGNTDRKRRIIPVNGAVTAYVRKRLGIVKIRENGDLHHAVDAAVIAAVTQGVVNAVSKYSKRHELQYHVDSDGNCVDMVTGEIMDDAFKEKHQIKGFPEPWPHFRDELEARVSDNAAEAIRNLKLPTYSPDEDIKTPFVSRMVRHKTTGQAHEDTIRGVGGADSNIYIKKVALTELTLNKDHEIEGYYNPSSDRLLYEALKTRLEQFGGKGKDAFKEPFYKPKSKPKSADDRGPLVKTCKIMEKINLSVKVHDGKGITKNTGGSMVRVDVFKVRKTNGQYRYYLVPVYVSDTVKTDLPNRAVVGGKKYNEWPTVDDKDFLFSVYPNDLLYIGGKEVKLNGTRGDTLRQEVMTKDAFLYYKAMNISSGNIAVENHDDTYAQESLGIRLVPVLEKYEVSILGDLTKAKFKEREQFTMKSQATNRSR

SEQ ID NO: 7113 - protein, 1103 aa, synthetic construct
  REGION 1..1103: note = Synthetic
MDLRYVLGLDIGIASVGWAVLALDDNDEPYKIVALNSRIFEKAENPKDGSSLAAPRREARSMRRRLRRRRHRSERVRHLLVREGVLSVEEAKSLCSSAIPKNFVRGKGLHALRYEGLDRKLSPVEWSRVLLYFAKHRGFKSNRKNEPADKEEGRVLQSIAANMELLSKYRSAGEMLYLDERFKIRKRNASDDYKMTISRDMLLMEIKTLFASQRNHGNPYAGDELEEAYTSIFLSQRNFDEGPGEGSPYAGNQIEKMIGTCTLEGKDELRAPKASYSFMRFNLLQKLSHIRIRGKAGERALTEEEIKRLEALAWSNASLNYGHFRKELGLADTDRFADVYYHTEDFVQEEKKNKIKITAAYHEIVKALKDKGKEYTATLSIDQLDAIAYAFSAYKSDSKIRDYMQAKGILSEDVELLLTNLSGFSKFGHISIKACRKLIPYLEKGMAYTKACEAAGYKDESVQKGETLPGNIKEVKNITNPVVKRAVSQTIKVINAIVGEYGSPVEIHIELAREMARSKKDRDAMTSSMEKNKAENEKIKKDLMEKGLLSPKGLDIIKWKLYKEQKGECAYSQKTIKVERLLHEEGYAEVDHILPYSRSFDDSFRNKVLVLTGENRKKGNRTPMEYFADMPERKHAFVTWCKVNIRDFKKREHLLKENYDREDVGWKDRHLNDTRYITKLVKNIIENYLLMAPFKTNRKKNVVAVNGAVTSYVRKRLGIAKIREDGDLHHAVDAAVIACVTDGMINRISRYSKRREILYNNKLVDEETGEIIKEREVFPEPWPWFRKELEARTSKNPAFFIREMKLPTYTEAELEKLHEPFVSRMPCHKVRGAGHKETIRSPRLREEGRSVTKKLLTELKLTKDKRKIEGYVNPESDRLLYEALYERLCMFDGNAKEAFSEPFYKPKADGGQGPLVKKVKISEVSTLSVPVNNGKGMADSDRMLRVDVFYISEGKKKGYYLVPIYVADTLKSVLPKKAVKAHKSYEEWDEMKAEDFVFSLYPNDLVYIEHKSGFKLKLINKKSTLQNEMYRKDGYFYYCSMNISTGVLNLENFDGTYQVESLGAKTLICLRKGEIDTLGNTRLLEKEERQDFRQMKKDRYKKV

SEQ ID NO: 7114 - protein, 1098 aa, synthetic construct
  REGION 1..1098: note = Synthetic
MEQRYVLGLDIGIASVGWAALALNDKDEPYRILDMNSRIFPEAEQAKSGESLASPRRKARGMRRRLRRRRHRLDRLRSLLVREGVLDKAALAALYEKPMTDIYAVRCEGLERKLTSDEWARVLLYFTKHRGFKSNRLAEAENDDEGQVKDALKANAELLTCYRTVGEMLYKDVKFQAHKRNKAADYQMTVSRDMLLSEIKQLFAAQRAWNNKHASETFEEKYVHIFSSQRNFDEGPGGNSPYGGNLIERMIGVCTLERAAGEKRAPKASFSFMRFTLLEKLSHIRITANGITRSLTNEERRQLEQLAWQSPSLTYAHLRKALGLQESERFNDLYYTKDYIETEKKKKFGFVAAYHEVRKALDKLEKDYIKKLSQDELDVIGYAFSVFKNEGNLHSYLINNGIAEEVCSILLANLKPFRKFGHISIKACRNIIPYLEQGMTYDAACRATGYEPSGYNGSRQKILSGAMEEVREIPNPVVRRSISQTIKVLNALIRRYGSPVEIHVELAREMARSFQDRKEMQNKIENNRKANERIIQELRENGLLQPNGLDIVKWKLYKEQQGVCAYSQKPFDVERLLHDGKYAEVDHILPYSRSFDDSYANKVLVLAGENRHKGNHTPLEYMAGKEEKLNAFVCWVNTFIRDLRKRQNLLRKNFHSEENEWKDRHLNDTKYISRFVYNLLRQHLEFSTFMSERKRHVLAVNGSVTAYVRKRLGINKIRANGDLHHAVDAVIIACVTQGMVNIIEQYSKARELWDISAKEPFPEPWPGFRKELEARTSDSPADNLRRMHLENYTEEELQAVKPIFVSRMPRRKVRAAAHEETIRSAKHLNEGVAVVKKKLSDLKLTKDKTAIEGYFNPTSDTLLYQALLARLQAFNGNAPKAFAEPFYKPRADGTTGPLVRTVKIASKSVLQVGVNGGRGVADNDSMVRVDIFYRAEGKGKGYYLVPVYAADTVKEELPLKAVTRNKSYVDWVVMKPEEFKFSLYKDDLLLVSSAKEMDMKVNEKRGEITTLPPIFRTREVLTYYQGTDSSTASLTVCNHDNTYTKRGMGVKTIGKLKKMQVDVLGQVSEAPLEQRHGFGQMKKDPHRRRGQYVSASYD

SEQ ID NO: 7115 - protein, 1089 aa, synthetic construct
  REGION 1..1089: note = Synthetic
MHYVLGLDIGITSVGWAVLELNIQDEPIRIVDLNSRIFERAEIPKTGESLAAPRRVARSSRRRTRRRRFRLYRIRRYLLRNQIITPSDMKILYDNCGDMKDIYTLRHEALDRAVTSKEWARLLIFFGKHRGFKSNRKSIIASGDEGVMLQAVKENQELLKAYRTVGDMLYSDTKFANAKRNKGESYTFTVSRRMLTDEIRTLFCIQRDLGQSFATPSLEDEYLSIFLAQRNFDEGPGGNSPYSGNQIEKMIGNCAFEKNEKRAPKASYAFMAFNLLQKINHLRIERKGKQRFLTQEERNNIAGLAWKKENLTFKDIRTAISLSGDELFQDVHYASEVSLEECEKKTKFNLVRSYHAMRKALDAVEKNRIQKLSHEQLDTIAYAFTVYKNDDKISSYLLAHSIEQQDVEALLAQLRTFNKFGHLSIKACYRILPYLKEGKTYAAACTSAGYDFRNSSLEEIKDIPNPVVKRAVSQTLKVIRAIIKKYGCEPVEIHIELARELARSFQNRVKMQKSMEENQSRNEKIKERLVQEYNILSPTGMDIVKFKLYEQQQGACAYSQKMFNIYQLFHDPSYAEVDHIIPYSRSFDDSYRNKVLVFTAENRNKGNRTPMEYLKNQSERKEQFITWVKNTIRDYKKRNNLLRETYTSEDEADWKRRHLQDTQYLSTYLYNYLCHVMKLTPGCTERKRRIIAVNGAVTAYVRKRLGINKIRSNGDLHHAVDAVIIACVTQGVINRISRYSKIKELQNFQTNDGQVVDSVTGEMLTLKHVHKKDPFPEPWPHFRQELEARVGKQPQEAIAALHLPTYENVESIYTPFVSRMPNRKVHGPAHLETIRSSKLLYKGITIVKTSLTNLKLKDGEIQGYYNPDSDRILYQALKRRLIQFDGEGRAAFKEPFYKPRSDGSPGPMVKKVKIMTNSSLNVLLNHGRGVADNGAMVRIDVFYVSEKGKKAYYFVPIYVADTVKKELPHKAVVAYKPCEEWKNVDDDDFIFSLYPNDLVYVRHKKSILLKASKRSTLSPQIKIKEGLFYYKGANISVGSISIINNDDTYGQHSLGIKTLECMKKANVDILGNVTFVGRENRQPFQLSKK

SEQ ID NO: 7116 - protein, 1089 aa, synthetic construct
  REGION 1..1089: note = Synthetic
MNYVLGLDIGITSVGWAVLELDTHDEPIRIVDLNSRIFEKAEVPKTGESLAAPRRMARSARRLTRRRRFRLHRVRRYLIRNRILDARQVEELYVDSIGKTDIYELRYQALSQPVSNSDWARLLIFFAKHRGFKSNRKHISDSGDEGQMLNAITENQEILNNYHTVGEMLYKNEKFKACKRNKGGSYAFTVSRDMLADEIHALFDVQRSLGQAYASEELEEEYMELFSAQRNFDEGPGMNSPYSGNQIEKMIGCCTFEDDEKRAPKASYAFMAFNVWQKINHLRVTCEGTDRSLSQAEKETLAALAWKKENITFKDIRNKLGLDDTVRFLDVNYNLDKYKTAEEAEKKVKFSWVKEYHAIRKALDKVKKDRISELSHEQIDTIAYAFTVYKNDEAIKRYLLEHAIELADAEALLENISGFSKFGHLSVKACYKLLEPLQQGHVYTKACEIAGYDPQKSNQENISDIPNPVVKRALSQALKVIKAIIRQYGCPPVEIHIELARELAKSAKERTVLEKAMKDNQSRNEKIKTKLHELNVMQPTGLDIVKYKLYEQQQGDCAYSQKKFDVNRLLHDPTYAEVDHIIPYSRSFDDTYRNKVLVLTKENRDKGNRTPMEYFQDKPERKEAFINWVKRTISDGKKRNNLLRVNYSADAEKEWKDRHLQDTQYISRYLYNYLKRHIELKEGYTDRKRRIIPVNGAVTAYVRKRLGISKIRENGDLHHAVDAVIIACVTQGVVNKISRYSKIKELRQFMTADGMIVDKETGEVLQTTNPRKTDPFPEPWPKFRQELEARVSDNPAEAIAALGLPTYKGIVNISAPFVSRMPNRKVHGPAHADTIRSPKLRKEGYVISKTTLSKLKLKNGEIEGYYNPSSDRLLYEALKQRLEAFGGDGKKAFKEPFYKPKADGTFGAEVKKVKLIEAATLLVSVNNGKGVAQNDSNNGMVRVDVFGVDENGKLGYYFVPIYVADTIRDILPNKAIIQGKKYTDWKVMKDDDFLFSLYSNDLIYIESAKEIVLHTIKESTLPSDYNIKKGFLYYKGTHGRNATLTVVNHDGTYTKGSMGAKGLLCLKKCTVDVLGNIHYVKKERRLGFK

SEQ ID NO: 7117 - protein, 1085 aa, synthetic construct
  REGION 1..1085: note = Synthetic
MEQRYVLGLDIGIASVGWAALALNDKDEPYRILDLNSRIFPKAEVPKTGASLASARRTARGARRRLRRRRHRLERMRGFLVSEGVLTREAMLELYSQPVPDVYEIRYEGLQRRLTPEEWARVLLFFAKHRGFQSNRLAGEGTDEEGKVKEALKDNVELLVRYRTVGEMLYKDEKFQAHKRNKASDYQMTVSRAMLRDEIDKLFEIQRKQGNPYATLEFQKRYLAIFSAQRNFDEGPGGGSPYGGNLIENMIGLCTLERDAKEKRAPKASYSFMRFSLLQKLNHMKIKENGGRRGLTAEERQCLEKLAWKSPSLNYARLRKELELRDTELFNDLFYGQDIESTEKKASFNYTVAYHEIRKALDKVEKGYIQRLSSDELDIIGYAFSVFKHEENLQAYMKSHGIAEEVIRILLANLRPFRKFGHISVKACRKLMPYLEQGMVYYDACIAAGYKLSGEDGERRKYLSGYMEEVRDIPNPVVRRSISQTIKVLNAIIKRYGSPVEIHVELAREMARNFQERKQIQKQIDDNSKSNERIKQELIENGLLQPNGLDIVKWKLYKEQQGVCAYSQKPFDIGRLLHEGKYAEVDHILPYSRSFDDSYVNKVLVLTDENQHKGNRTPMEYMENDDKRLMTFTTWVESTIRDFRKRRNLLRKNYSSEEQDWKERHLNDTKYISRFVYNLLREHLIFNSFMTGRKRHVLAVNGAITAYVRKRLGISKIRENGDLHHAVDAAVIACVTQGMVNKVQEYSKAGEMWGHAKAEQFPEPWHGFRRELEARVGVKPAEKLRAMCVSNYTDDELQTVKPIFVSRMPQHKVRATAHEDTIHSPRLVNEGFSVQKTKLSKLRLTNDGMSVADYYNPSSDVLLYQAILKRLQAFQGDAKKAFAAPFYKPRADGSQGPLVRTIKTVKKTDAQVMINQGKGMADNGRMLRVDVFYRAEGKGKGYYLVPIYAADVVKPVLPLKAVVANKPYADWMEMKADEFIFSLYQNDLLLVRSEKGVDLSPVDKNSVLPKVKKQVALLYYQTTNRNTSAVTVINHDNTYGQGSMGIRNITEIKKMQIDVLGNITEAPQEVRRDFRRMKKDPHAKV

SEQ ID NO: 7118 - protein, 1081 aa, synthetic construct
  REGION 1..1081: note = Synthetic
MNYVLGLDVGIASVGWAVLELDEKDEPIRIIDLSSRIFDKAEVPRTGASLAQARRIARGVRRRLRRRRFRLHRVRSYLIRQSILTKEELQNIYHCSHEESIYELRYKGLSEKLSATNWGRLLLFFAKHRGFRSNRKNDQSKEDGLMLKAISENEELLKKYRTVGEMIYSDEKFKEYKRNKGGNYQFTVSRSMLIDEIKMLFETQRKLGQFFAEQELEEKYLDIFSAQRNFDEGPGGNGFYSGNQIEKKIGVCTFEKGENGENPPKRAPKASYAFMAFTLWGKINHLRINSKGTRRALTQEEKEKVAKLSWEKASINFSTIRKELQLSPEDHFIDVRYTYGKTDEECEKGTKWNYCASYHTMRKALDKVYKNRIKELMSEQDEQKQLDDIAYAFTVYKSDEKIKNYLLQCQLEEKDAEALLAGVNNFSGFGHLSNKACYKILLHLKQGYEYAKACEMAGYDFKNISLEDIKDIPNPVVKRAIIQTLKVVRAVVREYGNPVEVHIELARDLGRNFKDRDLIKSNMEKNQKKNDEIKERIVNEFGIMQPKSQDIVKLKLCEQQDNVCVYSQKSFDLHRLFEKNYVEVDHIIPYSRSFDDTYANKVLVFNKENRDKGNKLPLEYLANQPERKEKFIAWVKSHIKDRKKRDNLLRESYSAEDKNGWKQRNLQDTQYISSYLYRYLMQNITLAPGYTDRKERIISLNGVVTGYVRKRWRIPKIRANGDLHHAVDAVVIACINDRLIKRVTEYSKAKELEYTPSDSGAVKTSMKDGFPEPWYCFRQELKARLSETPDEAIRNLHLATYCNVGNIKTPFVSRMLKCKVTGQANKETIGSGRLKDEEYVIEKTLLTELKLDKNNEIEGYYRPEDDKLLYEALKKQLMNHGGKGDKAFQAPFYKPKSDGTPGPLVKKVKLKVKLNSQVHVYQGKGIAQNGDMIRIDVFCVNKKGKKAYYFVPIYVADTVKKELPGKAVVSGKPYSAWKPMDDKDFIFSLYKNNLIYIEFNKPKSFVAEEGCTLSQTVDVKKAFLYYIKADRFAGTITVVNHDNTYKTRTGIKNTLLRFKKCVVDPLGRISFVEKEKRQRFQ

SEQ ID NO: 7119 - protein, 1081 aa, synthetic construct
  REGION 1..1081: note = Synthetic
MNYVLGLDVGIASVGWAVLELNEEDNPIRIEGLGARIFDKAEVPKTGASLAAPRRMSRGIRRVIRRRRFRLQRVRSYLKRHNILPAEKVDHLYDVPSAIDIYELRKRALTEKVTAEEWARLLIFFAKHRGFKSNRKKASGDADEGEMLKAIAANAELLKNYRTVGEMLCDNEKFRKRKRNRDGAYNFTVSRAMLIEEIHTLFEIQRNLEQKFADEKLEEEYVILFVAQRKFDEGPGENSPYAGNQIEKMIGSCTLEGKKEKRAPKASYAFMAFNLWQKINHLKINRRGSERFLTEEERRRIADLAWKKEKLTYGSLREVLFLDPEDRFVGLRYDLKKEKEEDLEEPVSEAEKMSFSWVKDYHSIRKALDKVEKNRILKLSHEQLDTIATAFSVYKNEETIEKYLEEGGIEKADREALLERLSSFSKFGHLSLKACYKILPFLEKGEVYSRACERAGYDFRKSSLENINDIPNPVVKRSISQTLKVINAIILRYGNPVEVHIELARELAKNFRDRKKMEKGMQENQAKNEKIRQRLMSEFGVLRPKGMDIVKFKLCEEQNGECAYSQKHFDMEKLLRDPSYAEVDHIIPYSRSFDDSYNNKVLVLTKENREKRNRIPMEYLADATERKNRFIHWVKSTIRNSRKRENLLRTDYTETTENEWKRRNLQDTQYISKYLYNYLRHHLVLAKGYTERKRRIIPVNGAVTAYIRKRLGINKIRENGDLHHAVDAVIIACATQGIVNKVSRYSKSRELWDYEVDMETGEVLQKKNENRKDIFPEPWLNFRYELEQKVRVRPLDIPETADITEMEEPFVSHMPNRKIHGPAHKETIRSGRLKEEGYTISKTALIDLKLTEDKEEIKGYYNKESDRLLYEALKKQLQRYSGKAKEAFKEPFHKPKADGTPGPIVNKVKIMEKSTMPVPVNGGKGLASNGNMVRIDVFRVEEKGKKKYYFIPVYVADTVKEELPNRAVLAHKPYEAWKIMKEEDFIFSLYPNDLIFVDAGKEIPFKAALKGSTLDPEKKASRFLMYYKGADIAGGTINGVNHDSTYGIRIGLQQLKEIRKCRIDILGNISFASKEKRQTFR

SEQ ID NO: 7120 - protein, 599 aa, synthetic construct
  REGION 1..599: note = Synthetic
MDAPPVEIHIELARELAKSAKERTELEKAMKDNQSRNEKIKTKLHELNVMQPTGLDIVKYKLYEQQQGDCAYSQKKFDVNRLLHDPTYAEVDHIIPYSRSFDDTYRNKVLVLTKENRDKGNRTPMEYFQDKPERKEAFINWVKRTISDGKKRNNLLRVNYSADAEKEWKDRHLQDTQYINRYLYNYLKRHIELKEGYTDRKRRIIPVNGAVTAYVRKRLGISKIRETGDLHHAVDAVIIACVTQGVVNKISRYSKIKELRQFMTADGTVVDKETGEVLQTANPRKTDPFPEPWPKFRQELEARVSDNPAEAIAALGLPTYKGIVNISAPFVSRMPNRKVHGPAHMETIRSAKMQQDGYTMVKTELTNLKLKDGEIEGYYNPSSDKILYDALKRRLEQFGGDGNKAFKDPFYKPKSDGTPGPEVKKVKIMTKSSLNVAVNQGKGVADNGSMVRIDVFGVEEKGKNAYYFVPIYVADTVKETLPNRAVTRGEPYNNWKIMKDEDFLFSLYPNDLIYIESLSPVSFHTVKGCTLVPKIERKEMLLYYRKAGISTASITVLNHDNTYVKESLGIKTIGKLQKCTVDILGNVHYVQKEKRVGFK

SEQ ID NO: 7121 - protein, 1080 aa, synthetic construct
  REGION 1..1080: note = Synthetic
MNYVLGLDVGITSCGWAVLELNPEDEPVRIVDLNSRIFDKAEAGNGDSLAAPRRMARGIRRLTRRRKFRLHRVRGFLVRHHILTKEEIENLYTTPHKTDIYELRYRALTEKVSPSDWARLLIFFAKHRGFQSNRKNEKSGEDGLMLAAIGENKKVLENYRSVGDMLYSDEKFRDCKRNKGGTYRFTVSRSMLKEEVQTLFKKQRELGQTFAGEDLEDEYISIFSAQRNFDEGPGANSPYAGDQIEKMIGNCTFEDGKNDRPSQKRAPKASYAFMAFNLWQKINHIRVNCKGIERSLETEEKNKIAGLAWTKENITYHDLRQITGLDEETRFSGVTYPLDSTTEEAEKKVKFSWVKPYHAMRRALDKVERNYIQKLSREEIDAIAYAFTVYKNDKKIRTALTEKGIEDNVADVLITHLDRFSKFGHLSEYACYKLLPFLEKGEEYYKACESAGYDFRKSSMEKLEDIPNPVVKRAVTQTMKVIKAVQRKYGNPVEVHIELARELARSFKDRAAMDDRMKENHAKNEEIKEYLSKELHVMSPTGQDIVKWKLYKQQQGSCAYSQKPFDIDKLLHDRTYAEVDHILPYSRSFDDTYRNKVLVLTKENRDKGNRTPMEYLADKPERKEKFIAWVKTTIKDSKKREHLLRVKYGRDEEAEWKQRHLQDTQYISRFLYNYLRNTLELTPGYTDRKRRIIPVNGAVTGYIRKRLGIHKIRENGDLHHAVDAVVIAATTQGMIQKVTRYSQIKENVKLIDKETGEVLTAKEFHNKDNFPEPWPRFRQELEARVSEDPEEAIRRLCLPAYENAGEIKKPFVSRMPRRKVRGAAHKETVRSGKLREDGYTILKTDLSALKLKNGEIEGYYRPESDRLLYEALKKRLEAFGGKGKEAFKEPFYKPKADGTPGPLVKKVKIIEKSSLNVPVHKGKGVAYNDTMVRIDIFGVNEKGKTAYYFVPVYVSDTVKKELPCRAVTRGKSYENWKIMDDKDFLFSLYPNDMIHVVAKKPFSFTAAEGADLAPTVETKDTCVYYKGADIKGGSITVINHDNSYGIKSMGIKTLLQLEKCEVGVLGNISFVKQEKRQGFR

SEQ ID NO: 7122 - protein, 1086 aa, synthetic construct
  REGION 1..1086: note = Synthetic
MNYVLGLDIGIASVGWAVLELDTHDEPIRIVDLNSRIFEKAEVPKTGEALAAPRRMARSARRLTRRRRFRLHRVRRYLIRNDILDEQQVAVLYADAAGKTDIYELRYQALSQPVSNSDWARLLIFFAKHRGFKSNRKHISDSGDEGQMLNAITENQELLKNYRTVGEMLYKNEKFKACKRNKGGSYTFTVSRAMLTDEIHTLFDVQRNLGQAYASEKLKEEYMELFSAQRNFDEGPGMNSPYSGNQIEKMIGCCTFEDGEKRAPKASYAFMAFNIWQKINHLRVTCEGTYRFLSQAEKETLAAFAWKKENITFKDIRNKLGLDDTVRFLDVNYNLDKYKTAEEAEKKAKFSWVKEYHAIRKALDKVKKNRISELSHEQIDAIAYAFTVYKNDEAIKNYLLEHAIELADAEALLENISGFSKFGHLSVKACYKLLKPLKQGHVYTKACEIAGYDPQKSSQGNISDIPNPVVKRALSQALKVIKAIIRQYGCPPVEIHIELARELAKSAKERTELEKAMKDNQSRNEKIKAKLHELDVMQPTGLDIVKYKLYEQQQGDCAYSQKKFDVNRLLHDPTYAEVDHIIPYSRSFNDTYRNKVLVLTKENRDKGNRTPMEYFQDKPERKEAFVRWVKRTISDGKKRNNLLRVNYSADAEKEWKDRHLQDTQYISRYLYNYLRQHVPLKEGYTDRKRRIIPVNGAVTAYVRKRLGISKIRENGDLHHAVDAVIIACVTQGVVNKISRYSKIKELRQFMTADGTIVDKETGEVLQTANPRKTDPFPEPWPKFRQELEARVSDNPEEAIAALELPTYEGIVTISALFVSRMPNRKVHGPAHMETIRSAKMQQDGYTMVKTDLTNLKLKDGEIEGYYNPSSDKILYDALKRRLEQFGGDGNKAFKDPFYKPKSDGTPGPEVKKVKIMTKSSLNVTVNQGKGIADNGSMIRIDVFGVEERGKNAYYFVPIYVADTVRETLPNKAVVPNKSYNDWKFMRDEDFLFSLYPNDLIYVESPTPVSFHTVKGCTLPPKIERKKMFLYYRKANISTASITVLNHDNTYVKESMGIKTIAKLQKCTVDVLGNIHYVQKEKRLGFK

SEQ ID NO: 7123 - protein, 906 aa, synthetic construct
  REGION 1..906: note = Synthetic
MLEDEIKLLFEKQRDFGSAFAEKDAEEEYIDLFSAQRNFDEGPGGDSPYGGNQIGKMIGLCTFEGKNGEKRAPKASYAFMATNLWQKINQIRIIKKGTELHLTAEEAGKIYEKAWNKEAMTYKDIRSEISLGDEASFKGLAYKWTETDKEETESKTKFSWVKEYHTLRKVLDKVEKNRILQLSHDEIDNIAYVFSVYKNDDKIREALEETDLDSKDIDVLIENLGTFSKFGHLSLKACYKILPYLEQGMVYSDACTAAGYDFRKSAQGSIADIPNPVVKRAISQTMKVLKAIKQKYGCPPVEIHIEMARELAKSFDERQKMTKSIEENQSHNERIKERLQKEFNVPYPSGQDIVKLKLYEEQNETCAYSQKHMDAHRLFHENNYAEVDHIIPYSRSFDDTYNNKVLVLTAENRQKGNRTPMEYLSGDEARKKQFVAWVKSDVKKPRKRENLLREKFTDDAENDWKARHLQDTQYISRFMLNYLQNNYELTPGNTDRKRRIIPVNGAVTAYVRKRLGISKIRENGDLHHAVDAAVIAAVTQGVVNSVSKYSKRHELQYHVDEHGNCVDLVTGELMGDAFKENHKIKGFPEPWPQFRAELEARVSENATEAIRILNLPTYSPDEEIKTPFVSRMVRHKTTGQAHEDTVRGKSNVADNVYVKKVALTELKLKDGEIEGYYNPSSDRLLYEALKKRLEQFGGKGKDAFKEPFHKPKADGSSGPIVKKCKVLDKINLSVPVHGGKGAAANANGGMIRVDIFKAKGKNGKSSYYAVPIYVADTVKVELPNRAVVTKKTYAEWPEMKTEDFAFSLYPNDVVYIGGKEIKMNVMPGCTLATENHVKDDFFYYKGLDIATGAMIVINHDGTYKQRGVGIKQLPLIEKYEVSVLGDLVKAIYRPREIFKHKAQRSK

SEQ ID NO: 7124 - protein, 1092 aa, synthetic construct
  REGION 1..1092: note = Synthetic
MNYVLGLDVGITSVGWAVLELNSQDDPIRIVDLNSRIFEKAENPKNGESLALPRRQARSIRRLTRRRRFRLQRVRRYIVRSGILNKETLHRLYNTMEGLPDIYELRYRGLTQPLSAEEWSRLLIFFAKHRGFKSNRKNASDGDDGEMLSAVKANQELLKSYRTVGEMLYKNEKFKECKHNKGGSYAFTVSRAMLEDEIRALFEVQRQLGQAYAAEELEKEYIEIFGAQRNFDEGPGAGSPYGGDQIEKMIGTCTFEPMEKRAPKVSYGFMAFNLWQKINHLGLIANGVARSFTAEEKQQIADLAWSKNNLHLQHIRKELRIPEDTIFSGVNYGIRKQDTEWAKQLEEVEKKQKFNWLTPYHEMRVALDAVKKHRITELSPDQIDTIAYAFTVFKNDEKITSYLRENGIEEDDIRALLSKVKGFSKFGHLSLKACYKILPYLEEGNIYSKACELAGYDFRSSSQEQLEDIPNPVVKRAISQTLKVIKAIVRRYGNPVEVHIELARELARNFEDRRTMQKSMEDNQKRNEEIKERLVKEYNVLQPTGMDIVKFKLYEEQQGACAYSQKMFDVNRVLHDPSYSEVDHIIPYSRSFDDSYNNKVLVLTKENRDKGNRTPMEYLKDNPVRIDAFTTWVNAIVRNSRKRANLLKSSFTEDAEQEWKRRHLQDTQYISRFLYNYLRQNLPLKEGFTNRKRRIIPVNGAVTSYVRKRLGIAKIRENGDLHHAVDAVIIACVTQGVIKRVSEYSKSRELWLYQLDDGTVIDGETGEVMTGQRGHKQEPFPEPWPEFRHELEDRVSENPPELLRHLQLPAYEGIDIETIKTPFVSRMPNRKVKGQAHEETIRSGRLKYEGYTVTKVDLKNLKLKNGEIEGYYNPDSDRLLYNALKQQLEVYDGKGDKAFAEPFHKPKADGTPGPIVKKVKIMTKSNLNVPVNGGKGVADNGSMVRIDVFGVEERGKMAYRFIPIYVSDTVKRILPNKAVTRDRGYKDWDIMDDKDFLFSLYPNDLIYVESKRDISLKAAKGSTLAKERKQKEALVYYRGADIATASIGVVNDDNTYSMRGLGIKTLQSIRKCIVDVLGNVAFVTKEKRQGFR

SEQ ID NO: 7125 - protein, 801 aa, synthetic construct
  REGION 1..801: note = Synthetic
VKGHIVFCHRRKKKRWPHSLGKKENITFKDIRNKLGLDDTVRFLDVNYNLDKYKTAEEAEKKVKFSWVKEYHAIRKALDKVKKDRISELSHEQIDTIAYAFTVYKNDEAIKRYLLEHAIELADAEALLENISGFSKFGHLSVKACYKLLEPLQQGHVYTKACEIAGYDPQKSNQENISDIPNPVVKRALSQALKVIKAIIRQYGCPPVEIHIELARELAKSAKERTVLEKAMKDNQSRNEKIKTKLHELNVMQPTGLDIVKYKLYEQQQGDCAYSQKKFDVNRLLHDPTYAEVDHIIPYSRSFDDTYRNKVLVLTKENRDKGNRTPMEYFQDKPERKEAFINWVKRTISDGKKRNNLLRVNYSADAEKEWKDRHLQDTQYISRYLYNYLKRHIELKEGYTDRKRRIIPVNGAVTAYVRKRLGISKIRENGDLHHAVDAVIIACVTQGVVNKISRYSKIKELRQFMTADGTVVDKETGEVLQTANPRKTDPFPEPWPKFRQELEARVSDNPAEAIAALGLPTYKGIVNISAPFVSRMPNRKVHGPAHMETIRSAKMQQDGYTMVKTELTNLKLKDGEIEGYYNPSSDKILYDALKRRLEQFGGDGNKAFKDPFYKPKSDGTPGPEVKKVKIMTKSSLNVAVNQGKGVADNGSMVRIDVFGVEERGKNAYYFVPIYVADTVKETLPNKAVVPNKSYNDWKFMKDEDFLFSLYPNDLIYIESLSPVSFHTVKGCTLVPKIERKEMLLYYRKAGISTASITVLNHDNTYVKESLGIKTIGKLQKCTVDILGNVHYVQKEKRVGFK

SEQ ID NO: 7126 - protein, 1158 aa, synthetic construct
  REGION 1..1158: note = Synthetic
MIGYYNKVRQECRCTVSSDGVPIIRYAVIFIYTCHLLRKRRICMDTKELKYVVGLDIGITSVGWATLLLDSQDEPVRILDLNSRIFDKAESEDGASLAAPRRMARGTRRRLRRRKFRLHLVRQYILRYHILDKNGLEGLYKPDQTIDIFALRTAGLERQLEPEEWARILLYMAKHRGFKSNRKSTADATADGDMLEAIQQNKEVLSKYRSVGEMFDKDEKFSAHKRNKGGSYEFTVARSMLVDEIKLLFEKQRDFGSAFATEAAEEKYIELFSRQRNFDDGPGKNSPYYGVQIEKMIGECTFEEGEKRAPKASYAFMATNLWQKINQIRIIEDDIERPLTSEEARKVAGIAWKEENMTYKDIRSEIGLGDEASFKGIGNTKDKMKTEKKSSFSWVKGFHKMRAALDNIEENRIFQLSHEDIDKIAYVFSVYKSDQKRQENLNDWIKKNTDSKISQVDIKALIEHIDSFSGFGHLSLKACYKILPKLEAGYEYSKACQLAGCHLKEINKADILKIPNPVVRRAVGQALKVLRAIEEKYGCPPVEIHVEMARELARSFDERQKMTKSMEDNKSRNERIKERLKTEFHVPYPSGQDIVKLKLYEEQNGKCAYSQKYMDVERLFHGSNYAEVDHIIPYSRSFDDTYNNKVLVLTAENRQKGNRTPMEYLANDEARKKQFVAWVKSDIKKPRKRENLLRENFSEGTENDWKERNLQDTQYISRFVLKYLQKYYPIQDSSGKTKQRVFAVNGIVTSYIRKRFKIEKIRANGDLHHAVDAVIVAAVTPGIIKKISQYSKRHELRSFFTDKGFYVDPKTGEIIQNNNSDTNQIPQLWPLFKEELEARVSENPTERIRELKLSTYNLVEEIKTPFVSRMVRRKKTGQAHKETVKGVGITRDKGKCKTVIVKKVSLDKLELTQDGEKIKNYYNKESDWLLYKALLKRLQKFKERHKKNSRKTYGQEAFEDIVFHKPKADGSEGPVVNKVKVIEDNTLSVSVYRGNGVADNATRVRTDVFKVPQKNGKYKYNFVPIYVPDTIKDVLPNKAITGFKEYDEWTQMNDKDFVFSLYPNDVIYIGGREFEVNSLNNAPQRKLKDAYVYYKGINIRNGNIHIETHDKAYEQPSLGVKTVPILEKYEVTVLGDLIKAPYRSRETFGNKDAGIHNV

SEQ ID NO: 7127 - protein, 1132 aa, synthetic construct
  REGION 1..1132: note = Synthetic
VPIIRYAVIFIYTCHLLRKRRICMDPKELKYVVGLDIGITSVGWATLLLDSQDEPVRILDLNSRIFDKAEVPKTGASLAAPRRMARGVRRRLRRRKFRLHRVRQYILRHHILDKAGLECLYKPKMDIDIFALRTAGLDRLLEPEEWARILLYMAKHRGFKSNRKSTAVAGGDDGIMLKAIQQNKEVLSKYRSVGEMFDKDEKFSDHKRNKGGSYEFTVARSMLVDEIKLLFEKQRDFGLAFAEKDAEEEYIELFSAQRNFDEGPGGDSPYGGNQIEKMIGLCTFEGKNGEKRAPKASYAFMATNLWQKINQIRIIEKGTERPLTAEEAGKIDEKAWKKEAMTYKDIRSEISLGDEASFKGLPYKWTETDKEETESKAKFSWVKEYHTLRKVLDKVEKNRILQLSHDDIDNIAYIFSVYKNDDKIREALEGTHLDSKDIDVLIENLGTFSKFGHLSLKACYNILPYLEQGMVYSDACTAAGYDFRKSAQGSIADIPNPVVKRAISQTMKVLKAIKQKYGCPPVEIHIEMARELAKSFDERQKMAKSIEENQSHNERIKERLQKEFNVPYPSGQDIVKLKLYEEQNETCAYSQKHMDAHRLFHEDNYAEVDHIIPYSRSFDDTYNNKVLVLTAENRQKGNRTPMEYLSGDEARKKQFVAWVKSDIKKPRKRENLLREKFTTDAENDWKIRHLQDTQYISRFMLNYLQNNYELTPGNTDRKRRIIPVNGAVTAYVRKRLGISKIRENGDLHHAVDAAVIAAVTQGVVNSVSKYSKRHELQYHVDEHGNCVDLVTGELMGDAFKENHKIKGFPEPWPQFRAELEARVSENAAEAIRILKLPTYSPDEEIKTPFVSRMVRHKTTGQAHEDTVRGKSNVADNVYVKKVALTELKLKDGEIEGYYNPSSDRLLYEALKKRLEQFGGKGKDAFKEPFHKPKSDGSPGPIVKKCKVLDKINLAVQVHGGKGITKNAGGSMVRVDVFKVKKSNGGHQYYLVPIYVADTVKERLPNRAVMAHKEYDEWKIVDDKDFVFSLYPNDLLFIGGKEIKLNGTGGDTLHQGIMVQNVYLYYRGLNIAVGTISVEDHDSKYIQESLGVGRVPVLEKYEVSVLGDLIKAQYRPRETFKHKAQRTKDQVNV

SEQ ID NO: 7128 - protein, 1121 aa, synthetic construct
  REGION 1..1121: note = Synthetic
LPTVPTIGTLDTETIVAKLPRGGKTMNYRLALDIGTASCGLIAVKLDENREPSEIIHHGLHIFSEPVLPHAAGETGEPKKASRRKARLARRNIDRRVRRLRRIAMLSSLLDLDHKTIPPDKGQHIHEARANAPQKRIELDDLVRVFLKLAKRRGYAGGFRTKTDKQRDEDSGVVQPGIEKLQEAMKAADCKTVGQYLSHRFSNGETLKLKEAGLYTHRDMLIGEFEAIWTEQEKHHPILRESRLDPVAKFADGKEKIRPLREQFREAIFYQRPLKSIAPMVGNCALEKSLPRAPMAQPAMQAFRIEKQLADLRWGMGRSALPLTSEQKSVIRDMLNDPDQITKEGKLTFKKIYAALEKKSLMPASRRSLNMERSSREELYGNRTFRAMRDLDAIEQWLTFDSPTQIRIINFLADLGSPEQVDLPDWQDRFTKRKRVKNHRTGRWEEKHEKRNLDRNLVNFVNKLVENGKFGRLGGMGFESGRAGYSVRALKILTDMMRNANCDEHAAIQTCYPPPPPTGELLMHLSPHPPTGNVVVDVALGVVRHAVNDALAKLGEPPTEIVIELSRDMALGLKARGKIEKKIDKNRKLRDKARQELEANSQLGTERNILRYILWQQQDTHCPYCGDRISLGEAVDGNSTNFEHILPRSLTRVGKQRNHLVLAHRRCNDAKGDRTPYEAFGHDEMRWNAVKYCADVLEKKKQFSKSKLLILNEYERETLDEAAIDEFSDRQLHETSWIGKLAALWLQTICPTPVAPSRGTLTAHLRRIWKLETVIAQARLEAGLPVLDQGGEKITPEEFDRFRPYWEGHTGKGIERTDRKIDKRIDHRHHLIDALVIAQTSRSLYQRMAKNYKSLAERQQAGEAVRLRLFVEPPLKNVREQALALAQGADIRHKPDRQISGNFFQQTAYRKTYTEDGKSRAVVRIPLIQLTDTKGSLEKAKKGISDIVSDHTRRVVSSSFEQRISSGKSVKEALTEPIYDPQFNTAIKRIAVYQRIGRGFLDGSNTFPIEHGYGFVKHYVSDGYAFVSITEKNGRIESADSVPLFRAHRLNGYPKDGERRFFRGDTLLAPGNGKKYVIHQLLANATVRVAEVTESRSWIALGAESGATQFGAASLIKMKRL

SEQ ID NO: 7129 - protein, 1295 aa, synthetic construct
  REGION 1..1295: note = Synthetic
MKKTKITLGIDLGVSSCGLAIVEEKEGKKEIKKLAVRVVPEDPNFHGKYYSGLRASKHQERTEKRGSRRNNQRFKQRRDKLVKILKKNEMYPDNKLINLEAYKLYELRAKAVTEKISLQELGRVLLLLNQRRGFLSNRKSNTSDENSTDYKERIKLLEKNLLGKTIGQGLFNELKKEQNVQQVLLRERTYFRHLYLEEFDRIWDKQAVFYNKTLTGSSQSAENKNTLYHEIRNKIIFYQRPLKSQKSLVSSCELETNFIKLNLNNGTLVKELRFLSRKNASITLYSHEYSKIKLNNDVITIFFKKYSNEDIITKKDLLNTLALDEHKDYYIKISHKATVKSSPYFEVFRIWQRLNDLSWKDYDGIEHKPTQEQKEALFNALFYNQSNVKNYKGVNSKYKLTISEIKKVLGYGIRDKIYFNYSELEASRTYKLIKDKLEEAGINESEQYLSFDLNKNDEKGGLLELWHITYSLSTNKEISSTLQKRFNFTKKQSDFIAEHVNYLSDYGSLSTKAIRKLLPFMQQGANFYDAKVDAKYISDKKIAIREIVSKKLKPIVKNSLRNPVVEQILNQMVNMVNQAIETYDLLNKDKYEDFEIRVELARELRNSAKTRSKITSANKNNKKDNNKIRAILQNEYQFKIVNGRDVKRYKLWEQTNKECLYCGKNITCKEFMEGTAEMEHILPKSRSFNNSMSNYILAHKACNSGSKGKNQMTAYDFMESKGAEELNRFITTVNMLYDNGSNKAKISKAKFENLLTRGEDIPDDFVDRMKKDSQYISKEAVKHLKTICLNTNTTTGQVTDFLRDKWGLKEVLQDVNFDKYEHLGQVETKTIKRKGGEKEIKVITDWSKRDDHRHHAIDALICALTDQKIIYKLNNLNKLYQYNRDALSTKEVAEIEAYLSEELEGNTLNLKSFSDLTKQYFSKPIPNLRKEVGRHLGSILISFKKDNNKVLTKSKNKIKNAKVQETWVPRKRLHEDTILGVKNLGRIIPVSKIYNCELIVDETIKKEAYKRLSLFDNNYYLAFSKKSLKEIPFKIKDIKLEEVEVKTLTKRVFLNDKFTTAQLEKIIDPRIKSIVKNRVEENEGKIKGAFKDVLYSNREKKIQIKKVLITEESKVEKIRKGYAKPGGNHHALIFINNEGEYTNKVISFYDAVQIGLLNIRETGKPTPIIKRKDNDFYGQFVFSMQINDLFVFDLKHTTNPQEVNELNFLDLKNRPLISEKLFRVQKMTKKSDGRFEVTYRHHLETSIERKAKDGKKVDMKKLKGLVWREEASSKHLGKITKIKINHLGDIIRIGE

SEQ ID NO: 7130 - protein, 1214 aa, synthetic construct
  REGION 1..1214: note = Synthetic
MKKILGLDIGVSSVGLAIVEDSAKGKKVLKMACRVVPEDPNFHGKFYSGNTASKNLARTEKRGIRRNNQRFKTRRNKLYALLRLHDMFPDKALFLLDAYQLYGLRAKAVEEKISLKQLGRILILLNQRRGFLSNRKSVSEEESSSAYKDRIAELENDRSGKTIGQQLYQELQEAKETQHILLRERTYLRASYVEEFDRIWNKQQQFYPELLSGGPGQSDNGGTLYDEICNKTIYWQNPLKSQKGLVSACPFEKHHKAVAKSSPYFEIFRIWQKVNDLNWKTESGEEQTPSEQQKEALFNALFYGTGLNKHYKLTITAIKKILGFSRNERVYLSHTELDGSRTYSMLKAALIRAGVDDAEQYLFFNLDQHDEKGGLFELWHLTYSLPDEQQVVSSLMRRFGFTEDQSQTIARSVGYTSDYGRLSTRAIRKLLPYLQKGLQYSEACDEVGYDHSGYKTKIEIQDRLLPVRQNSLRNPVVEQILNQMVNMVNIAIDQYGPFDEIRVELARELRNNAQSRKRISAHNAKDKKTNDSIRTCLKEEYGFKIVNNRDIKRYKLWQETKQQCLYCNNPITVNEFLQGQADIEHILPKSRSFSNAMNNYILAHRTCNKTKDQRTAYDFMASLGEERLHQYIEKVNALYKDGAGSISKVKFENLLCRGEDIPSDFVERMKKDSQYIAREAVKLLKTVCEATYTTTGQITDLLRKEWELEHLLREINLEKYKLAGQVEMKNYKNSRGETVPYTAIKNWSKRDDHRHHAVDALICALTDQKVIFRLNNLNKIYQYKRNELTGEELASFEKETGKHLDLKEFIDQGAYEFQCPIPNLRAQVKHHLENLLVSFKKSNSKVLTPNIDQNTGKKYWTPRGRLHEETVMGKVKRIAAKPAKLDDRFRQHEDIVDPAIKELVIHHLEQYDYNPRVAFTAKILRNYPLRYKGKVLKEVKVYEKVGTKRIALDENITHAQVKKLTDQRIRHLVERRIAEAGSIKQAFRNLDENPVWLNQEKGIKVKRITVFDENTVIQTSVKRDHFGKELLKDGRPVPTNNVATGGNHHALVYKNHKGDYTIKVISFWEAVGIGLANIEQTSKPYPVVDRSDHIEWGAFRFSMQINDLFVFDLKHRADSRNDDELDFLEVKNLDQISCKLFRIQKISVAKTGQTIIDFRHHLETRVDRKDANGKSIDEAPLKGITWNRISGKKDLGRITKIRLNHLGNIIKVGE

SEQ ID NO: 7131 - protein, 1203 aa, synthetic construct
  REGION 1..1203: note = Synthetic
MKKYKLGLDVGVSSVGVAVIKEENGKSSVEKLSVRIVPEDPNFHGKFYSGNTASKNLDRTIKRGIRKNNQRFKARRDKLYQTLRENNMFPTDNLFDLPATELYGLRAKAVSKKVSLEELGRIFIVLNQRRGFLSNRKSVSEEENSTEYKECIATLEKELAGRTIGQKLYSELEESESDFEVLLRERTYQRSSYIEEFDRIWDEQKKYYSVLTGGANEDNNKETLYDLIRNRIIYYQRPLKSQKGLISECSFEKYHKATAKSSPYFELFRIWQKVNDLSWKTPGGETFKPTLGQKQNLKEALWNGENLNAKHKLSVTEIKKLLGYGRNEKIYLNFTELDGSRTYTVLKNALEEAGIENFQQYLFFNLDISDEKGGLFELWHITYSLPTEKEVVNALKNRFGFSENQSEIIAKKVGYPSNYGNLSTRAIRKLLPYLEKGLGYSEACDAVGYDHSGYKTEIELKPNLKQLKKNELRNPVVEQILNQVVNVVNLVIEKYGKIDEIRVELARELRNNAKTRKNISQANSKNKRNNDVIRKKLIEEYGFRLVNGRDVKRYILWEETAHECLYCNNPINGTDMLTGNADIEHVLPKSRSFSNAMNNYIIAHRKCNSNKGQKTAYDFMESKGEEVLGQYIEKVNALYNDGKGSISKSKFDNLLCKGEDIPSDFVERMKKDSQYISKEVVKMLKTVCPNVYTTTGQVTDFLREEWKLKNLLQELTFDKYKAIGQVEEKTIKTKNGQTKTFETITDWSKRDDHRHHAVDALICALTNQKIIFKLNNLNKIYQYERDALSQKEIEEFEEFLEGKFSLKEFSTQQENIIECSIPNIRREVQKHLEEIFISFKKENSKVLTKNINAPKNVEPKTTWVPRARLHEDTIMGRVKRIAEKKMKLSDKVSMEEIEMVVNPEIKEILYQHLTKFDNNPKIAFAQKTLKGELISYKGNEIKEVGVYEWVNTKRVNVENFLTDNQKTTSAKDKFIENILKSDRGIGVLLDRRLKEFNGDYKEAFKNLSENPIITKNGMIVKNVTIYDESKVERVRNGYAKTGGNHHALIYKDKNGKYNDKVVSFWEAVEIGLLNIAVHHNPYPIINRNDNEEFGTFQFSMQINDLFVFDLKHSDNPQEENEIDFFDVKNRKLISNNLFRVQKMTKKSSGAFEVTYRHHLEANLNRSDKILKGYTWDEHGSNKHLERLTKIRINHLGEIIKIGE

SEQ ID NO: 7132 - protein, 1203 aa, synthetic construct
  REGION 1..1203: note = Synthetic
MKKIIVGVDVGVSSVGIAVMSEENQKKTIENLAVRIVPEDPDFHGKFYSGNTASKNLERTIKRGIRKNNQRYKARRDKLCQTLKNNNMFPANNLFHLSATELYGLRAKAASEQISLQELGRVLILINQRRGFLSNRKSVSEEENSTEYKERIAELEKALENKTIGQKLYSELEESNNTFEVLIRERTYQRSSYIEEFDRIWDEQKKYYQILTGSPNEDNNKGTLYDLIRNRIIYYQRPLKSQKGLIAECLFEKYHKAAVKSSPYFELFRIWQKVNDLSWKTTNGETFKPTPEQKQKLKDALWNGGNLNAKYKLSITEIKKLLGYGKNEKIYLNFTELDGSRTCAILKNALEEAGIENTEQYLLFNLDISDEKGGLFELWHITYSLPTEKEVVNALKNRFGFSENQSKIIAKKVGYPSDYGSLSTRAIRKLLPHLEKGLGYSEACDEVGYDHSGYKTEIGLKPKLKQLKKNELRNPVVEQILNQVVNVINLVIEKYGKIDEIRVELARELRNSAKTRKNISQGNSKNKRNNDVIRKKLIEEYGFRLVNGRDVKRYILWEETTHECLYCNNPINGTDMLTGNADIEHILPKSRSFNNAMTNYIIAHRKCNSNKRQKTAYDFMESKGEEALGQYIEKVNALYNDGKGSISKSKFDNLLCKGEDIPSDFVERMKKDSQYISKEAVKMLKTICPNVYTTTGQVTDFLREEWELKNLLQELTFDKYKAIGQIEEKTIKTNNGQTKTFEVITDWSKRDDHRHHAVDALICALTDQKIIFKLNNLNKIYQYERDALSQKEIEEIEEFLEGKFSLKEFSTQQGNIIECSIPNIRKEVQKHLENILISFKKENSKVLTKNINAPKNIEQKTTWVPRARLHEDTIMGRVKRISEKKIKLNDKILMEEIEMVVNPEIKEMLYQHLAKFDNNLKIAFDQKTLKREPISYKDNEVKEFGVYEWVNTKRVNIESFLTDNQKTKSAKDKFIENVLKSDRGIGILLEKRLKEFNGDYKEAFKNLFENPFITKNGMTVKNVTIYDESKVERVRNGYAKTGGNHHALIYKDENGKYNDKVVSFWVAVEIGLLNISEHNNPYPIINRNDHDELGIFQFSMQINDLFVFDLKHSENPQEENEIDFFDVKNGKLISDKLFRVQKMTKKSSGAFEITYRHHLEANLNRSDKALKGYTWDEHGSNKHLERLTKIRISHLGEIIKIGE

SEQ ID NO: 7133 - protein, 1199 aa, synthetic construct
  REGION 1..1199: note = Synthetic
MIKKILGLDIGVSSVGLSVVIDNEGQKEIKELAVRIVPEDPNFHGKFYSGNTASKNLSRTTDRGIRRNNQRFKQRRDVLYNTLKEQQMYPTDILFNLPALELYGLRAKAVTDKISLQQLGRVLILLNQRRGFLSNRKSNSEEENSTDYKKRIAELQTELNGKTIGQQLYNELQRTKNILEILIRERTYLRVSYIEEFDRIWEYQKQFHPDTLTGGINEDENKGTLYNIIRNKIIFYQRPLKSQKGLISNCLFEKHHKAITKSSPYFEIFKIWQKINDLETTFEDGSKLKPNLEQKEKLFHDLFYGESLNNKFKLTVTETKKILGLKRTEGYLNFTELDGSRTYSIIKDALIKAKIEKPEQFLFFNLDKHDEKGGLLELWHITYSLPSESEVINALHKRIGFTIEQATIIAKAVGYNVDYGSLSTRAIRQLIPHLQKGLGYSEACDAVGYDHSGYKTKIEVKEKLKPILQNSLRNPVVEQILNQVVNIVNLAIDKHGKFDEIRVELARELRNSAKTRKNIANLNSKNKKENDKVREILKNEYAFKIVNARDTQRYKLWNETDKQCLYCNNPISKTDFINGNGEIDHILPKSRSFSNNMNNFILAHRKCNSGNEGKNQMTAYDFMKSKGDETFDQYTQKVNNFYKDGKGSISKAKFKNLMCKGEDIPSDFVERMKKDSQYIAKEAVKMLKTVCENTYTTTGQITDFLREKWELKNVLQELSFDKYKAIGQIETREYKDRIGDIKSYETIKDWSKRDDHRHHAVDALICALTDQKIIFKLNNLNKIYQLEREALGQDEIKKIEKFISDEIKPNKKFDLKSFADLSDNWFDQPITDFKNKAKKHLENIFISIKKSSKVLSKNINQPKHAEPQITWTPRGRLHEETVMGKVKKIADKKTKINEKFTEIENIAHPHIKSIIKEHLLQFENNASIAFASKTLKKNPIKYNNEEIKEVILYEETCTKRVAITENITTAQIEKIADEKIKAIIKVRINEKGGKIKEAFVNLKENPLWLNKEKGIQIKSVTVYDESKVEKIRNGYVKTGSNHHALIYRDENGKYNDKVISLWEAVEIGKLNIEQTKKPYPIISKKDNSELGKFQFSMQINDLFVFDLKHSENLTEDKINFFDSSNRNNLSKKLFRIQKLSKNSVGQFQIDFRHHLETTVNRNENELRGITWERFQSNDHLKRLTKIRINHLGEIIKIGE

SEQ ID NO: 7134 - protein, 1194 aa, synthetic construct
  REGION 1..1194: note = Synthetic
MIMKKIIVGLDIGVSSVGVAILEEDNNKKIIKELAVRIIPEDPNFHGKFYSGNTASKNLPRTTSRGIRRGYQRTKLRKNKLYIFLKELDMYPDENLMKLDVLNLYKLRNDSLKRKLSLHELGRVLIHLNQRRGFLSNRKSKTTEENSSDYKQAIAQLEKRLESKTIGEQLYTELLESDNIQDKVLRKRTYLRSSYIEEFNRIWNFQSVFYPEVLTGNSESKSKKNIYYKLKNEILFYQRPLKSQKGLVSNCAFEKGHKAISKSSPYFELFRIWQKVNDLEAIFENGEKYKPTLEQKQILVNNLFKGIKLNSKFKLSAAEIKKILSLSGQNVYLNFPELDGSRTHSMIKKAMENAGLDEEKCEKYLHFHPYKNDDKGSLFELWHITYSLPTDEEIINTLQKRFALTEEQAITVANEVSYNSDYGSLSTKAIKKILPFMEKGLGYSDACDKIGYDHSGYKTKIELMDRLQPILKNSLRNPVVEQVLNQVVNVINLILHKYGKIDEIRVELARELRNSAKQRKRISLSNSKNRKENDKIRELLVNEYQYKIVNGRDIQRYRLWLETERQCLYCNKEITMSDFISGQADLEHILPKSRSFTNNMSNFILAHKKCNSTKNQLTAYDFMNGKNQDIFEQYLEKVNELYSDGKGKINKAKFDNLICKGEDIPSDFVERMKKDTQYISKETVKLLKNICENISTTTGQVTDFLREKWMLKEIMQEVNYEKYKLLGLVDIQTIKDGVNQTKEIQIIKDWSKRDDHRHHAVDALICALTDQKIIFKLNNLNKFFQYERSGMTKEELESNAKFLNVDSFDLKAFADQIDDWSKTPIDNLREEVRKHLESIFISIKKSSKVLSKNINKPKNSSKEQITWTPRGRLHEETVMGRIRRIAEKKEKLNQKFNNVENIVDLSIKELIAKRVIKYGNLENAFSSKNRKDDPLIYQDNELKEVSVYENICVKRVSLNENFTNAQLEKIVDQKIKEKIIRPRIEERGVKKAFSNLDEDPIWLNKEKGIQIKSVKVYEESKVEKVRNGFVKTGGNHHALIYLDDNGKFNEKVISFWDAVEIGKFNISQTGRPYPIINRSDDAYLGSFKFSMQINDLFVLDFKHSTNPLEENELDFFDPKNRSVISKKLFRLQKMSKKSSGQFQVDFRHHLESTIDRNSLALRNITWEIITSNTNLMRLQKIKITHLGEIIKVGE

SEQ ID NO: 7135 - protein, 1192 aa, synthetic construct
  REGION 1..1192: note = Synthetic
MKKLIVGLDVGVSSVGVAVIEEEDNKKEIKELAVRIVPEDPNFQGKFYSGNTASKNLPRTTSRGIRRGYQRTKFRKSKLYTFLKELDMYPNEELIKLDELNLYKLRNDSLERKLSLQEFGRVLMLLNQRRGFLSNRKSKTAEENSSEYKQTIAQLESNLENKTIGQKLYAEIVESEKILCKVLRKRTYLRSSYLDEFDRIWNFQSVFYPKVLTGNSESVNKGTVYQRLKNEILFYQRPLKSQKGLVSDCSFEKGHKAISKSSPYFELFRIWQKVNDLEVTFENGDKYKPTLEQKKNLVNNLFKGIKLNSKFKLSATEIKRILLFNGQNVYLNFSELDGSRTYSIIKKALNNAGLNQEECEKYLHFNPYENDEKGGLFELWHITYSLPSDNEIINTLHKRFNSTIEQAAIIANEVSYNADYGSLSTRAIKKILPFMEQGFSYSEACDKVGYDHSGYKTKVELTNKLQPILKNTLRNPVVEQVLNQVVNIVNQIIDKYGKIDEIRVELARELRNSAKQRKKISLANFKNKKENDKIRELLIDEYQYKIVNGRDIQRYKLWMETDRKCLYCNKEITMSDFISGQADLEHILPKSRSFTNNMNNFILAHKKCNSTKNQLTAYDFMSGRNKEIFEQYLEKVNDLYSDGKGRINKAKFDNLICKGEDIPSDFVERMKKDSQYISKETVKLLKNICENVNTTTGQVTDFLREKWKLKEVMQEVNYEKYKLLDLVDTKIIKDGIDQTKEIKIIKDWSKRDDHRHHAVDALICALTDQKIIFRLNNLNKLFQYERSGMTKQELESNAKFLDVESFDLKAFADQIDDWSKTPIENLREETRKHLDSIFISIKKSSKVLSKNINRPKDSLKEQITWTPRGRLHEETVMGRVKRIADKKEKLNQKFNKLENIVDSTIKKLIVERINKYGNSENAFSSKNIKNDPLIHQNNELKEVSVYEDVCVKKVSLNENFTSAQLEKIVDYKIREKIIRPRIEERGIKKAFSNLDEDPIWLNIEKGIQIKSVKVYEESKVEKVREGFVKTGGNHHALIYLDDKSKFNEKVISFWDAVEVGKFNISQTGNPYPIINRNDDPELGSFKFSVQINDLFVLDLKHSQNPIEENELDFFDIKNRPVISKKLFRLQKMSKKSNGTFEIHFRHHLETTIDRNDKNLRGITWEIFQSNSYLIRLEKIKINHLGEIIKVGE

SEQ ID NO: 7136 - protein, 1191 aa, synthetic construct
  REGION 1..1191: note = Synthetic
MTKKKILGLDIGVSSVGLALVVENEDGKKSIEKMAVRIVPEDPDFHGKFYSGNTASKNLARTTKRGIRRSNQRFKIRRDRLYRTLKKENMFPKESLFQLDALSLYELRARAVSEKVSLEELGRILILLNQRRGFLSNRKANSSEENLTEYKQKIEALENDLGEKTIGQALYEELASSINIQNVLLRERTYLRNSYLEEFDRIWDKQNEYYPNVLTGNSQIDEIKGTLYDEIRNNTIFYQRPLKSQKALVSDCEFEKHHKGVAKSSPFFEMFRAYQRVNDLSWKNDKGEQFYPTKEQKDELINNLINGINLTKQGNLPLKTIKSILGCKSNDKVYFNFEELEGSRTANRIRKALIGAGVQKIDNYLKFDPTISDEKGGLFELWHITYSLSTVEEIVRTLTRRFPFTEEQALFIADNVHYKSDYGKLSTRAIRKLLPHMQNGLNYSSACDEVGYDHSGYKTKIELKEKLDAISPNSLRNPVVEQVLNQVVNAVNLIIEKYGRIDEVRVELARELRNSAKARSRISRLNSSNKKDNDKVRQRLYEEYGLKIVNGRDVKRYNLWKETNCSCLYCDNPITKTDFLSGNAEIEHILPKSRSFSNAMNNFILAHKKCNASKNQMTAYDFMESKGEQALKSYTEKVNKLFNDGKGQISKAKFEKLMCSGEAIPTDFVERMKKDSQYIAKETVKLLRTVCENTYTTTGQITDLLRSEWGLKNVLEELGKPLYRELGMIETKEIKDSKGNVKTIEKIKDWTKRDDHRHHAVDALICALTDQKIIFKLNNLNKIFQYSRETLSMDEIAEMERINENKYDLKEFFAQGAYEFKEPIENLRPKVKKHLDEIFISFKKSNSKVLTKNVNKIKNAEPQVTWVPRASLHEDTIMGKRRRISKKKVILNKKFYNLEDIIDPDIKVFLKQHLKKYSDDTTKAFDSKNLKKSPLVFKGKPLSEVQIFENTNSKRVAISDNVTKAQLDKVIDEEVKKILNKRVDEYGGIKAAFKNIEENPIYFNQKKGIVIKHFSVYDESKTINVRDGVAKTGGNHHALIYKDENGKYSDKVISFSEAVQIGLLNVSETGKPYPIILKEDDTDLGKFQFSMQINDLFVFDLKHSNNPQEENELDFFDEKNRDVISKRLFRVQKMSKKSSGEFDIHFRHHLESTITRNIKEITWINIRSNKLLNRLQKLKISHLGEIVKVGE

SEQ ID NO: 7137 - protein, 1189 aa, synthetic construct
  REGION 1..1189: note = Synthetic
MAKIIVGLDVGVSSVGVAIIQEEKNKKVIKELAVRIVPEDPNFQGKFYSGNTASKNLPRTTSRGIRRGYQRTKLRKSKLYSFLKDLNMFPDEELIKLDELSLYKLRNDSLERKLSLQEIGRILIHLNQRRGFLSNRKSKTAEENSSEYKQTIAQLENNLKNKTIGQQLYSELLEADNLQNITLRKRTYLRSSYIEEFDRIWNFQKTFYPEVLTGDSESKNKNSIYQKLKGEILFYQRPLKSQKGLVSDCAFEKHHKAISKSSPFFELFRIWQKVNDLEVTFENGDKYKPTLEQKKILVNNLFKGIKLNSKFKLSATEIKKILSFQGQNVYLNFPELDGSRTYSVIKKALISIGLNNEECEKYLQFDPYKNDEKGGLFELWHITYSLPSDDEIINTLQKRFNLTEEQGKLISNEVSYNADYGSLSTRAIKKLLPFMQQGFGYNEACKKIGYGQTKIEIIDKLQPILKNSLRNPVVEQVLNQVVNIVNQVIDNYGKIDEIRVELARELRNSAKQRKRISVSNFRNKKENDKIREVLSSDYQYKIVNGRDIQRYRLWQEADGQCLYCNREITMSDFISSQADLEHILPKSRSFTNNMNNFILAHKKCNSTKNQLTAYDFMSGKNEEVFEQYLEKVNELYNDGKGKISKAKFDNLICKGDDIPSDFVERMKKDSQYISKETVKLLKNVCENVFTTTGQVTDFLRDKWKLREVMQEVNYEKYKLLDLVDTKIIKDGINKTKEITIIKDWSKRDDHRHHAVDALICALTDQKIIFRLNNLNKLYQYEKSGMSKEELESNARFLNVENFDLKAFADQIDDWSKTPIENLRDETRKHLDQIFISIKKSSKVLSKNINNPKNSSKEQITWTPRGRLHEETVMGRIKRISEKKEKLNQKFNNLENIVDPSVKELISKRIDKYGSSIDAFSSKNINNDPLLLHNKELKEVSVYENVCVKRVSLNENFTLAQAEKIVDEKIREKIIKPKIEEKGGIKKAFSNLDEDPIWLNKEKGIQIKSVKVYEESKVEKVRDGYVKTGGNHHALIYLDDKGKYNERVVSFWDAVEIGKLNISHTGKPYPIINRNDDAVLGTFKFSMQINDLFVLDLKHSSNPAEENELDFYDSKNRSTLSKKLFRLQKMSKKSNGTFEIHFRHHLETTIDRNDKILRGITWEVFQSNSYLHRLEKIKINHLGQIIKIGE

SEQ ID NO: 7138 - protein, 1188 aa, synthetic construct
  REGION 1..1188: note = Synthetic
MKYILGLDIGVSSVGIAVISEENQKKTIENLAVRIVPEDPDFHGKFYSGNTASKNLERTAKRGNRKNNQRFKARRDKLYQSLKENNMFPTSNLFDLSAVELYGLRAKAVSEQVSLQELGRILILLNQRRGFLSNRKSVSEENSTEYKERIAGLEKALGNKTIGQKLYSELQENNNVFEVLLRERTYQRSSYTEEFDRIWDEQKKYYLILTGSSNEDDNKGTLYDLIRNRIIYYQRPLKSQKGLISECLFEKHHKAVAKSSPYFELFRIWQKINDLSWKTPNGELFKPTDEQKQKLKNALWNGDNLNPKHKLTVSKIKEILGYTSREKIYLNFTELDGSRTYSILRNALIEAGIEKPEQYLFFNMETNDEKGGLFELWHITYSLPIEKEVINALKNRFGFDKKQAEIIARRVGYSSDYGSLSTRAIRKLLVHLEKGLGYTDACDNIGYDHSGYKTKIDLQPKLKQLKRNELRNPVVEQILNQVVNAVNLIIEKYGKIDEIRVELARELRNNAKTRKNISLLNSKNKKNNDIIRKKLQEEYGFKFVNGRDVTRYILWEENSKECLYCNKTINGSDMLTGNADIEHILPKSRSFNNAMNNYIITHRKCNSDKGQKTAYDFMSSKGEVILQQYIEKVNDLYKDGKGSISKTKFENLLCKGEDIPSDFVERMKKDSQYIAKEAVKMLKTVCPNVYTTTGQVTDFLREEWKLKNLLQELTFEKYKAIGQVKEKIIKTNNGQTKTFKVIADWSKRDDHRHHAIDALICALTDQKIIFKLNNLNKIYQYERNALSQKEIEEIEEFLEGKFSIKEFSAQQGNIIECSIPNIRKDAQKHLENILISFKKENSKVLTMNRNQPKNCKEQITWVPRARLHEDTIMGRVKRIPEKKMKLNDKVSFEQIKMIVNPEIKEILLYRLAKFGDNPKVAFATKALKKEPIFYRENELKEVSIYEWVNTKRVALNENITDSQIEKIIDQASKRAVKERLNGGKIKEVFKNLTENPIQLKNGMILKNVTVTDESKVEKIRNGFAITGKNHHALVYKDENGKYNDKVVSFWEAVAIGLRNVTEYGNPYPIINRNHNDELGEFYFSMQINDLFVFDLKHSENPQEENEINFFDVENRKQISDKLFRVQKMSKKSNGQFVSDFRHHLETSVIRNDMILKNITWISISKNSDLERLTKIRVNHLGEIIKVGE

SEQ ID NO: 7139 - protein, 1162 aa, synthetic construct
  SITE 1105: note = misc_feature - Xaa can be any naturally occurring amino acid
  SITE 893: note = misc_feature - Xaa can be any naturally occurring amino acid
  SITE 119: note = misc_feature - Xaa can be any naturally occurring amino acid
  REGION 494..495: note = misc_feature - Xaa can be any naturally occurring amino acid
  SITE 361: note = misc_feature - Xaa can be any naturally occurring amino acid
  SITE 204: note = misc_feature - Xaa can be any naturally occurring amino acid
  SITE 317: note = misc_feature - Xaa can be any naturally occurring amino acid
  SITE 334: note = misc_feature - Xaa can be any naturally occurring amino acid
  SITE 723: note = misc_feature - Xaa can be any naturally occurring amino acid
  SITE 738: note = misc_feature - Xaa can be any naturally occurring amino acid
  SITE 184: note = misc_feature - Xaa can be any naturally occurring amino acid
  REGION 1..1162: note = Synthetic
  SITE 342: note = misc_feature - Xaa can be any naturally occurring amino acid
  SITE 64: note = misc_feature - Xaa can be any naturally occurring amino acid
  SITE 1003: note = misc_feature - Xaa can be any naturally occurring amino acid
  SITE 231: note = misc_feature - Xaa can be any naturally occurring amino acid
  SITE 612: note = misc_feature - Xaa can be any naturally occurring amino acid
MAVRIIPEDPNFHAKFYTGNKASKNADRTINRGIRRGIQRFKQRRDRLYDALKANNCFPENELXELNALTLYGLRHRAVTEQISLMEFGRVLIHLNQRRGFQSNRKSNSEEEDSTDYKXRIAELEADLGNLTIGQKLYQELAQSAHPLSIVLRERTYLRASYMEEFDRIWDFQKKYYPEILTGXPQQDDNKGTLYELLRNKIIXFQRPLKSQKGLVSKCTFEPLHRCANDXSPYFEAFRIWQRINDLAWKNSRGETLYPDISQKKLIYEKLFHDKDLNAKCQLTVTKIKEIIGYSKNEKIYLNFPELDGSKTYRLIXNALSKANITNYERFLFXNPQINDEXGGLLELWHILYSIPTEQDXIKTLQKRFGFSSDRATIVANEVHFNSDYGSMSTKAIKKLLPYMEGGMGYSEACDSIGYDHSGYKTKIELQNKLQAVKPNSLRNPIVEQVLNQVVNVVNLAMEKHGQFDEIRVELARELRNSAKTRKAIANQNXXNKKYNESVRERLSKEYNFKLINGRDVKRYSLWEETNQICLYCNAPLTKTDFLNGQAEIEHILPKSRSFSNNMNNFILAHRKCNSTKGQLTAFDFMARDTAKLNDYIELVNSLYNDGXGKLSKAKFENLMCRGDQIPSDFVERMLKDTQYISKESVKLLKSVCEKTYTTTGQITDFLREKWNLKEVLKEVNLPKYEALGQVETKEIKDNNGSTKTITRIINWSKRDDRXHHAIDALICALTNQXIIFKLNNLNKIYQLEKDLLSKEDIENFERVLSEDFTEPVSFDLKAFAEATEHYFEEPMENMREVVKKQLDSIFISIKKNSKVLTKKINHGKFSNPQITWVPRGYLHEETIMGRVRKISENKIKITPQFNRVQDIVNLPIRTVILNHISQHGGDPXIAFSAKILKSNPILYKGNEVKEVRVFEESCTKRVKLNESLTAAQIEKIADSKIKELVKARLNQFDGKIKLAFADLEHNPLWLNKTQGICVKSITVFDESKVEKLREGFVXTGGNHHALIYKSDDGKYNDKVVSFWEAVEIGLLNIQNTGKPYPIIHQSDDPVLGNFQFSMQINDLFVFDFKHSLNPQAENELNFYDPANRALISQKLFRVQXMSKKSSGVFDVHFRHHLETSVLRDIPEVSWINLTSNKSFQRLTKIRLDAIGRIIQVS

SEQ ID NO: 7140 - protein, 1193 aa, synthetic construct
  REGION 1..1193: note = Synthetic
MKKILGLDLGVSSVGMSVIYENGSDKKIAELAVRIIPEDPNFHGKFYSGNTASKNLERTKNRGIRRGNQRFKQRRDNLYRTLKENNIFPNESLFKLDALSLYELRYKAVTQKITLEEIGRVLIHLNQRRGFSSNRKSNNEEEKSSDYKKRITELQYELGEMTIGQKLYLELKESNNPISILIRERTYLRSSYIEEFDRIFECQKTFYPLILTGGINEDDNKGTLYDTLKNKILFFQRPLKSQKGLVSECNFEKHHKSINKSSPFFETFRIWQRINDLSWKTTKGETRYPTLEQKKLLFNKLFKGEDLNVKGELTVTKIKEVLGYSKNDKIYLNFTELDGSKTYRLIKNALVKANLNKIENYLFFNYHINDEKGGLFELWHILYSLPTEVEIINTLKKRFKITLEQATIIAKEVGFNADFGSLSTRAIKKLLPYLENGLGYNQACDKVGYDHSGYKTKIELKGKLENIKQNSLRNPVVEQVLNQVVNIVNLAIEKHGMFDEIRVELARELRNSAKTRKKITKSNADNKRANDNTRERLKTEYDFKIVNGRDIQRYNLWNETNQICLYCNSPISKTDFLTGQADIEHILPKSRSFSNNMNNFILAHKKCNSTKGQMTAYDFMSKSSEKLNEYIEKVNTIYNDGKGKISRAKFENLMCSGEDIPSDFVERMKKDSQYISKEAVKMLKTVCENTYTTTGQITDFLREKWGLKEVLKEINFEKYESIGQVEVKEIKDSIGKTKSIKIIKNWTKRDDHRHHAIDALICALTNQKIIFKLNNLNKIYQLEKETLTKEERLQIEKILSENAPEDVKFDLKTFAEHSDNYFDPPFHNFKEETKKHLDNIFISIKKTTKVLSPTFNKAKKIDIQKTWTPRGRLHEETIMGQVKRITDKKTKLNEKFYFLDNIVDKGVKGVIENYLKQYNGKPEIAFSSKNLKQNPLIYKGKEIKDVSIYETTCTKRVKISENITEAQIEKITDNKIKKLLKKRISDHSGKLKQAFANINDNPIWLNKEKGIQIKTITVFDESKVEKVRDGFVKTGGNHHAIIYKTEDGKYNDKVVSFWEAVEIGLLNIQSKGNPYPIIDKSDDSFLGKFQFSMQINDLFVFDLKHSLNPQNDNEINLLDSNNRSLISKKLFRIQKMSKKSSGEFDVHFRHHLETTILRDIPELTWINLRSNKLLHRLTKIRINSLGEIIKIGE

SEQ ID NO: 7141 - protein, 776 aa, synthetic construct
  REGION 1..776: note = Synthetic
VNYKSDYAKLSSRAIKKLLPLMEKGLQYSEACTKVGYDHSGYMTTEAIADRLTQIKPNSLKNPVVEQVLNQVVNMVNLAAEDYGKFDEIRVELARELRNSAKARNRITSSINRNKKENQKIRERLKDEYGFKIVNGRDIKRYKLWQEADKQCLYCSNPITKTDFLNGNAEIEHILPKSRSFNNAMSNYILSHKKCNSDKGQRTAYDFMKNKSKDYFQTYVDKVNELFNSNKKKISQAKFDNLMCSGDDIPSDFVERMKKDSQYIAKETVKMLKKVCPKTYTTTGQVTDLLRAEWGLKHVLEELGLPKYRALGQVETKTIKVTDGNSKQIEKIKDWSKRDDHRHHAVDALICALTDQKIIFKLNNLNKIFQYERDALTTEEIKELERINETKFDLKHFVEQAAYEFKEPIDNLRSKTKNHLEGILTSFKKPNSKVLTKNVNDIKNGPNQATWVPRNRLHEDTIMGERKRPSNKKVKLNKKFDSVEDVINDIQKTAIEQHLKKYDNKPLVAFDSKTLKKDPILLAGEELVSVSVFDTTNSKRVPLSESFTKAQIEKIMDEKIKELVKNRIMKYGSIKAAFKDLEAEPLWFNQERGIRIKSVSVYDESKAIDVRNGKAKSGGNHHALIYKDEKGKYQDRVISFNDAVQIGLFNIEQNGKPYPIILRHNDPELGEFQFSMQNNDLFVFDLKHSNNPTEENEIDFYDVKNRKLISEKLYRVQKMSKKSSGEFDVHFRHHYESTIDRSIKEETWINIRSNKLLNRITKIRINHLGEIIKIGE

SEQ ID NO: 7142 - protein, 1061 aa, synthetic construct
  REGION 1..1061: note = Synthetic
MKTRLALDIGDTSIGWALYELSDCAKPSSLTKLLAAGVRLFSDGRNEKDKTPLAVKRREARGMRRGRDRYLQRRKYLLHLLSAHGLFPNDSESQKALETIDPYTIRAQAVSEKVPIYHLGRALFHLNQRRGFKSNRISDATDDKETGKIALASKRLKESLAEGGFATLGQFYADRQSAQNPRDRQPVRIRMTGEGSKSLYDFYPTRDLIEAEFDALWMAQQSHYPKTLTQEAYDKIKSALLFQRKLKKPLKGKCPFNTHEERLYQAHPLTQAFRIYQELNNIRIEFELGAPEQRLDLETRDMLAEQLLAGVDISMSKLRKALNLPAEAKINLAEGQKDKLKGCETAKKLAKDTPKRKSPWGASWFALSAEKQEEIVEQLLYVDDKEDLKGWLRKHTDLGAESIDEVISINLIPGTSRLGLTAMRAIVNELNADVVPYSTAAERAGYHHSQFSTEQHDELPYYGEILTSSVIPDPAASEGDHIERVKGKIANPTVHIGLNQIRTVVNELIKQYGKPDQIVIELARDLKQSKKERDKAQKENKKNEEQNARLNKELTELGERQNGENRLRLRLWEELGDSPLNRCCPYTGETISKEQLFSAEVEIEHILPFSRTLDDSRANKTVSLRRANRLKRNYSPAEAAEHIPNMFNLDEMLARAQFMPANKSWRFKPDAMDRFKDDPKNDFLARQLNDTRHLSRAAKTYLTSICDANQVWVVTGRMTSLLRHCWGLNSILSDHNRKNRDDHRHHAIDACTIAAIDRGMLQKISRAAAHNERTTLDKVTSGMDVPYDGFRENVQDIVTKIIVSHKPDHGLAGPLHEETAYGPVRDNDRNRARGDLDIGNVVVRKPVAGLSPKEINQIRDIPTREALQQIAYEAGSDKKELAKLLAEWSAKTGVRRVRMLKPVGDAVPIHDRKTGEPYKYVKPGDNHHMDIIELENGKWIGCAASVFEVNQKGWQPKWLTEHPTAKHIMRLHKGDAVQLDDDGVNIIKVVKRLSPSNNILYLVHHNEGGAHQKRHDDVDDPFRWDLASISKLKDRRARRVIVSPTGKIAAAPKLRSYGVKP

SEQ ID NO: 7143 - protein, 1063 aa, synthetic construct
  REGION 1..1063: note = Synthetic
MIATTDGQSRFAMGLDIGVASIGWAVVNLDSDGQPTSVRKAGVHLFEAGIDPGKSDPETAMLLGREQSKATPRRTARATRRQIWRRARRKRKVLRSLMDAGLLAPAQVQTPEQVDRYMKALDRELAERWAGDGHRDAQNLPYRLRAAAAVRPLQRDEVGRALYHLAQRRGFLSNRRSPERSDEDKSAMKLSIGELASAVASHRPPTLGAYLASLDPDEQRLRCRWTSRQMYVEELDCIWKAQAKPLGLSDDHRAAIENAIFFQRPLKDQSHLVGQCSLIAGQKRCPIAERVAQRFRVFQQVNHLRVVLDDLTERPLNSPERDALVVKLLTEGDVSIAKARREAGLPPGSTLSIERGGEKKLVGHRTDAKLRAVFGAGRWDPLSDTDKNAIVNALRSFRDRDALRRYGVRRWGLDGEAADAFADTTLEEGHAAHCRDALEKLVARMDRDGLSYSEARKDEFPDSFAQAEPKDVLPPLDEWESDLRNPSVARALTELRKVVNTIVRRWGKPERVHLELARDLKSGRSRREQQSRRMRERERERERAAAAIASKLGIDAPKRWMIEKWLLAEECGWVCPYTGRHFGAADLLGRESQFDVEHIWPLSQSLDNSYMNKTICYHDENRNRKKGRSPVSAYTADELAPMLERVRAFKCDPLTKRKKLQRFAEPVEEDFPKRHLQETRYIGRMACDYVGLLYGGRAEDVGEAVGRQRIFTPSGGLTAWLRRGWNLDALLGADDGKNREDHRHHTIDAIVIACADQAAITRLSDAAKRMERVQKERPFDSVDHPWDGFLANIAAAIEPIIVSRRVSKKVRGGLHKDTIYSKPHRSGGAHLHHRKRTELAALTTADLAKGRIIDKRAEAAIRAKLDELGEPNPAKAFKDPANLPTVRGQGGKPVTLRRVRVAESVRPTTIGRGPSVRRVKSESNYHTVVYQLSDEGGEGQWAHAVVPLLDAVAIARPGAAGRDDNAAVVIWPTLPQGARVLFTLTNGECLEMEDPKQPGVRDVFRVLSISDGEIKVIRTHDGRASAISGKDRIRIKGRGDNLRKLGARKVRVTLLGEVVNAGG

SEQ ID NO: 7144 - protein, 1063 aa, synthetic construct
  REGION 1..1063: note = Synthetic
LKTSANCNSLTYDEIILGLDLGTNSVGWALVGLNKFKPSCIVDMGSRIFESVVNKSDYEKGQGETKAAERRGKRMARRLTTRRRRRKIRVFRRLQENKLLPEGESTTVLQSLDQELRAKYFAGEKKIPALEHTLPYYLRALALDQQLPLHEIGRAIYHLAQRRGFKSNRKTAKSDKDDGTIKSSIAELRQKITDQGARTLGEFFSKMDPTIERIRQKYTHRDMYETEFDAIISSQKQYYPHIFNETFTKQIKGDIFFQRPLKSAKGSVAFCSLEPKSRRAPIASLEAQKFRILHMVNSTAIISPHSGQSISLKPEQRAVIIAELEKGSLTFANAKKLLGMPRTAKFNWETGGEKKFKGHTVNETMSSIFGDGWFHISKDKQNEAIADLLSYQDDQALFKRAKNYWKLNDESAGKMSVSVLEEGYSAHSRKALQKLLPLMEEGQDYSTARKTVYPESFIAGTGLDILPQARTILTSLRNPVVERTLNEVRKIVNGIIKKYGKPYAITIELSRDLKTNRKQKQESIKRMRELEKQRKAAEQIIKESGISKPSRNDIEKYLLAEECGWSCPYTGMPISMKTLLIEPSFDVEHIIPFSRCMDNSFNNKTLCHHHENRNIKKNKTPFEAYHGTQKWEDILQRIAKFKYRGRYNQKLDRFKMANIENLDDFCSRQLNDTRYSSKLACKYLSVLYGGKSDSEHTMRIFTGNGRITSFLRGIWNLNTVLQGNGEDKRNDHRHHAIDALATALLTPKTIKALSESAARTEGNPSVQWRRLFSAMEEPWSGFLDEARTKINVIITSHRANHKVNGPLHEETIYSRPIKSNTGPALITIRKELSALSKDDINRIIDLRTKEIVINKLAEMNEDNPGKAFKEVCNHPVFATTPQGKTIPIHKVRISVNKNPQQLSSGSKERYILTGSNHHMEVFAVMDSNKNILKWDARAVSMLEARRRLVNKESVVQRNHGPNTKFLFTLTNSDIIELDSENSAHGKEFYKIRGITERADGAKVFDFCRINDARLKKAMQESDTEIGAKGGNRSIQFATPHSLSKRHCRKVTITPLGEVRRSNE

SEQ ID NO: 7145 - protein, 1044 aa, synthetic construct
  REGION 1..1044: note = Synthetic
MKYTLGLDLGYNSIGWAILENDENGSPIKLFNAGVHIFEPSIEDIEIDGKGKTKNVKRREARLRRRQLFRKTKRLEKLLNFFIQEGFFQNQKVLINDPFERAEFLYQLDKKSRNPYILRREALDNRLSLEEIARIFYHIAQHRGFKSTKRELAEMNKDEKKKKEDGIIQSEINTLKEEIKKNSCRTLGEYFAKLFENGEKIRGRHTDRKMYEEEFQKIFNKQKEFYPNIFTDEFKKKLYKLIFHQRELKSQKDKVGFCSLERGKKRAPLALLVSQRYRYMCKVNNLNVIDTETGENRELTVDEKKKLYEKLENSEKLSFKEIKKILNLSEKRYIFNLEKSEKYIIGNKTNVKMKNIIKDWDNFDEDKKNFFINEARTVVKIETLERRGKKLGLSDEESKEFSKVVFEDGYLNFSKKAVEKLLPYLKEGKKEYEAIKLAYPENSVQNDNLKELDFLPPIKSKELKKYFEVRNPIVEKALTETRYLVNFLIKKYGKPETIKIELARELKLSNKQKERKHKENQENRKKREEVIEKLKNDLKISEPTETQIQKYLLAEECDCKCPYTGRSISMDSLFGEHPLFDIEHIIPFDRSLDNSFLNKTLCYSEENRKVKHNKTPYEAYYGTEKWEAIIERVKKFKSNVRNEKLRRFQMTKEDVENYIQNFSTQNLNDTKYASKLAKKYLGLLYGSINEDGIDKNRKRRIFASSGKVTSTLRYALGLNTILNDENIKTREDHRHHAIDAITIALTDSSMIKKISDASKREKNINSLFKDFQAPWENFRKEVEEIIAKMNISIRINKKVSGQIHDETFYKKPFKEEEKSYTHQRINLEELTIKDEDKKKQSSKLIDNIVDSKIRNIIINSLNGEKPKIRFKDPKDHPYIIQKNGKKIQIHKVTIKTKLETYNEIGPEKAKRYVKSSDSHHIEIFEDLKTKKWDGYVVSLLEAYERKKKKLPIVNKNLGEGKKFLFSLAKGEIIELDTENGKRELFVVRIISASNNQIKFTRINDSRKITDIPATGLTACPSSLKKRNCKKVVINILGEKHYSND

SEQ ID NO: 7146 - protein, 1043 aa, synthetic construct
  REGION 1..1043: note = Synthetic
MKYTLGIDLGYNSIGWAVMENDETGLPQKLLNTGVHIFEPSIEEIEKDGKGKTKNVKRREARLRRRQLFRKTKRLERLLNFFIQKGFFQNQKDLINDPFERADFLYQLDKKLKNPYILRKESLDKEMSLEELFRIFYHIAQHRGFKSTKRELAKINKDEKKKKEDGTVQSEINSLKDEIEKNKCRTLGEYFAILFENGDKIRGRHTDRKMYEEEFEKIFNKQKEFYPNILNDDFKKKVYKLIFHQREIKSQKDKVGFCPLEKGKKRAPLALLNSQRFRYMCKVNNLSVIDNETGEIRELTVEEKKKLYEKLENSEKLTFEEIKKILNLSNDRYHFNSEKDKHILGNTTNVKMKKIIKNWDNFDEDKKNLFINEARTIVKIEALERRAKKLGLTDEESKEFSKVVFEDGYLNFSTKAIEKLLPYLKEGKKEYESIKTAYPKNLEQNDNLKELDFLPPIKSKELKKYFEVRNPLVEKALTETRYLINFLIKKYGKPETIKIELARELKSSNKQKERKHKENQENRKKREEIIEKLKEELKISEPTKTQIQKYLLAEECDFKCPYTGRSISMDSLFGEHPLFDIEHIIPFDRSLDDSFLNKTLCYAEENRKFKHNKTPYEAYYGTEKWEAIIERVKKFKSSVKNEKLRRFNMTEKDLENYIQNFSTQNLNDTKYASKLAKKYLGLLYGSINEDGIDKNRKRRIFASSGKVTSTLRYALGLNTILNDENIKTRDDHRHHAIDAITIALTDSSMIKKISDASKREKNINSLFKDFQAPWENFRKEVEEKIEKINISRRINKKVSGQLHDETFYSKPFKIEEKNYTHKRIKIEDLISKDPDKKDSTSKALEKIVDSKIRDIIKNYLNGKKTKIISKDPKDHPYIIQKNGKKIQIHNVTIKTKFETYNEIGPDKAKRYVKSSDSHHIEIFEDLNTKEWNGYVVSLLEAYERKKKNIPIVNRDLGEGKKFLFSLAKGEVIELDTENGKRELFVVRIISGSNNQIRFTRINDSRKIRDIPAKGLTALPSSLKERNCKKVVINIFGEKHYSND

SEQ ID NO: 7147 - protein, 1076 aa, synthetic construct
  REGION 1..1076: note = Synthetic
MALRYAYDFGSSSIGWAIFQTEDGRPCRLIDLGSRLFDDGRDPQSGESNAKARREPRAMRRSYDRRLQRNKYVMDVLVQLGMMPVEQEARKTAIPLSPYEIRAKALLEALPLHHLGRAFWHINKHRGFKSNRKADVPDESGKIASAAERLNQKMQAMGCETYGSFLAARQADPDVRNRKPTRIRQNSHIKDELYEFYPTRDMLVWEFDLICKRQRGFNSGFPDEAQIAPLRDAIFWQRPLKPVDPGFCSFFQEEVRLMKAHPLAEEFIVYQKVNELRIDDDEGYPLPLNREMRDQVVQQLLSGRDVSWMQLRRIVGLGKDSGRISLEEGGEKKLEGSSMAYRFKGNKKPGPFAETWTDIRQDRQKIDALLAAYKSSNTDSELRDALAPLNLGDAEIELAMKCSLPDGHLMISMKAVDMILPHLKAEIITYAEACKRAGLHHSDKRDGEVFDFLPYYNEIDSMRRFLGHGTGDPDDPRDVRYGRIANPTVHIGLNQLRRLINTMITQYGRPDEIVLELSREIKKSKAQKDRAKRDNQQNRKANDIRKREMEEIGFYSRGDRLRTREALERIRLWEELGRNPNDRVCPYSGKPIQSLSRLLSDEVEIEHILPRSISLDDSPANKTIAYREWNRLKRNLTPSEAAQSFPEKFNQDDMIYRSRNMPLNKKWRFGPDSRERLGLEDKWQDRLLKETQHFGVVAGHYLKKLAPADVNRKEMSVWVTSGRLTSELRRKWGLHTGTNQKNRNDHRHHALDAAVIGVTDRSLVNILSRAAAQDEVQAFARVLADIPEPFDGFTDQVNTAVKRVIVSHRPSHRVAGKLHLDGAYGKVRENLTNIERGEPARGNLVVRRDILSLKPNMIEQVRDEKVRLALQQVLYEAKQAGGSDKKDFEKVLTEGLAEYSRQTGTRRVRCLYPKENAIPVGKSKQGERYKYAIPAENHHVDIVELTNGSWQAVWVDIFEANQTTLAERKGQVQPPRWQTRYPDARFIMRLHKGDTLQLFDDDKINRVKIIVSLRASFNSLQLAEHLEGGVLQKRHDDQDDPFRWDFANISKLKDRRARRVRIDEIGRIRTVNHGSV

SEQ ID NO: 7148 - protein, 1155 aa, synthetic construct
  REGION 1..1155: note = Synthetic
LSTEKVVLGLDVGVSSIGWGIVKLQEGPYQSETADGKPDTKPKIVGGEIIRTGVRTFQLPEDRQKKSLALIRGSARRTRRTIKRKVQRMNRLINLAKEFKLIGEDFDRDSILKPQKGTNKKEKWDIWLIRKEALERKLTDTELFRVLYHIAKHRGAYFHTKAEFLPEEDEKELNKNQKQKKEESKEGNEKEKVKKGLRRIQKMLKDSKYRTIGALFYEMFKQTNSKGSNKKRNAPDKYENSIRRELLCDEIVEIFERQRELKNPKAVEEFKHRYIDDILMREKEVDEDRLRNMMSRCEFTGDLCAPKESYTAERFTLFNRLNTLATRDGNNKNCLIPLDNSQRDKIIALAYKNAEVNFSQIRNELEWQDKPHLTFNLCSYAEKNPEYNKKLKCEIKNGQLQFDETHEVPIVDMTTGEIMALNKEIKEIFQKRLDSRFRGNDTPATGAGAKQVTLYYSDIRKELQSNPEFKISDFRFQKFGKEYTKSEEELGSQEYIKQFEKKDIFVKLAGYRKIKNALEKADGKWERIKEDADKLDIIAEALTFCKSNKTRTEYLQKNGITDQSIIDAVLTIDMSGLASFSKPALKNLLKHMEQGALPNEAKEKCGYVPKEHEKQAILKPYSGFFEKNPVVARVISQTRKVINAILRESKDKYTIDQIHIEIATELANSKERKIDISLGQKRYKEAKERATERCKEKGINPEEGQNLLMFRLAEEQINECPYTGKKIMFEPTTGKNAVYVLDCEIDHIIPMSRSFNDSLNNKVLCDQKANQDKQDRIPYEWFEDMYGKDSQEWRNFENRVKRMNGVRYPKKKNLLRKSWTDEDKEEFLSRNLNDTRYAARHIADYLRKYFDFSKSKIETKDVNRIQVRSGGITAFLRHMWGLNKDRDKDDLHHAVDAIVVACSTYGHVFLVSNLAKEIEREGKSWFKRFDFLREKFKPWQNIREDILNEVEKIFVSRMPRHKVTAPAHDETIESLVEKRRIKKAKKKKPDKKIDSLPMDTNRVIKVNKGYAGIGEMVRADVFTDGNGKNYVVPIYAVDMFSKEPLPDKYLHKNDAPYETWPSATADNLKFKFSLFKDDLISINGEMFYINFIQGTRSKINVRSIDGAVKEKETGYKKVELKKYMVDLLGNYKEIKKEKRLGNEGVKRVKKPKKND

SEQ ID NO: 7149 - protein, 1160 aa, synthetic construct
  REGION 1..1160: note = Synthetic
MNKEKVILGLDIGVGSVGWGLVKLAEEKYVVENQDGTADEKYKITGGEILDAGIRTFQLPQDRQGESLAIHRGAARRSRWTIRRKAKRLKQLTKLAREFNLIGDNFNRDEILKPRKGNNKKEKWDIWRIRKEALERKLTDDEFFRVLYHIAKHRGTYFHTKAEFLPEETKGEPKDKDREAEKSEKDKEKEKVKQGIRRIQKMLEERGYRTIGQMFWEIFKQTNADNKRKRNAKDKYANSIRRELLQKEIIEIFKSQRDFGNPKAKDELKQRYIDEILMFEEGIDDERLQKMMSPCEFTGKLCAPKESYTAERFTLFNRLNTLELVDTQNKNKHLSLDDTQRTQIVALAYKNSKVTFAQIREELVYADRLHLRFNLCSYNEKNPEYNKKLECEVKNGELQFEDKHKVPIVDINHGWKVLDVEIKNILRSKKLWPKATRIYIYYSDIRKQLNLSGDIRFGYYKKDGVIKELEGYTKSAAELGGKEKFLKQFEENDTFIELKGYHKIRKAIEGKGSNGKWEQIREDIEKVDAIAEALTYCKSDETRAEYLRQHNIVDNNIIEAVLTLNMKQLATYSKEALGGLLKYMDNKKEWMLFNDAKEKCGYGKTEYKKQTKLEPYSGPFEKNPAVARAISQTRKLVNAIVLKHNSRTPIDQIHIEVATELANSKKRKNDIAQGQKRYQEDKKRAEERCKEFNIDPEEGQNLLMFRLAEQQNNKCPYTGKAITFYPAAANNEVNIQDCEIDHVIPMSRSFNDSLNNKILCAPEANQNKRDRIPFEWFEDTYGKDSQQWSDFENTVKKMYGAPYPKRKNLLRKSWTDDDKEKFLDRNLNDTRYATRHIADYLRKYFDFSKSQRDDIKDVSRIQLRSGGITAFLRHMWGLNKNRKESDRHHALDALVVACSTYGHVYLVSNLSKEIERKGKNWYKHFGREKFKPWSNIREDIQKKVDNVFISRMPRHKVTSAAHDDEIWSFIEERRIKKAKKKNPQKKIDSMPMPTKRVIKTNGGYAQIGDMVRADIFADKNGKNYVVPIYATDIFAKKPLPDRYVPDDRLLPYEKWPNINDGDLGFKFSLFKDDLISINDKMFYISFFEATTANVNVKKIDGSIFPDKKDAQDPYTKKIAYRPKSRTKKCVLKKYYVDMLGNYTEVIQEKRPVKFIKKTAN

SEQ ID NO: 7150 - protein, 1126 aa, synthetic construct
  REGION 1..1126: note = Synthetic
LNCQEKFLIGEKMSNEKVVLGLDIGVASIGWGLVKLTEEKYIDEKPDGTIEEKHKISDGEIIGTGIREFQLPQDRQRKSLALIRGSARRTRRTIKRKSQRLKRLVKLAKEFNLIAEDFNSDQILKPTKNANKKEKWDIWLIRKQALERKLTDIELFRVLYHIAKHRGFYFHTKAEEVQKEDAGSETGKAKAGLARISKKLEDGKWETVGQMFWGEFKQTNPENKRKRNAKDKYENSIHRLLLKKEIETIFKKQQAFGNMQAKEELKQRYIDEVLMYEEGIDDERLQKMMSRCEFVTGAMCAPKESYTSERFSLFNRLNSLSLIDTKNKGQNLPLDGQRGKIEALAYKNAKVTFAQIRTELGLQDDLHLRFNLCSYSEKNPEYNKKLECEIKNGQPQFDEKHKVPVVDIHTGEVTILDKEIKDIFNSKKLWANSKKIHVYYLDIRKQLNLSGDFRFKDLSGYTKSAAEFGSEAKYVKQFENDTFVELKGYHKIKNAIEKCGDGQWEHISKDIAKLDTIAEALTYCKSDETRAAYLKEHGITDEKVIEAVLTINMKQIATFSKEAMSNLLKHMSDGTLFNEAKEKCGYGKIDHKKQARLDPYSGFFEKNPVVARVIAQTRKLVNAIVRKCNDKYPIDQIHIEVATELANSEKRKNEIAQGQRRYQEDKKRAEERCREFKIDPEEGQNLLMFRLAEQQNNFCPYTGKAITFYPTSADNEIYIQDCEIDHIIPMSRSFNDSLNNKVLCTQQANQNKMDRIPFEWFEDTHGKDSQQWADFARRVEKMYGMPYPKRKNLVRKSWTEEDKEKFISRNLNDTRYAARHIADYLRKYFDFSKSKRDDIKDVSRIQLRGGGVTAFLRHMWGLNKDREENDLHHALDALVVACSTYGHVYLVSNLSKEIERKGKNWYKHFGRDKFRPWNNIREDIQKVVEKVFISRMPRHKVTAEAHKDTITSLKEAAIAKRVIMINGGYAEMGDMVRADVFTDDKDKNYVVPIYSTDIFANKPLPDKYVPDDRLLPYEQWPSVLNNAMNFKFSLFKDDLISINDKMYYVSFFEATTANVNVKNIDGSIFPDKKDSNDPKTKKIGYRPKGKTRKCVLKKYSVDMLGNYKEVKEEKRLGNKFQNEKLV

SEQ ID NO: 7151 - protein, 1126 aa, synthetic construct
  REGION 1..1126: note = Synthetic
MSNEKVVLGLDVGVASVGWGLVKLTEEKYTDEKTDGTIEEKYKISDGEIIDTGIRAFQLPQDRQKKSLALQRGSARRSRRTTKRKVQRLKRLIRLAREFNLITDGFNRDSILKPKKGDKESKWDIWFIRKEALERKLTDIELFRVLYHIAKHRGFYFHTKAEEIQEEDTKSETGRAKAGLANIRKKLQDSKWETVGQMFWEVFKQTGANNKRKRNAKDKYENSIHRLLLKDEIETIFNKQQKLGNLKAKEELKQRYINDILMKEEEIDEEKLQKMMSRCEFTGQLCAPRESCTAERFTLFNQLNTLELADTQNKDGHLHLDDKQREKIEALAYKNAKVTFAQIRDELELADKLHLRFNRCSYSEKNPEYNKKLECNIKDGQLQFDEKHKVPIVDIETGEIKILVQEIKDIFQKKLKPNYTHVTLYYSDIRKELQNLADFKISDFRFQKLQKEYTKPAVELGSEGKYIKQFEDDTFVELKGYHKIKKAIEKTDGNSKWEQIKNDCDKLDTIAEALTYCKSDKTRTDYLRKNGISDEGIIEAVLTINMKQLATYSKEALSNLLKHMETGALHNDAKEKSGYGKIDHKKQTILEPYSGFFEKNPVVARVISQTRKLINAILRKYKDRYPVDQIHIEVATELANSEERKKDIAWGQKRYQEDKKRAEERCKEFRLDPEEGQNLLMFRLAEQQNNKCPYTGKAITFYQTSANNEVYIQDCEIDHIIPMSRSFNDSLNNKVLCTQKANQDKRDRIPFEWFEEIYGKDSEQWREFENTVKKMYGVPYPKRKNLLRKSWTDKDKEKFLSRDLNDTRYAARHIADYLRKYFDFSVSERDDIKSVSRVKVRSGGITAFLRYMWGLNKDREANDLHHALDALVVACSTDGHVYLVSNLAKEVERKGGNWYKHFGRDKFKPWVNVREDIQKKVENIFISRMPRHKVSAAAHKDTILSFKDAPTKNRVVKINDGYAEMDEMVRADIFTDDKGKNYVVPIYAVDIFSKKPLPDKYVPDDGKLPYDKWPSVFDKKLTFKFSLFKDDLISINDKMYYVSFFEAATANVNVKNIDGSIFPDKKDAQDPYTKKICYRPKSKTRKCILKKYSVDMLGNYKEVMEKERIGNEGVKRTKRYKKMAKE

SEQ ID NO: 7152 - protein, 1131 aa, synthetic construct
  REGION 1..1131: note = Synthetic
MSNEKVVLGLDIGIGSVGWGLVKLREEKYTDEKPDGTIEEKYKISDGKIIDTGIRAFQPPQDRQKKSLALQRGSARRNRRTTRRKVQRLKRLIGLAKEFNLITDGFNRDGILKPKKGDKEDKWDIWLIRKQALERKLTDTELLRVLYHIAKHRGFYFHAKSEFLPEEDEKKLNKDKKQEAEKNEKEKESGKVKQGLRRIKKMLKDGGYQTVGEMFYEKFKQTNPDSKRKRNAADKYANSIYRPLLRDEISKIFECQQKFRDSKAKDELKRRYIDEILMYEEKIDEDKLRKMMSRCEFTGGLCAPKESYTAERFILFSRLSTLELIDTQNKDKHSQLDKDQRDTIIALAYKNAGGVTFAQIRTELGLEDNLHIRFNLCSYREKNPEYNKKLECKIKNGQLEFDEKHKIPIVEVDTGEVKVLDDEIKKIFKGKKLWGNRQKMHIYYSDIRQQSNLSENFRFANLKGYTKSAAELGSDTEYIKQFEKDDTFVELKGYHKIKKAVEENGGTEKWEELSKDTTKLDTIAETLTYCKRDETRTEYLHQHNITDKEVIDAVLTINMKQLANFSKEALTSILRYMDSENRMRFNEAKKECGYGKIDHKKQVILDPYRGFFEKNPVVARVISQTRKLINAILRKYNDKYPIDQIHIEIATELANSEKRKNEIAQGQRRYKDDKKAAEERCKEFNLDPEQGQNLLMFRLAEQQNNKCAYTGKAITFYQTSADNEVYIKDSEIDHIIPMSRSFNDSLNNKVLCTQKANQDKRDRIPFEWFEDTYGKDSQQWAEFENTVKKMYGMPYPKRKNLIRKSWTEKDKEKFISRNLNDTRYAARHIADYLRKYFDFSISERDDIKDVSRVKVRTGGVTAFLRYMWGLNKDRKGSDLHHALDALVVACSTDGHVYLVSNLAKEIERKGKSWYRHFDFIRDKFKPWDNIREDIQKTVANVFISRMPRHKATAPAHKDTIFSFKKTPTKNRVIEINAGYAEMDEMVRADVFTDDKGKNYVVPIYAVDIFQNKPLPDKYLHKNDAPYDEWPSAAADNLKFKFSLFKDDLISIDGKMYYVDYVRATRTKISVKEPDGSFIDKTKEEKTKEIGYKNVELKKYSVDMLGNCKEVKQEKRQANRFEKNEKRISDQG

SEQ ID NO: 7153 - protein, 1101 aa, synthetic construct
  REGION 1..1101: note = Synthetic
MAYRLALDVGTASLGLVALALDDQKQPVDVAHFAVHIFSEPLLPAKSGGIGEPKKAARRLARQQRRLTERRARRLRRIAHLAPLIGLKASKVAPDDGQHIHALRADAINQRIELPDLLNVFLKLAKRRGYAGGFKVKKDSEEAGQVQGGIEDLQALLADNACTTLGELLSKRFGDTEHAGRGPRESLKLKALGLYAHREMLEEEFELIWSEQAKHHPILNVEATAYSVRGLSETLPIKQHFKEAIFYQRPLKSVAGMVGQCSLEPTLARAPAAQPAAQAFRIEKQLADLRWGMGRMQRVLSKEQRHHIRAMLLDPEQLNKDGALTFGKIYKSLEKSGLRQEFPGQFNTDRFSRETLLGDRTTKAMSGLGMLSHWIALDAITQLRVINFIANLGSPESVDSTNWHKRMEPPPKPEVVAFINQWLESRTFDRLSKMGFDTGRAAYSIKTMKQLTAKMQDGEGYDEHAARETVYKSQPPTGELLMHLPQPAPTGNVVVDVALRVVRHAVNQCLQAMGQPPAQVIVELSRDMALGLKARGEKEKGIDKHRRARLYAKSQIEGNQAGRTATNNDIFRYLLAQEQDFHCPYCSKRMELAEALDGNATNVDHILPRSLTQVKRERSHVVIAHRTCNAEKANSVPLEAFKGDADRISAIENCANILKRKRSYRKANYLMTESYEAEKLNDKSLEDFTARQFVESSWIAKLTGQWMKDICQDVSVSRGELTAQLRRAWKLETVIPQVRLETKVDPKSEKPDNHLPLLDDDKPPKPITREEFERFRACWENHHGPEVERTDRRMDKRIDHRHHLVDALVIGLTDRSLYMDMAKGYKERMEQRAAGLRGIKPWQTPEPPVRNIREVALRLVRDVKVKHKTDRYAAGAFFDKMAYAKSYTDDGKVRVVRSVDLLNLADKTFALDKTRTGIANIVSTETRHIVLSEFERRVSTGQDVKTALSSYFVDPRYGTMIQRVRVYQRDGRGFVNGEDAVKINLEGRPYGESAFGEKHYLSDGYAYVALISDDVGLINDAVSVRSADAPIFDQSRVRKRIFRSDTVVDEHGNRHLVHQILAGGVIRTAPLIESRSWSQLGSEAGAKRFSKTDVMRLQVEA

SEQ ID NO: 7154 - protein, 1059 aa, synthetic construct
  REGION 1..1059: note = Synthetic
MIERILGVDLGISSLGWAIVEYDKDDEAANRIIDCGVRLFTAAETPKKKESPNKARREARGIRRVLNRRRVRMNMIKKLFLRAGLIQDVDLDGEGGMFYSKANRADVWELRHDGLYRLLKGDELARVLIHIAKHRGYKFIGDDEADEESGKVKKAGVVLRQNFEAAGCRTVGEWLWRERGANGKKRNKHGDYEISIHRDLLVEEVEAIFVAQQEMRSTIATDALKAAYREIAFFVRPMQRIEKMVGHCTYFPEERRAPKSAPTAEKFIAISKFFSTVIIDNEGWEQKIIERKTLEELLDFAVSREKVEFRHLRKFLDLSDNEIFKGLHYKGKPKTAKKREATLFDPNEPTELEFDKVEAEKKAWISLRGAAKLREALGNEFYGRFVALGKHADEATKILTYYKDEGQKRRELTKLPLEAEMVERLVKIGFSDFLKLSLKAIRDILPAMESGARYDEAVLMLGVPHKEKSAILPPLNKTDIDILNPTVIRAFAQFRKVANALVRKYGAFDRVHFELAREINTKGEIEDIKESQRKNEKERKEAADWIAETSFQVPLTRKNILKKRLYIQQDGRCAYTGDVIELERLFDEGYCEIDHILPRSRSADDSFANKVLCLARANQQKTDRTPYEWFGHDAARWNAFETRTSAPSNRVRTGKGKIDRLLKKNFDENSEMAFKDRNLNDTRYMARAIKTYCEQYWVFKNSHTKAPVQVRSGKLTSVLRYQWGLESKDRESHTHHAVDAIIIAFSTQGMVQKLSEYYRFKETHREKERPKLAVPLANFRDAVEEATRIENTETVKEGVEVKRLLISRPPRARVTGQAHEQTAKPYPRIKQVKNKKKWRLAPIDEEKFESFKADRVASANQKNFYETSTIPRVDVYHKKGKFHLVPIYLHEMVLNELPNLSLGTNPEAMDENFFKFSIFKDDLISIQTQGTPKKPAKIIMGYFKNMHGANMVLSSINNSPCEGFTCTPVSMDKKHKDKCKLCPEENRIAGRCLQGFLDYWSQEGLRPPRKEFECDQGVKFALDVKKYQIDPLGYYYEVKQEKRLGTIPQMRSAKKLVKK

SEQ ID NO: 7155 - protein, 1048 aa, synthetic construct
  REGION 1..1048: note = Synthetic
MVEKILGIDLGISSLGWAVVEYDKDNDENNKIIDCGVRLFTAAETPKEKESPNKARRDARGLRRVIKRRRVRMNTIKNLLITYKLIDKTLLDEEMGMFHSQSNRVDVWKLRHDALYHLLSGDELARVLIHIAKHRGYKFLGDDESDEESGKVKKAGAELKKKFLEAGCQSVGEWLWKERGLQGKKRNKSGDYEISIPRDFLVEEIQRIFETQQKFGSTFATSELQKAYTDIAFYVKPMQSIEDMVGYCTFYPKIKSKNQDGEKRAPKASPSAEQFVILSKIFSTIVIDENKQEKKLIELKSIEQLIQIARSKETLKYKQLRKELNLAKDISFKSISDEEKTWINLVGNAKFKKILGLNYETFLKNTEISDEIAKILTYDKTFEQKETKLKNLLVNIDWIDNNHIAELAKLSFSQFNQLSLKAIKIISKIMIEGYARYDEAVQYAFENNLLPKPSHEKSILLPPLKETNIAILNPTVIRAFAQFRQVANALVSKYGSFDKVHFELAREVNTKEDRKRWEKDRDKNEKMHRQITEKLVEEGVKPSYKNILKSKLRSEQKDTCPYCQKNLHYPMIFEDGYAEIDHILPLSQSQDDSYVNKVLVHSACNQNKKNRTPFEWFQDEKKDWDTFKSYILMESTLGEKKRNYLIKENFSDPQSRKEFISRNLNDTRYMSKAIKTYCENHWKLSHDDDKLRIQVRSGKLTSTLRHQWGLDNKNRETHTHHAMDAIMIAFSTQGMVKKLSDYFAKKEAKVEKDKPVLITPIKQFKEAVEQATTLERQESIQTKAGDTITLNRLLISRPPRASVTGAAHEQTAKPYPRIKPIKNKYKRRRIPIDEDKFELFRNDKVASGNDKNFYNSSTIPRVDIYKKDDKYHVVPIYLSDMTKAEVPNKSLGTNPEGMDEKYFCFSVFKNDLIELETKATPKKPSKKLLGYFKQLNGANFILNSIHNGIIDGFVCSPITLFKQQKDMCKKCLPEDRAIGNCSQETLEFWEAENIKVPKKDFECDQGIKFAIAVRKYTIDPLGYYHEVKGEKLLGTIPQGAKKHPKRQK

SEQ ID NO: 7156 - protein, 789 aa, synthetic construct
  REGION 1..789: note = Synthetic
MQGIEHMVGNCTYFVNEKRAPKCSISAERFVAIGKFFSTVVIDNFGNEQKIVELKDIGELMDFATTKEKLEYKHLRKILGLNENQIFKGLTYKSKPKKSKNNNENSIEEWEFDKTEAEKKQWISLKGHARLKDALLDGFDTFISDIDKADEVVKILTYHKDQMQKKDKLSKIIDNDLVEKLSIISFQDFNNLSIKAIRTIYDLMRENTIRYDEALRYALENGLLPKSTNEKSELLPPLKDTDIAILNPTVIRAFAEFRKVANALVRKYGSFDKVHFELAREVNTKDQIKRIKDSQYKNEKERKAVADWLDENFGGQNIAPNKKNILKKRLYDDQDGRCVYTGEPISLERLFDDGYCEIDHILPRSKSADDSYANKVLCLASANQNKTNQTPFEWLGRDELVWQKFKQRIDTSINRAKLGNTKVTRLLKENFDENSQKEFLTRNLNDTRYMAKAIKTYCENYWKLANDDDRLRVQVRSGKLTSELRGRWIEGFMKDRSLHYHHAIDAIVIAFSTPSMVQKLSNFYNQKELKHSKEKLVFKPPMQNFRIAVESAIVLDKKEILKNSKEVNRLLISRPPRASVTGAAHKETIQSPKKYKGKGVSINDGKGMCDNGDMPRVDVFTKDGKYYLVPIYVADFAKDELPNRAIVALKSYQEWDEIDDSFEFLFSIHKEDIVEIKTKQTPSRPSIVIKGYLSQVVSSTAQIVLENVDNSENEIFSRDKNKDGTPKGDSIARYGSKTLVYIKKYTIDPLGYYHEVKGEKRLGTIPQEAKRNGVLERRKKKRSEKRQVK

SEQ ID NO: 7157 - protein, 998 aa, synthetic construct
  REGION 1..998: note = Synthetic
MIEKILGIDLGIASLGWSVIEHDSNNDANNKIIDCGVRLFTAAETPKEKESPNKARREARGIRRVIKRRRGRMNAIKKLCISNALLHENDLNIENGIFNSQENRSDVWQLRHDALYRALNANELARVLIHIAKHRGYKFVGDDETDEESGKVKTAGAALKDSFQKAGCLTVGEWLWKERGEQGKKRNKSGDYEISIPRDFLGKELDAIFEAQQRLGNTLASDALKKTYLDIAFFVRPMQSIKHMVGNCTYFPDEKRAPKSSPSAEQFVALGKFFATVVTDNEGNEQKIIALKSVDELMDFAISKDKLDFKQLRKFLALGEHQIFKGLTYKGKPKKQKKGEEDKPLEWEFDKAEAEKKVWISLKGHAKFKEVLGEEKFAALLDNIDQADEVATILTYYKDAEQKQAALKKLSLETDTIESLSTIGFSDFNQLSLRAIKAVLPEMRNGKRYDEAIAILGKPANEKSIFLPPLKDTDINILNPTVIRAFAQFRKVANALVKKYGSFDKVHFELAREVNTKADIKGMIEGQRKNEKEREAAKIWIAENFGSFIPATRKNILKKRLYEQQDGRCAYTGDALSLERLFDEGYCEIDHILPRSRSADDSFANKVLCMTKANQDKTNRTPYEWFGHDTARWETFEARIGSSSSLAKMGKGKVSRLLKNNFDENSEKEFLSRNLNDTRYMSKAIKNYCEEYWQLAHDDDKLRIQVRSGKLTSALRHQWGLDSKNRDTHTHHAADAIMIAFSTQAMVKRLSDYYGAKETNREKERPKFKAPMENFRENVETALTLERTETVVTKDGREVTLKRLLISRPPRASVTGAAHKETIQSPTAYKGRGVAVNEGKGMCDNGDMPRVDVFTKDGKYYLVPIYIADFAKADFSDITAYGLDLAEDSKFLFSIHKDDIVGINTKATANKPAKEVRGYFTQMIGPSILLNSFDNDEATFFRYDKNKKKFVCQLNVLNAIGIKKYTIDPLGYYHEVRSEKRLGTIPQESKKRKKIKIK

SEQ ID NO: 7158 - protein, 995 aa, synthetic construct
  REGION 1..995: note = Synthetic
MIERILGIDLGISSLGWSVVEYDQDNETNNKIIDCGVRLFTAAETPKEKESPNKARREARGIRRIIKRRRVRMNEIKRLCQKYELIDKIDLLDNEGMFHSNQNRTDVWELRHDALYRTLTGKELARVLIHIAKHRGYKFLGDDESDDESGKVKQAGAALKDKFYVAHCQSVGEWLWKERGKNGKKRNKSGDYEISIPRDFLVDEIQTIFDAQRRFGNCFATQELQQAYTDIAFYVRPMQSIEHMVGKCTYFPEEPRAPKASPTAEQFVALGKFYATVVIDKEHKEQKISELTPVKELMEFAISKEKLTYKELRKFLALDDEHIFKGLAYKGKPKKARKGEEDKPQEWEFDKAEAEKKVWINLKGHAKFKEVLGDEKFLELLKTQDLADEVAKVLTYHKDERAKKEELAKLHLDSSTIEKLSKISFTDFNQLSLKAMKTILPEMMQGKRYDEAISILGKPSYEKSIFLPPLKETNIAILNPTVIRAFAQFRKVANALVTKYGAFDKVHFELAREVNTKGDIEEIKEAQRKNEKERESAKVWISENFGASIPVTRKNILKKRLYEQQDGRCAYTGEVIALERLYDEGYCEVDHILPRSRSADDSFANKVLCLATANQNKRNLTPFEWFGKDTAKWNYFEARISSPSNFAKMGKGKISRLLKKNFDENSQKEFLARNLNDTRYMSKAIKTYCENYWKLSNDDDKLRIQVRSGKLTSTLRHQWGLGNKDRDTHTHHAMDAIMIAFSTQSMVKKLSDYFAKKEKKDEKDKPVMPTPMNFFKEEVEKATALERQERIQTKAGETKILNRLLISRPPRASVTGKAHDDTYYSPRTRIVKKSNGKVDYLSNNELRKAIFTRSGLAKNGDMIRRDIFIIGNRISIVPLYISDLSSTNELSNKSLNGTPIDLNNALFYCSLFNDDLIKVGVKDNEYFGYFKFFETDGRINIESIDGSQKLRFSINNANFIKKYTIDPLGYYHEVKGEKRLGTIPQEAKQHPKRQK

SEQ ID NO: 7159 - protein, 991 aa, synthetic construct
  REGION 1..991: note = Synthetic
MVERILGIDLGIASLGWAVVEYDKDNDTNNRIVDCGVRLFTAAETPKEKESPNKARRDARGIRRVLNRRRVRMNEIKKLFIENGLIKEKDLDENGGMYYGKESRTDAWKLRYEALRRKLTGNELARVLVHIAKHRGYDFETEDSEAGKVKSAGEVLKAKFESAGYKTIGEWLWVTKGAKGKKRNKSGDYEFSIHRDFLVSEIKTIFETQKHFGSNFASDELLGAYSDIAFFVKEPPSVENMVGNCTYFPEEKRAPKCSITAEKFVALGKFFNTVIIDNAGNEQKIVERKSIEELLDFATSQDRLEFRHVRKFLGLAENEIFKGLTYKGKPKKPKKGEEQKADEWEFDKADAEKKQWISLKGHAKFREVLGEMFDDFIFNTSIADEVAKILTYHKSENQKLIALNKLLPDGVIAEKLSKISFSDFLMLSLKAINAILPEMQSGKRYDEAIGILGAPSTAKSEYLPPLKDTDIAILNPTVIRAFAEFRKVANALVRKYGAFDKVHFELAREVNTKEQRKEWEKASNENAKLKNILANDIREAGYKDGIKNILKLRLFREQGEMCPYCQSKLKYPDIFDDGHQIDHILPRSRSAEDSYANKVLVHSDCNQNKQNKTPYEWLKNDTERLEKLKSFTNSGLHQMSAKKRRYLLKENFDENSEKEFLSRNLNDTRYMAKAIKTYCEKYWRLRQDDDKLRIQVRSGKLTSELRGRWLEGFKKDRGWHPHHALDAIVIALSTQSMVKKLADYYAAKETRCEKQKPELKTPMSNFRVEVEKALELAKDKNGHKRLLISRPPRASVTGAAHKETIQSPKEYKGKGLPINNGKGVCDNGDMPRVDVFTKDGKYYLVPIYVADFAKHELPNKAIVAGKDKEWVEMGESCQFLFSFHKDDVVEIKLKNKESFLGYFKQADSSTANIKLQKIDSDEQFNFGSKTAEYIKKYQIDPLGYYHEVKGEKRLSTILQEAKRKSKKDGKSVIERRAAKRRIKTKSKNTII

SEQ ID NO: 7160 - protein, 1000 aa, synthetic construct
  REGION 1..1000: note = Synthetic
MKRCVMVERILGIDLGISSLGWAVVEYDKDNDENNKIIDCGVRLFTAAETPKEKESPNKVRREARGLRRVIKRRRVRMNKIKRLCQKYHLIKEIDLHEDAGMFHSSSNRVDVWKLRHDALYRLLNGGELARVLIHIAKHRGYKFLGDDESDEESGKVKKAGAALKDKFHAAHCQSVGEWLWKERGLQGKKRNKSGDYEISIPRDFLVEEIHRIFETQRKFGSSFAPFELQQAYTDIAFYVKPMQSIEHMVGKCIYFPEEPRAPKASPTAEQFVALGKFYATVIIDKEDKEQKISELKTVKELIDFAISKEKLTYKELRKFLALDDEHIFKGLAYKGKPKKVKKGEEDKPQEWEFDKAEAEKKMWLNLKGHAKLNEVLGVESFLELLKNPDLADEIAKVLTYQKDERAKKEELAKLPLEASTIDKLSKISFTDFNQLSLKAMKAILPEMMQGKRYDEAISILGKASSEKSIFLPPLKETNIAILNPTVIRAFAQFRKVANALVLKYSSFDKVHFELAREVNTKEDRKRWEQDRDKNEKQHRQISEKLTEDEIKPNYKNVLKAKLRSEQKDTCPYCQKNLHYPMIFEDGYAEIDHILPLSRSQDDSYVNKILVHSSCNQNKKNRTPFEWFQDEKRDWETFKNYILLESTLGKRKRSYLIKENFGDPQSQNEFISRNLNDTRYMSKAIKTYCENHWKLSHDDDKLRIQVRSGKLTSTLRHQWGLDSKNRDTHTHHAMDAIMIAFSTQSMVKKLSDYFAKKEKREEKEKPVLATPLKQFKEAVEKATELERQESIQTKTGETKILNRLLISRPPRASVTGAAHKETIQSPKEYKGRGVKVNDGKGICDNGDMPRVDVFLKDGKYYLVPIYVADFAKGELPTITAYGEKLVENASFLFSIYKDEIIGITTKATANKPSKEVKGYFAQLIGPSILLNSFDNGEAEFFRYDNGKKKFVCQLNVLSAIAVKKYTIDPLGYYHEVKGEKRLGTIPQEAKKHPKHPKRQK

SEQ ID NO: 7161 - protein, 987 aa, synthetic construct
  REGION 1..987: note = Synthetic
MKRYVMVEKILGIDLGISSLGWAVVEYDKDNDENNKIIDCGVRLFTAAETPKEKESLNKARREARGLRRVIKRRRVRMNTIKHLLITHELIDKTVLDEETGMFHSQSNRVDVWKLRHDALYRLLNGDELARVLIHIAKHRGYKFLGDDESDEESGKVKKAGAELKAKFQSTGCQSVGEWLWKERGLQGKKRNKSGNYEISIPRDFLVEEIHHIFETQQKFGSSLATSELQQAYSDTAFYVKPMKSIEHMVGKCTYFPNEPRAPKASPTAEQFVALGKFYATVVMNKEHKEQKISELKTVKELMDFAISKEKLTYKELRKFLALDDEHIFKGLAYKGKPKKVKTGDEGKPQEWEFDKAEAEKKVWINLKGHAKFNEALGVESFLELLKNPDLADEAAKVLTYHKDERAKKEELAKLPLEASTIENLSKISFTDFNQLSLKAIKAILPEMEKGKRYDEAIGILGKPSHEKSIFLPPLKDTNIAILNPTVIRAFAQFRKVANALVSKYGSFDKVHFELAREVNTKEDRKRWEKDRDKNEKMHRQITEKLVEEGIKPSYKNILKSKLRSEQKDTCPYCQKNLHYPMIFEDGYAEIDHILPLSQSQDDSYVNKVLVHSACNQNKKNRTPFEWFQDEKRDWDRFKNYILMESTLGKRKRSYLMKENFSDPQSQNEFIARNLNDTRYMSKAIKDYCKKHWQLASDDGERIQVRSGKLTSTLRHQWGLDSKNRETHTHHAMDAIMIAFSTQSMVQKLSDYFAKKEKKDEKEKPVLTTPLKQFKEAVEKATKRERQESIQTKKGETITLNRLLISRPPRASVTGAAHKETIQSPKDYKGRGVTINDGKGICDNGDMPRVDVFIKEGKYYLIPIYVADFAKGELPNKAIVQGRDKEWIEMDQNYKFLFSLAKDDLIELHQKGKVPLLGFFAGTDSATANIAIKAIETQEIFKSLGVKTALSFKKLQIDPLSYYHEVKGEKRLGTIPQEVKKHSKRQK

SEQ ID NO: 7162 - protein, 1426 aa, synthetic construct
  REGION 1..1426: note = Synthetic
MKKILGLDLGTNSIGWAVIEHERKFSLESEPTEIFKLSKDSNNKPHCGVTIFTEGVKIEKNNESSKAAERTAYRSARRLKFRRKLRKYETLKVLEEYGYCPIGKDELEKWRSYKNPLTRKAENFKHYPKSDAFLYWLNTDNQATKDMRKKQEKNPYFLRDQVSREKIDHSKKEEKYKLGRALYHMAQRRGFLSNRLDVEDKSIIEEHLPSLNALIEEADNSAELMRLFKDYFKDFDKKDEREKQMVTLKRAFDFIIKKNKGVSFEELKTLILKRLNRKEDLGKVKQGILDLTTKIEEEGCETLGQYFYKSYQKKEKIRGQYTAREDHYLFEFKHICRVQELPEEIIKKLKRAIFYQRPLRSQKGLVGKCSFEPTKPRCPASHPLFEEFRMWSFINNIKFKTEDGKWKSISKEEKEKAIPKFFRKSKPSFDFEDLASVIGKDKHYNYKLKRTVIGSPTTAALVNLFGADWKENIYERYTLKINKNGKKKSLETVINDIWHVLFTFDKNEKLVEFAKNKLKLSPKDAIKFSNIRLKTDYARLSISAIKKILPYLRAGHIYSYAVFLANMEKVIDDDIWKVDDNKDFIKEELDKLIENNREENRLLFIVNELLKGCKDQNSVYSEEAKPYYDKRIIEKLKNSFGEKTWEKRNDKKETIDFVSHEFYTQFKKKGGKGEFKKIKRLDEKVKQFIKNNGFCSDERKLDELYPPSAMEVYQKPDRNDDGLLLLGSPMISAIKNPMAMRSLHQLRKLVNTLLKEEIIDEHTHIHIELSRQLNDANKRKAIQRWQKEREDQNKKYKKEIEDLYKAESGNKAPLVTSNDILKYRLWKEQNEKCVYTSKQICICDFIGDKIKFDIEHTIPRSRCNDNSLMNKTLCEIEFNRNIKKNKMPSELSIHDELIRNIEHLGWKKNYENLEPRIKRLRSSARKAVIKENKDKIIQEYQYLTMERDYWKGKYDRFIMTEVSDGFKNSQLVDTGIITKYARSYMKTVFKRVESVKGDMVAEFRKAWGLQDYYEKKDRSNHIHHCVDAITIACMTKDKYNIMAKAWGKEEMELRYEARNIMTASKPWPTFSEDVQTIEKEVLIYHHTPDQVRKQVKKKWRKRNKIVKNIKTGKPIYLQGDTVRGSLHLDTVFGAIKRAVRDENGKVQFDENNNMVLQKDDKGNEQVFYVIRRQLINLKKSEVDNIVDEKVKAKIKAAIEDGSLAITPNDNADNKFKKVWMNKEKGIEIKKVRVYAKAGRGYLSNPIHLRLQRDLSKHEHKQNVYVQNDENYVLAIYEQINKKGKRQRKYELVNMMDAGWYFKESNKGHRKKYGLVPESMKGMPLKAELKKGTMVLLYKNRPKEVHQLSQKELVKRLYKIVGFDGRPRVMLRHHQVAKAAKEITQSSKMDFGNPAEQLSLGVGNLNILVQGIDFRMTNSGNIIFIEK

SEQ ID NO: 7163 - protein, 1202 aa, synthetic construct
  REGION 1..1202: note = Synthetic
MTGKQKNLGARTFGLDIGIASVGWAVLGESRIIDLGVRAFDKAETAKEGDSLNLVRRMARLMRRRLHRRAWRLTKLARLLKREGLIADAHLFKSQQPFPQSPWQLRVDALDRRLNDEEWARVIYHLCKHRGFHWVSRAEEKAAEGDSKGEGGAVTQALKKTKEMKEKYRTAAEMVLVEFVTQRTDKDGNVVLNKTGEPILDGAARNKQGDYSKALSRVLLGDELKELFREQSKLGNPHASVELEAEILGNGDKKTGLFWEQEPALTGPKLLEMLGRCTFEKSGGPDGKGEYRAPKASFTAERHVWLTRLNNLRVVVDGTTRPLDEQERRIALPLPYLPGEKFTYKNLRTALVKAGCLPESFRFAMPYPSEQQKIEGKAKDPEADTLIKLPAWHELRLTLKKAELETEWQNMANAALNGQPELLDEIARVLSVYKDDAEVETELRKLALPNLEKMVKALLDIRFAKFHALSLKALRKIVPFMEKGQRYDEAVANIPEYGHHSQLHKIGEGEHKYLPPFYSGRDKDGRMVFSEDMDIPRNPVVLRALNQARKVVNALIREYGAPHEVHIEMARDLSRPLDERRKIEAEQKDFHDGNEKNKSEFASHFSIVGTPKGKDFEKWRLYREQQGKCAYSIEPIDLNRLLEAGYVEIDHALPYSRSFDDSKNNKVLVLARENRNKGNKTPYEYLDGAENSERWRQFVAFVESNKAYRQAKRSRLLRKDFGEKEAKEFRERNLNDTRYICKFFKNYVEQYLQLHEDSDAKRCVVLSGQLTAFLRARWGLIKVRGDSDRHHALDAAVVAACSHSMVKRLSDYSRCKELGKAHKDFVNVETGEIINHFPDPWPHFRDELQARLNIDDPALLRTEMEQLGTYPPEALGTLRPLFVSRAPQRRNGGAAHMDTIYTKPRDGHVLMVEDKKAKKIAKDNAEKVLRPATTEEKASMVIGRIGVMDKDSKGNYKLTLEKLDDIIDPRRNENMIEALRHWIANRDEREKAAKTIEASFGRGKEKRKPTDAENAEIERLRALPRKPLKDDPGNGPFTGPIIRAVKVNAGKMSGIQIRNGLAAQESLIRVDVFSKEGKFYLAPLYVADTAKKKLPDQTADGETQIDNSFDFRFSLHPNDLAKVTLKGKGSILGYFRGYGGPPNPYNITLAIHDRNKNGHERANDKGEIPSIGIKTALNIEKFNVDVLGNTYPAPPEKRRDLA

SEQ ID NO: 7164 - protein, 1187 aa, synthetic construct
  REGION 1..1187: note = Synthetic
LRTLSDNSILANITSADRANPHATTATNEKPDRQACRAGTDSIVRLIHYCSNGSHPGRLQDFILRNLRMNDKKNLGPLTFGFDIGIASVGWAVLSPTRIVDLGVRCFDKAETAKEGESLNLARRSARLMRRRLRRRAWRLIKLARLLKHEGLIADTKTFIQPSASHASPWQLRKDGLDRALSPEEWARVLYHLCKHRGFHWVSRAEARKADGDTKGEGGKVKQGLASTTKLMNDKSYRTAAEMVLAEFPSAQRNKRGEYTKALSRELLDNELKQLFERQREYGNPHADTNLEAKIRGSGDHKSGLFWEQKPALSGNDLLKMLGKCTFEKQEYRAPKASFTAERHVWLTRLNNLRIIVDGRTRPLADAERTMALSLPYEQVGDFTYKQLRAALVKAGLMPDSFKFASLAYPSEFQKAEGKAKDPESAALTKLAAWQELRATLKKADLESEWQQISCAALEGQPETLDEIAGVLSVFKDDDEVLNELQKLGLPGGAKTENALLDIRFDKFHALSLKALRKIVPYMERGLRYDEACERAEYHHSQLHKVGEGNRKYLPPLYKSRDKDGRMVFNDELGDIPRNPVVLRSLNQARKVLNALIARYGSPSSVHIEMARELSKPFDERMKVGKEQEAYRERNEKDKQTFVAEFGIVGAAKGGEFEKWKLYREQQGKCAYSIQGIDLNRLLEPGYVEIDHALPYSRSFDDSKSNKVLVLAAENRNKGNRTPYEYLDGEHNSERWRQFVGFVESNKLYRQAKRSRLLRKDFGKEQADEFRERNLNDTRYVCRFFKNQVEQFLKLAEGSESKRCVVLSGQLTAFLRARWGLIKVRDESDRHHALDAVVVAACTHGMVKRMSDYARRKELDQVAEGFVDVETGEIINAAMFQQLHEHFPDPWPHFRDEVQMRLKIDDPAQLRSDLLRLGNYAEEDVHAVRPLFVSRAPQRRNSGAAHKETIYGQPERLKAQGGVTEKVALTALTMKDLDRLIDPHRNEKLYAAIRKRLEEFGGKADKAFAASNPLHKPDKEGNPTGPIVRTVTLEIDKLSGVPVRGGIAKNDTMLRVDVFTKAGKFHLVPVYVHHKVTGLPNRAIVASKDEDEWTAIDDSFEFLFSLYPNDLVTITQKGKAPVRGYYASCHRGTGAFSLWAHDRASSVGKGGQIEGIGIKTALAVQKYNVDVLGTTYAAPLEQRRGLA

SEQ ID NO: 7165 - protein, 1185 aa, synthetic construct
  REGION 1..1185: note = Synthetic
VARRPRRFGGAAFFCQLFGAHEKPAQVALSGFGFDRTLASTSYCSNGSHPGKLQWANLLQGVAMTQAAYNAPRAPIDYILGLDIGVASVGWCLLGHNRIIDLGVRAFDKAETPDKGESLNKTRRDARLLRRRLHRRAWRLTKLARLLKREGLIDSIDVLKRPPNKGFKTPNLWRLRVEALDRPLSGEEWARVLYHLCKHRGFHWYSKAEQAKGEGESGASGGSVKQGLSQNAARMKDKNYRTAAEMVLTEFPNAQRNKQSHYDKALSRVLLDEELGKLFVAQREHGNPFARAELERHIRGPGDQRNGLFWKQEPALTGSRLLNMLGRCIFETQEYRAPKASFSAERHVWLTRLVNLRIVVDGIARPLNDEERQFALLLPYRQSRSATKFSYADLRKKLTGEFPHLEGFRFLGLPGARRKKSGEISDPESEALVRIPAWQELRKTLEGAGLTTEWKQLASDALEGRPEILDGITYVLSVYKDDDEACAELTKLNLPHSEKMIEALLPIRFDKFSNLSLKALHRIIPLMEQGLRYDEAVAQIPEYGHHSQIVRSPKKSHYLPSFYEYGSGSAKLKDDPSLPRNPVVLRALNQARKVVNAIIAEYGSPAEVHVEMARDLSRPLDERRDIERQQQEYRDRNDAARLRFTELFQRIPNGRDFEKWLLYGEQQGKCAYCLSPLANGSDASSIFTDNRTQVDHVLPYSRSFDDSRNNKVLVHTKCNQEKGNRTPYELLDGQSDSAQWHNFVAWVGGNKSYRLAKRNRLLRKNYGREEAQGFKDRNLNDTRYICKFFKQYVEDNLALSSESKRCVVLSGQLTALLRRRWGLTKSRDSSDRHHALDAAVVAACSHAMVKRMSDYARRKELEHIEQGFVDVETGEVVDVNALRRLEAHFPRPWDGFEDELCLRIGIDRSTGRALEDTSVETLHEGLRRFRDTDNQPRYLDEVLNHVRPLFVSRAPKRRKGGALHEAMIRSIKNAGVEQSYIKTPLSKLTISKLEKIVGAHDGRNEKLIALLRERLERHGDDGSKAFKEPVYKPSSNPEKAPLVRTVKVLDTQKSGVKIRGGVAELGEMTHVDVYAMHDSYYIRPAYLSNEEDHIQQNVIPNGAEFIFSLTKNNLVSIDIGNHVYQGYFVMYESDGRMTLRGHDQPQPDKMYFRKMVSRAKAINKHHVDVLGNVYPPLPRQHRGLA

SEQ ID NO: 7166 - protein, 1177 aa, synthetic construct
  REGION 1..1177: note = Synthetic
VGDCHNRKPSTKAGLGYRIFRLFIVATALTPDDHNDSIIRNKNMNSKQGVKYSIGLDIGIASVGWALLGEHRVIDLGVRCFDKAETADKGESLNLARRSARLLRRRLRRRAWRLTKLARLFKREGLIADVNVLKQPPAKGFATPNLWQLRVEALDRKLSAEEWARVIYHLCKHRGFHWQSKAEEKKADDDKEGGAVKKGLAGTKKLMQDKGYRSAAEMVINEFPDAQRNKRGDYSKALSRELLSSELHMLFESQRTFGNPNTSSEFENKLLESKHGLLWAQKPSLSGEALLNMLGKCTLEKNEYRAPKGSFTVERHVWLTRLNNCRLIIDGEKRALTPAERALAINLPYDQSSDFSYKQLRNALVKAGLTSEFRFAGLVYPSQSEQEKSKNPEDEKLIKLPAWQQLRKAMKEANLESDWQKIAVDALDGKAQLYDGIARILSVYKEDDEVERELNKLDLPNKPDMVAVLQTFRFEQFSNLSLKALYNILPHMEKGQRYDEACLAAGYHHSQQHVISTGEYRYLPPFYSGRDKDGRLKFNEELDIPRNPVVLRALNQARKVVNAIIKKYGSPDQVHIEMARDLSKSFDDRRDIKKAQDEYRDRNEKDRSTFNLEFNTTGELKGREFEKWQLYREQHGKCAYSLQALDMNRLFEMGYAEVDHALPYSRSYDDSKSNRVLVLAAENRNKGNMTPYEYLGGAQNNVRWIEYVAFVNSNKTYRQAKRNRLLRKDFGEEAAKEFSERNLNDTRYICRFFKNYVELYLKLADESDAKRCVVVNGQLTSFLRARWGLVKVRSDSDRHHALDAAIVAACSHSMVKRLANYSRRKELEAAREGFVDLTTGEIANHAMYAQLEQHFPFPWSHFRQELQARLFADDLQAMRNELENMGYDADALDHAKTLFVSRAPQRRNGGAAHKETIYGQSEKLATTGSVTQKIVVTDLKLSDLDKLVEPHRNQKLYAEIAEWLKGKDEREKRVKEIETSLGRGKDKREMTAEEKAEVERLRALPRKPTNDGSPGPVVRTVTAVIDKLSGIPIRGGVAKNDSMLRVDVFSKAGKFYLVPVYVHHRVTGLPNRAILQAKDEAEWTLIDESFAFKFTLYPNDYVCLIQKGKSPLYGYYAGCDRTTGNIDLWSHDRNRLIGKDGLLRSLGVKTAISLEKYNVDVLGNIYPAPKETRSDLA

SEQ ID NO: 7167 - protein, 1162 aa, synthetic construct
  REGION 1..1162: note = Synthetic
MTGKQKVDGPITIGLDIGIASVGWAVLGENRIIDLGVRCFDKAETAKEGNPLNLERRTARLMRRRLRRRAWRLTKLTRLLKREGLIPDVNVLKQKPVKGFKTPNLWKLRVAALDRKLESEELARVIYHLCKHRGFHWISRAEKKAAESDSKSEGGRVKDGLAKTERLKEKYRTAAEMVWKEFFKPRIDNDGEPVRTRKTNEEIFDGVARNKQGDYSKALSRELLADELKLLFQCQREYGNTHASAELETAILSNGDKKSGLFWEQKPALSGENLLKMLGKCTFERFEYRAPKASFSAERHVWLTRLNNLRIVEDGKLRPLNEQERRFALPLPYQQASDFSYKQLRNKLVNAGYLTDAFRFAGLSYPSSRQKEDEKAKDPEAEKLVKFTGWQTLHKTLKDAGLESEWQQISCHALEGNAELLDRLTWVLSVYKDDTEVDAELRKLPMPNLEKMVVALLDIRFDKFSNLSLKALYNILPHMEAGLRYDEACEKAGYHHSQLHKIGEGEHKFLPPFYSGRDKDGRLKFNEEMDIPRNPVVLRALNQARKVVNTIIRKYGSPHDVHIEMARDLSKPFDERREIKKAQEEYRERNEKDRTAFNTEFNLTGELKGKDFEKWQLYREQQGKCAYSIDPIDIHRLFEQGYVEIDHALPYSRSFDNSKNNKVLVHSSENRNKGNHTPYEYLDGQNNSERWQRFKGFVETNKAYRQAKRNRLLKKDFGNTEAKDFRDRNLYDTRYICRFFKNFVERYLQLHEDSAAKRCVVASGQLTSFLRARWGLLKLREESDRHHALDAAVVAACSHGMVKRLADYSRRKELEAVRDGFVDLETGEVINPVMYQRLQEHFPDPWPHFRDELQARLKIDNPALLREEIEKLGSYPPEAMESLRPLFVSRAPQRRNSGAAHKETIYAQPESLKAKGGVTQKVAICDLKLADVDKLVDPHRNEKLYAALKDWLTTRDDREKRAKDIEKIAKDAKRELTTYENAEIERLRALPRKPDKEGNPTGPVVRTVTMVIDKLSGIPVRGGIAKNDTMLRADVFRGKKDDKFYLIPVYVHHSVAKVLPNKAVVSKKDESQWTVMDDNYAFHFSLYPNDLVQLVIDGESILGYFIGVNINDGGLKYYPHDQRRTGSLKKRGVSGAKLFTKFHVDILGNRYPAPPEIRRDLA

SEQ ID NO: 7168 - protein, 1153 aa, synthetic construct
  REGION 1..1153: note = Synthetic
LQQRLSPRITTIGDEYSKGGFMAQYVFGLDIGIASVGWAVLDAQRIVDLGVRCFDKAETAKEGDPLNLTRRQARLLRRRLYRRAWRLTQLARLFKREGLIDDAKLFAKAPSWTENAWELRLRGLDHLLTPLEWARVIYHLCKHRGFHWTSKAEEAKAESDAEGGRVKQGLAHTKALMQVKNYRSTAEMVLAEFPGAQRNKRGQYDKALSRVLLGEELALLFATQRRLGNPHASEHFEQLILGHGDRKSGLFWQQKPALSGADLLKMLGKCTFEKTEYRAPKASFSAERHVWLTRLNNLRIVVDGRARPLNDAERQAALLLPYQTETFKYKTLKAAFVKVGLWGDGVRFGGLAYPSQAQAEAEKAKDPEDQFLVKLPAWHELRKAFKAAGHEALWQQISMPALEEDPTLLDQIATVLSVYKDGTEVVQQLRQLALPEPDASIAVLEKIRFDKFSSLSLKALRRIVPLMQGGLRYDEAVAQIPEYGHHSQRIDPGATRHLYLPPFYEAQRKYAGKGDRIGSMQFREDADVPRNPVVLRALNQARKVVNALIREYGSPVAVNIEMARDLSRPLDERNKVKRAQEEFRDRNDKARSEFERDFGYKPKGAVFEKWMLYREQLGQCAYSQQPLDIQRVLDDPNYAQVDHALPYSRSYDDSKNNKVLVLTRENQNKGNRTPFEYLTSFPGGEDGERWRAFVAWVQGNKAYRMAKRNRLLRKNYGTDESRGFIDRNLNDTRYICKFFKNYVEEHLQLAARTDGDTARRCVVVNGQLTAFLRARWGLAKVRGDSDRHHALDAAVVAACTHGMVKALADYSRRKEIAFLQEGFPDPETGEILNLAAFDRAREHFPEPWPHFAHELKARLFIDDLVALREDMQHLGSYAQDDLDRLRTLFVSRAPQRRNGGAVHKGTIYAQPENLKQQGSTIEKILLTGLKLQDFDKLLNPESSDHFVEPHRNERLYAAIRRRLEEFGGKADKAFGPDKPFYKPDKNGQPTGPIVRSIKLVRGKQTGIPIRGGLAKNDSMLRVDVFTKAGKFHLVPVYVHHRVTGLPDRAIVAFKDEEEWTLIDESYAFLFSVYPNDFVCVQQRGKPLIEGYYAGLDRANGNINVWAHDRAASVGKDGLIRGIGVKTALSLEKLNVDVLGRIYPAPPETRRGLA

SEQ ID NO: 7169 - protein, 1148 aa, synthetic construct
  REGION 1..1148: note = Synthetic
MQGNQNLGPLTIGLDIGIASVGWAVLGETRIIDLGVRCFDKAETADRGESLNLARRSARLLRRRLRRRAWRLTKLARLLKREGLIAEVSVLKQPPSSGFKTPDLWKLRTEALDRKLDAEEWARVLYHLVKHRGFHWVSKAEEKKADDDKEGGAVKKGLAGTKKLMQEKHYRTAAEMVIHEFPDAHRNKRGDYSKSLSRVLLADEMMRLFERQRQLGNPHVSEKLQKVLLGHGDRKSGLFWAQKPSLSGEALLKMLGKCTFEKDEYRAPKASFTAERHVWLTRLNNLRIVVDGKMRPLTSAERKVALLLPYQQATDFSYKQLRKVLLKAGLSDEFRFVGLAYPSERQKTEEKAKDPEDEKLVKLPGWQTLRKTLKDAGLEAEWQQISVTALDGRPQLLDEIARVLTVYKEDEEVERELSGLDLSNKERVIAVLLTTRFDKFSNLSLKALYNILPHMEAGMRYDEACLQAGYHHSQLYEVGAGEHKYLPPFYAGRDKDGRLKFNEEMDIPRNPVVLRALNQARKVVNALVKKYGAPHEVHIEMARDLSRNFDERRDIKKAQDEFRDKNEIVKKKFEEFYKKPAKGRDLEKFQLYNEQQSKCAYSLRPLDINRLFEPGYVEIDHALPYSRGFDDSKNNRVLVLATENRNKGNMTPFEYLDGKENSENWRQFAAYVNSNKLYRQAKRNRLLKRDFDEKEAQGFRDRNLNDTRYICRFFKNYVERYLKLHDESEVKRCIVVSGQLTSFLRARWGLVKVRADSDRHHALDAAVVAACSHGMVKRLSDYSRRKELEQVREGFIDMETGEIINPAMLERLEQHFPALWPHFRQELLARLNEDNLAALRAEIEHLGSYPPEALDELRPLFVSRAPQRRNSGAAHLDTIYSVPTADKEKPGIVRADSAIQRIAVTRLSEKQLDDIVGRHDTRNADMIAVLRIWLQEREAREKRAKEIEAGTGRGKEKRELTNNEKREISHLRELPRKPTKDGSPGSIIRAVKVNIGKMSGISIRDGLAAQKSLLRVDIFTKAYRFYLVPLYVADIVRRNLPNRTADGETIIDDSFKFLFSLHPSDLARVALKGKGSILGYFRGYGGPPNPYNITLLIHDRNKNGHERANDKGEIPSIGIKTALNIEKFNVDILGNIYLAPPEQRRDLA

SEQ ID NO: 7170 - protein, 1146 aa, synthetic construct
  REGION 1..1146: note = Synthetic
MSGNTHGPLTFGFDIGIASVGWCVLGENRIVNLGVRCFDKAETAKEGESLNLARRTARLMRRRLRRRAWRLTKLARLLKREGLIAEASRIHIPSPVSPWRLRVEGIDRRLTDDEWARVIYHLCKHRGFHWISRAEERKAESDAKEGGRVKKGLSDTQRRMTEKGYRSAAEMVLAEFPDAQRNKQGDYGKALSRILLSDELALLFRRQRELGNPNAGNELEATILGNGNRKSGLFWEQKPPLAGADLLKMLGRCTFEKNEYRAPKASFTAERHVWLTRLNNLRVVVDGTTRSLDDAEHRLVLPLPYKQAGDFTYKQLRTALTKAGLLPEGFKFAGLSYPTGRQLDDPKAKDPESEKLVRLPAWQELRKTLKDKNLETEWEGMAGAATGGNPELLDEIARVLSVFKDGDEVTAELWKLPLPGGKAMIDALSEISFDKFHALSLKALRKIVPHMESGLRYDEACAVAGYHHSQLHAAGAGEHKFLPPFYSRRDKDGRMVFNEELDVPRNPVVLRALNQARKVLNALVRTYGSPTAVHIEMARDLSRPLDERNKVKKAQDEYRERNEKDKAAFAAEYGIAPKSREFEKFQLYREQQGKCAYSLKSLDLHRVLHDIGYAEVDHALPYSRSYDDSKNNKVLALTEENRNKGNRTAYEYLTSFPGGENGERWRNFSVAVETNKAYRLAKRTRLLRKDFSGRAAEEFRERNLNDTRYICRFFKNTVERFLKLDAKVGAGDTAEISAKRCVVLSGQTTAFLRARWGLLKVRGNSDRHHALDAAVVAACSHGMVKRLGDYSRTKELAKVHDGFPDPETGEIIDPVMFQQLHAHFPDPWPHFRAELEARLNVDDTADLRARMELFGTYAPEALETLRPLFVSRAPQRRNSGAAHKDTIYAQPERLKEQGGVTQKVPLTSLTLKDLDKLIDPHRNEKLYAAIRARLEAHGGKADKAFPAGNPLRKPDREGNPTGPVVRTVTMVIDKLSGIPVRGGIAKNDTMLRVDIFRHKKDGKFHLVPVYVYHAVAKEFPNRAIVQAKDEDEWTLIDDKFDFCFSAHPNDLLKITQKSGETIFGYYRGCHSGTAAINIALHDRYAYAEKTTSLAFSKKNPGKPIPNDKLGLIEGIGVKMAANMEKFHVDTLGNIYPAPPEQRRGLA

SEQ ID NO: 7171 - protein, 1141 aa, synthetic construct
  REGION 1..1141: note = Synthetic
MSGKKNNHGPLTIGLDIGIASVGWAVLGEDRIVDLGVRCFDKAETAKEGESLNLARRTARLMRRRLRRRAWRLTKLARLLKREGLIADVNILKRQPAKGFQTPNLWQLRVKALDRKFDAEEWARVIYHLTKHRGFHWISRAEAKAADSDSEGGRVKKGLAGTKKLMQEKSYRTAAEMVVNEFPDAQRNKQGDYSKALSRELLAVELKTLFQRQRELNNQNASETLEAAILGNGDKKSGLFWVQKPALSGKDLLKMLGHCTFEKAEYRAPKASFTAERHVWLTRLNNLRIVVDGKLRELTEAERQIVLPLPYETGELKYGKLRKALTKAGLSDEFRFAGLSYPSERQQKEEKAKDPEDEKLIKLPAWQELKKTLKDAGQENEWQQLSVAALDGKPQLLDQIAEVLSVYKEDAEVETELRKLDLPNKDKLMDALLDIRFDKFSNLSLKALYAILPHMEAGLRYDEACAKAGYHHSQLHVVGEGKHTYLPPFYSGRDKDGRLKFNEDMDIPRNPVVLRALNQARKVVNALVRKYGSPYEVHIEMARDLSRNFDERRDIKKEQDAFHERNEKDKAAFASEFNVVGAVKGKDFEKYQLYREQQGKCAYSLEPLDINRLFEQGYAEIDHALPYSRSFDDSKNNRVLVLARENRNKGNMTPCEYLGGAESSPRWQNFVVFVNTTKTYRQAKRNRLLKKDFSDEEAEAFRERNLNDTRYICRFFKNHVERYLKLHDESNVKRCVVLSGQMTSFLRARWGLIKARSDSDRHHALDAVVVAAASHGMVKRLSDYSRRKELEKVREGFVDVETGEIVHPAMFDKLEQHFPSPWAHFRDELIARLSIDDPAVLRTEMEKLGNYPPEALEALRPLFVSRAPQRRNSGAAHKETVYAQPESQKTTGGVTQKVAVTNLKPADIDKLIDQHRNEKLYAALRVWVQQRDEREKRARDIEKAAKEAKRELSADERTEIERLHALPRKPDRSGDPTGPIVRTVTMVIDKLSGIPIRGGIAKNDTMLRVDVFKSKKDGKFHLVPVYVHHSVAGLPNRAIVAFKDEDEWTVMDEGYDFHYSLHPNDFVKISLKKETPSGYFAGCDRSTGAVSLWAHDRNQTVGKDGLIRGIGVKTALNVEKFNVDVLGNIFPAPPESRRDLA

SEQ ID NO: 7172 - protein, 1140 aa, synthetic construct
  REGION 1..1140: note = Synthetic
MNYYNDPIITEKVMTSKQDNPGALTFGLDIGIASVGWAVLSESRIIDLGVRCFDKAETAKEGESLNLTRRTARLLRRRLRRRAWRLTKLARLLKREGLIAVANLFKLKIEKNTSVLKSAWQLRVDALDRQLNAEEWARVIYHLCKHRGFHWISRAEEKAAEGDSKSEGGKVKQGLAGTKKLMQEKNYRTAAEMVLAEFPEAQRNKQGDYSKALSRILLGDELKAQFEHQRKLGNTFATEKLEAAILGNGDRKSGLFWMQNPALAGSDLLRMLGHCTFEKTEYRAPKASFTAERHVWLTRLNNLRILVDGTTRSLNEAERRVALSLPYQQAGDLTYKQLRAALIKAGYLPESFRYTGLSYASGQKADEKIKDPETAALVKISAWQELRKTLKDASLEDEWQKISTDALEGRPQLLDQIAWVLSVYKDDTEVETELRKLSLPNAERMVDALLDIRFDKFSNLSLKALNQIVPLMEQGQRYDEAVANIQEYGHHSQLHKVGAGEHKYLPPFYKGRDKTGRMVFCDDMDIPRNPVVLRALNQARKVVNALIKEYGSPYEVHIEMARDLSRPFDERKKVKTAQEEFRDRNEKDKVLFAQDFNIVGAVKGKDFEKYQLYREQQGKCAYSIEPVDIHRLFEQGYVEIDHALPYSRSFDDSKNNRVLVLAKENRDKGNRTAYEYLSLFPGGENGERWRQFVAFVEGNKAYRLAKRSRLLRKDFGDKEAKEFRERNLNDTRYICKFFKNYVEQYLQLHEDSETKRCVVLSGQMTSFLRVRWGLIKVRGDSDRHHALDAVVVAACSHGMVKHLSDYSRRKELEQVRAGFVDVDTGEIINPNMFDQIKKHFPNPWPHFRDELEARLKLDDLDRLREEMQRFGTYSEDALRSLRPLFVSRAPQRRNSGAAHKDTIYAQPESLEAQGGVTQKVPLSSLTLKDLDKLIDPHRNEKLYAAIRARLEQHGGKGDKAFPSNNPLRKPDSDCNPTGPIVRGVTMVIDKLSGIPIRGGIAKNDSMVRVDVFTKANKFHLVPVYVHHTVAKVLPNRVIVAHKDEDEWPLLDDSFSFCFSIYPNDLIRVAQKQCQFVGYYAGCDRGSGNVNLWTHDRNQQVGKDGLIRGIGVKTALNVEKFNVDVLGNIYPAPPEKRRDLA

SEQ ID NO: 7173 - protein, 1138 aa, synthetic construct
  REGION 1..1138: note = Synthetic
MSATYTIGLDIGIASVGWCILGETHIVDLGVRAFDKAETAKEGESLNLARRSARLMRRRLFRRAWRLKKLARLLKSDGLITDTKLFKPEQPFATSLWQLRVDGLDRRLSNEEWARVIYHLCKHRGFHWISRAEAKQAEGDSKREGGKVKQGLAGTAKLMNEKGYRSAAEMVVNVFVKPRLDESGLTKLDKQGNPIPDGAARNKQGEYTKALSRELLAKELALLFAKQREFGNPHTSSKLESAILGNGDKKSGLFWQQKPALAGADLLKMLGTCTFEKGEYRAPKASFTAERHVWLTRMNNLRIVTDGITRQLTDQERSLALPLPYRQAGDLTYKQLGAALTQAGLLEAGSFKFIGLAYPTEAQKAEGKAKDPESATLVKIPAWQELRKTLTNTGVGLDDEWKKLSGDALCGQPEIFDKIAWVLSVYKDDDEVRAELAKLALPNPQAMTEALLNIRFDKFHALSLKALRAIVPHMEKGLRYDEACVQAGYHHSQLHKVGEGEHKYLPSLYDGRDNEGRMIFAEDADMPRNPVVLRSLNQARKVVNAIIRRYGSPSAVHIEMARDLSRPFDERNKIKKDQDEYQARNQRDREQFIELFGHPPKGLEFEKWRLYREQNGQCAYSQRPLTASGNVAEIFLDGSTEIDHALPYSRSFDDSKNNKVLVLTRENRDKGNRTPYEYLGGAENSELWQRYVSFVESNKAYRLAKRTRLLRKDFGAKESGEFRERNLNDTRYVCRFFKNYVEQHLKLAEGSEAKRCVVVSGQLTNFLRTRWGLLKVRADSDRHHALDAAVVAACSHSMVQRLSNYSRTRELEQVRDGFVDIETGEIVNPAMHQQLREHFPDPWPYFRHELEARLKIDSPELLREEVARLGSYTVEELAALKPLFVSRAPQRRNGGAAHKDTIYGQPEKLKKNGSVSQKVALASLTLKDIDLLADPHRNAKLYGAIRERLEAHGGKGDKAFPATNPLRKPDKEGNPTGPIVRTVTKVIDKLSGIPVRGGVAKNDSMLRVDVFTKAGKFHLVPVYVHHRVKGLPDRAVVAFKDEDDWTLIDDSFDWCFSLHPNDLVQIRLKNESFLGYYSGTDRSTGAVSIWAHDRNQAVGKDGLIRGVGVKTAIKVEKFHVDTLGNIYPAPPEKRRGLA

SEQ ID NO: 7174 - protein, 1135 aa, synthetic construct
  REGION 1..1135: note = Synthetic
MGDKTPQNEVSVQANVSAANVKARSAGRSQNLTFGFDIGIASVGWCVLDDARIVDLGVRCFDKAETADKGESLNLARRMTRLMRRRLRRRAWRLIKLARLMKREGLIARVDELQSPAPVSPWRLRVEGLDRRLTDDEWARVIYHLCKHRGFHWLSRAEEKKAEGDKKEGGKVKQGLADTQRRMTEKGYRTAAEMVLAEFPDAQRNKAGDYGKALSRALLADELGLLFKRQRELGNPHAGAGLEAKILGTGDRKSGLFWEQRPPLSGEALLGMLGRCTFERDEYRAPKASFTAERHVWLTRLNNLRLVVDGVTRPLTEAERRIALPLPYRQAGDFKYEQLRKALAKAGLANFSFAGVNEDKEKDVLVKLPGWQTLRKALKENGLETEWEGLAGRAIDGDPSQLDAIAWVLSVFKDGAEVEAELSKLNLPGGEKMIEALSEVSFDRFHNLSLKALSKIVPHMEAGLRYDEACQAAGYRHSQPRAGEGKKSRYLPPLYSGRDKDGRMRFNEDLDIPKNPVVLRALNQARKVMNALIREYGSPVAVHIEMARDLSRPFDERNKIKKAQEEYREKNEKDKAAFAAEYGIAAKSREFEKFQLYREQQGKCAYSLKPLDLHRVIFEPGYAEVDHALPYSRSFDDGKNNKVLALTEENRNKGNRTPYEYLMATDPSGERWREFAAFVEANKNYRLAKRQRLLRKDFTGKAAEEFRERNLNDTRYICRFFKNWVEDHLLLAEKVGADGTALPAAKRCVVLNGQTTAFLRARWGLLKIRSESDRHHALDAAVVAACSHGMVKRLADHARRKELENLRAGFPDPETGEILDPAMFQRLTEHFPEPWPHFRQELEARLAIDDAQTLRERLQAFGTYPPEALAIVRPLFVSRAPQRRNGGAAHKDTIYAQRLKVQGGVTQRVPLASLKLADLDKLIDPHRNEKLYAAIRARLEAHGGKGEKAFPPDNPLRKPDRHGNPTGPIVRTVTLVIDKLSGIPVRGGIAKNDTMLRVDVFRHKKDGKFHLVPVYVHHAAIYRRTGELPNRAIVAFKDEEDWTPIDDNFDFCFSIYPNDLLRITLKKEKHLGYFASCNRSTGAFNLWSHDRNRSTGKDGLIESIGVKTAVALEKFHVDVLGNLYPAPPEVRRGLA

SEQ ID NO: 7175 - protein, 1133 aa, synthetic construct
  REGION 1..1133: note = Synthetic
MADKEKLKETYTIGLDIGIASVGWAILGENRIIDLGVRCFDKAETAKEGESLNLSRRMARLMRRRLRRRAWRLTKLARLLKRVGLIADVGVLKQPPSKGFQTPNLWQLRVEGLDRKLGDDEWARVIYHLCKHRGFHWISKAEAKAADSDKEGGKVKQGLAGTKRLMQEKSYRTAAEMVLAEFPDAQRNKQGEYSKALSRELLCEELKELFKQQRAFGHTHADDKLETNILGNGDKKSGLFWVQKPSLSGEALLKMLGKCTFEKDEYRAAKACFTAERHVLLTRINNLRIVENGKMRGLTADERRIALWQPYQQAGDFTFKQLGSALEKHGSLLKGGYKFAGLTYPRETDEKAKNPETATLVKIPAWQELKKTLIGVGLEREWQGMADAALNGKPDLLDKIGWVLSVYKEDDEVELELGKLQLAANVIHALQTVRFDKFSNLSLLALCKILPQMENGMRYDEACKEAGYQHSMPDMQDLEAKVRYLPPFYSGREKDGRLKFNEDMDIPRNPVVLRALNQARKVVNALIRKYGSPHAVHIEMARDLSRPIDERRKIERDQADYRTKNEDARKAFASDFGFEPKGRQFEKYMLYREQQAKCAYSLAPLDLNRVLNDQGYAEVDHALPYSRSFDDGKNNRVLVLTSENRNKGNQTPYEYLDGTSDSEKWRLFESFVSGNKAYSQAKRNRLLKKDFGVKETQDFKERNLNDTRYICRFFKNYVEQYLQLHEESDAKRCVVVSGQLTSLLRFRWGINKIRSESDRHHALDAAVVAACSHGLVKRMSDYSRRKELGQVRDRIEKVDKKTGEIIDHFPSPWAHFRQELLARLHIDDANELRAVVENLGTYPPEALESLTPLFVSRAPQRRNSGAAHKETIYAQPEAMKEKGSVTQKVAVTSLKPADVDKLIDPERNVKLYAYLRKWLAGKDEREKRAKAIEASAGRGKEKRDLTPEEKIEIERLRALPQKPDKQGKPTGPIVRAVTMVIDKLSGIPVRGGIAKNDTMLRVDMFSKAKRYYLVTVYVFHSVAKELPSRAIVAHKDEDDWTVISEDFEFCFSMYPNDFIRISQKKETFMGYYAGCDRGSGNVNLWSHDRNSQIGKSGMIRGIGVKTAVNVEKFNVDVLGNIYPAPPEIRRELA

SEQ ID NO: 7176 - protein, 1133 aa, synthetic construct
  REGION 1..1133: note = Synthetic
MNSKQALKYSIGLDIGIASVGWALLGENRIIDLGVRCFDKAETADKGESLNLARRSARLLRRRLRRRAWRLTKLARLLKREGLISDVNILKQPPAKGFTTPNLWQLRVEALDRKLNHEEWARVIYHLCKQRGFHWLSKAEEKKADDDKEGGAVKKGLAGTKKLMQDKGYRSAAEMVITEFPDAQRNKRGDYSKALSRELLSTELQLLFDRQRALGNLSASSTLEDKLLERKHGLLWAQKPALSGEALLKMLGKCTFEKDEYRAPKASFTVERHVWLTRLNNCRLIIDGEKRALTPAERVLAIQLPYDQSSDFTYKQFRKALVKAGLTNEFRFAGLVYPSQSEQEKAKDPEDEKLIKLPAWQQLRKAMKEANLESEWQKIAVDALDGKAQLYDEIARVLSIYKEDEEVERELNKLDLPNKSCMVEVLQTVRFEQFSNLSLKALYNILPHMEKGHRYDEACLAARYHHSQLHHTGTDEFQYLPLFYSGRDRDGRLKFNEDLDIPRNPVVLRALNQARKVVNALIKKYGSPDQVHIEMARDLSKSFDDRRDIKKAQDEYRDRNEKDRTTFNLEFNTTGELKGRDFEKWQLYREQHGKCAYSLQALDINRLFEMGYAEVDHALPYSRSYDDSKSNRVLVLAAENRNKGNMTPYEYLGGAQNNLRWLEYVAFVNSNKTYRQAKRNRLLRKDFGEEAAREFSERNLNDTRYICRFFKNYIERYLKLADTSDSKRCVVVNGQLTSFLRARWGLVKVRADSDRHHALDAAIVAACSHGMVKRLADYSRRKELETAREGFVDITTGEVANHAMYTQLEQHFPFPWLHFRQELQARLFADDLPALRNELQNMGYGADALENVKTLFVSRAPQRRNSGAAHKETIYGQSEKLAKTGSVTQKIAVTDLKLSDLDKLIDPHRNQKLYAEITKWLKGRDDREKRAKEIEASLGRGKDKRETTSEEKAEIEGLRALPRKPTNDDTPGPVVRTVTAVIDKLSGIPIRGGVAKNDSMLRVDVFSKAGKFHLVPVYVHHRVTGLPNRAIVANKEEGDWSLVDETFDFCFSLYPNDFVRITLKNELREGYYSGCDRATASVSLWVHDRNASVGKDGLVRSIGVKTALNVEKFNVDVLGNIYPAPKETRNDLA

SEQ ID NO: 7177 - protein, 1130 aa, synthetic construct
  REGION 1..1130: note = Synthetic
MNQAANDTPPINQFLTLGLDIGIASVGWAVLNEARIVDIGVRCFDKAETAKEGESLNLARRQARLLRRRLYRRSWRLTKLGRLLKQQGLIDSAAFFKQLPSASVTTWQLRVEALERLLSNQEWARVIYHLCKHRGFHWASKAEEMQAEGDAKGEGGRVKKGLADTAAKFASKGYRTAAEMVLAEFPHAQRNKRGEYDKALSRVLLDKEFALLFEHQRRFGNPYASADFEARVRGDGDRKSGLFWNQKPALAGADLLKMLGHCTFEKAEFRAPKASFTAERHVWLTRLNNLRVIVDGASRALTQDERALALLLPYQTEQFKYKTLKTALVKAGHIPDTARFGGLAYPSEAQKEAGKTKDPEDQPLVKLPAWHDLRRALNKAGLQDAWRQISVAALDGRPQWLDSVGWVLSVYKDDAEVERELAALALPQAQAVIPVLLGLRFDKFHALSLKALLQIVPHMERGLRYDEAVAQIGDYGHHSQRVVLGTGTNRYLPSFYKDERSSTGSMVFRDDIDVPRNPVVLRALNQARKVVNAIIKKHGSLSAVHIEMARDLSRPLDERREVKKLQEEFRDRNDKARESFEQDHGYRPKGIVFEKWMLYREQHGKCAYSLEGLDIDRVLNDANYAQIDHALPYSRSYDDSKNNKVLVLTRENQNKGNRTAYEYLTSFAGGEDGDRWRNYAAWVNSNKSYRMAKRNRLLRKNYGPEEASGFKDRNLNDTRYICKFFKNYVEEHLQLAPRADGNANKRCVVVNGQLTAFLRARWGLSKVRSESDRHHALDAAVVAACSHAMVKALADYARNREVAYLKEGFPDPETGEILNPEAHARGVQHFPEPWAHFRHELQTRLYTDELQALREDLQRLGTYSAQDLLEVRTLFVSRAPQRRNDGAAHKETIYAQPESLRKQGGVVQKVPLASLSLKDLDNLADPHRNAKLYAAIRARLEAHGGKSDKAFGPDQPFYKPGKSGDPTGPIVRTVKLVIDKLSGIPVRGGIAKNDTMLRVDVFTKAGKFHLVPVYVHHRVTGLPNRAIVAFKDEEEWTLVDESFEFLYSLFPNDLVRVQQKGKAALTGYFGSCHRGTGNINLWLHDRNTVSTKVGAIEGIGVKTALSFEKLNVDVLGHIHPSRPEQRHGLA

SEQ ID NO: 7178 - protein, 1129 aa, synthetic construct
  REGION 1..1129: note = Synthetic
MIREDGMGDKTSQNLAFGLDIGIASVGWCVLDDERIIDLGVRCFDKAETADKGESLNLARRMARLMRRRLRRRAWRLVKLARLLRREGLIDRIEAVRRPSSISPWKLRVEGLDRRLEPIEWARVIYHLVKHRGFHWISRAEEKKAEGDKKEGGRVKQGLSDTQRRMAEKGYRSAAEMVLAEFPDAQRNKAGEYSKALSRTLLADELALLFRRQRELGNPHAGAPLEEKILGRGDRKSGLFWEQKPPLSGADLLKMLGRCTFERTGGPDGKGEYRAPKASFTAERHVWLTRLNNLRIVVDGRTRALNETERQLVLPLPYQRAGDFKYEHLRAALTKAGLANFSFAGIAEEKEKEVLVKLPAWQTLRKTLKDKGLQTEWESMAGQAMAGDPTLLDEISLVLSVFKDGAEVETELRKLDLPGGEKMIEALSEISFDKFHNLSLKALRKIVPQMEKGLRYDEACQVVGYHHSQPQAAETRKDIYLPPFYLGREKNGRLTLNEELDIPRNPVVLRALNQARKVMNALIRAYCSPHEVHIEMARDLSRPSDERNKIKKAQEEYRERNEKDKAVFADEFGIPAKSREFEKFQLYREQQGKCAYSLQALDLQRVIFDPGYAEVDHALPYSRSFDDSKNNKVLVLGEENRNKGNRTPYEYLTSFTGGEQGERWRNFVAYVEANKNFRLAKRQRLLRKDFSSTAAEEFRERHLNDTRYICRFFKNYVERHLKLTPKVGADGTALTEAKRCVVVNGQLTAFLRARWGLLKVRSDSDRHHALDAAVVAACSHGMVKRLADYARSHELENLRLGFPDPETGEILDPAMFARLTAHFPEPWPHFRQELEARLFIDDEQALRERLQAFGTYPAEALANVRPLFVSRAPQRRGSGAAHKDTIYGQPERLKAKGSVTQRVPLSSLKLADLDKLIDPHRNEKLYAAIRARLEAHGGKGDKAFPSDNPLRKPDRDGKPTGPIVRSVTMVIDKLSGIPVRGGIAKNDTMLRVDVFRSKKDGKFHLVPVYVHHVAIFKRTGELPNRAIVAFKDEEEWTLIDEADFDFLFSAHPSDLLRVKLKGEVLTGYFAGCDRSTGNIGLWAHDRNASVGKDGFIRTGVKTASGFEKFHVDVLGNVYPAPKEARRGLA

SEQ ID NO: 7179 - protein, 1126 aa, synthetic construct
  REGION 1..1126: note = Synthetic
MRRERMSDKSPMNLGPLTFGFDIGIASVGWAVLGENRIVDLGVRTFEKAETADRGEPLNLARRTARLMRRRLYRRAWRLTKLARLLKREGLIPAADFFKSQPGFVDSTWSLRKQGLDRKLEPIEWARVLYHLCKHRGFHWFSKAEEAKAEADAKGEGGKVKQSLSRTNAIMQEKGYRTAAEMVLAEFPDAQRNKQGSYEKALSRVLLDQELGALFAAQRSLGNPHAGEALEKAIRGTGDRRSGLFWEQRPMQSVLSMLGKCTFEKDEFRAPKASFTAERHVWLTRLNNLRVIVDGESRPLNEAERRHALPLPYQAGEKYTYKNLRTSLVRSGLLPDTFRFGGLSYPSEAQKEAGKAKDPEEQILVRLPAWHALRLHLKKVGLEAEWQQMSDAALEGQPDLLDDIAWVLSVYKDDADIRAELAKLPLPGGDRMIEALMALSFDKFHALSLKALRKIVPLMELGLRYDQAVEQIPEYGHHSQRFVAGGGEHKYLPPFYESRRTKDGSMELRKDLDVPRNPVVLRALNQARKVCNALIKEYGSPASVHIEMARDLSRPLDERRDIEKLQKEYRDRNDAERQRFIEEFGRKPTGVEFEKWMLYREQHGKCAYSLEPLELDRVINDPSYVQIDHALPYSRSYDDSKNNKVLVLTRENQNKGNRTAYEYLTSFPGGEDGDRWRQFKSWVETNKSYRQAKRNRLLRKNYGPQEAQGFKDRNLNDTRYICRFFKNYVEQHLQLASDSTAQRCVVINGQLTSFLRARWGLLKIREESDRHHALDAAVIAACSHAMVKRLADHARRKELEYLRQGFPDPETGEVLDPGAHQHLSERFPEPWPHFRHELEKRLKIDSVEELRAEMARLGTYPPEALQALRPLFVSRAPQRRNGGAAHKETIYAQPERLKAKGSVTQKVPLSSLTLKDLDKLADPHRNEKLYAAIRARLEAHGGKGDKAFPPNDPLRKPDKEGNPTGPIVRSVKMVIDKMSGIPVRGGIAKNDSMLRVDVFAKDGKYFLVPVYVHHRVTGLPNRAIAAFKDESEWTLIDQSFEWCFSLHPNDLVCVHLKKERLTGYYAGCDRSGGTINIWAHDRNAGIGKDGLIRGIGVKTAIKVEKLHVDLLGRIYPAPPEKRRGLA

SEQ ID NO: 7180 - protein, 1123 aa, synthetic construct
  REGION 1..1123: note = Synthetic
VTPYCSNGSHPGKLHGVILRTLNIELQIMSAAYILGLDIGIASVGWCVLGETHIIDLGVRAFDKAETAKEGESLNLARRNARLMRRRLFRRAWRLKKLARLLKSEGLIADAKAFQPEHAFTRPLWQLRVDGLDRRLNDEEWARVIYHLCKHRGFHWISRAEAKQAEGDSKSEGGRVKQGLAGTAKLMAEKGYRSAAEMVLGEFPEAQRNKQGEYTKALARELLAKELALLFEKQREFGNPHASSTLQTAILGNGDKKSGLFWQQKPALAGAHLLKMLGTCTFEKGEYRAPKASFTAERHVWLTRLNNLRIVTDGVTRQLTEQERQLCLPLPYQQAGDLTYKQLGTALIKAGLLEAGSFKFTGLAYPTEAQKAEGKAKDPESATLIKIPAWQELRQTLSKAGLDDEWKKLSGDALCGQPEIFDQIAWVLSVYKDDDEVCAELAKLPLPNHDALIDGLLNIRFDKFHALSLKALRAIVPPMEKGLRYDEACLEAGYHHSQLHKVGEGEHKYLPPLYAGRDKDGRMLFAEDADIPRNPVVLRSLNQARKVVNAIIRRYGSPAAVHIEMARDLSRPLNERNKIKKEQDEYQARNQRDREQFIELFGHPPKGLEFEKWRLYREQNGQCVYSQKPLAPSGNVAEIFLEGSTEIDHALPYSRSFDDSKNNKVLVLTRENRDKGNRTPYEYLGGAENSERWQRYVAFVEANKAYRLAKRTRLLRKDFGAKEAEEFRERNLNDTRYICRFFKNYVEQHLKLAEGSEAKRCVVISGQLTNFLRARWGLLKVRSDSDRHHALDAAVVAACSHSMVQRLSNYSRTRELEQVRDGFVDIETGEIVNPAMHQQLREHFPDPWPYFRHELEARLKIDSPELLREEMARLGSYSEEELATLKPLFVSRAVQRRGSGAIHEETIRSSKRIANNQSHVRVSLQKLKLASLSNIVGAGDPRNASLIDLLQKRLIEFKDDAKRAFAEPIFKPSCDGNGPQVKTVKLISTQKGGMKVRGGVAELGDMLHVDVFRDGKRILIEPAYMAHNSARIAPSSIPDSAEFLFSLTKNDLVAVALGDVTYQGYFVMYESDGRLTLRAHDQPKPDKDYFRKSVASAKRIQKFHVDTLGNIYPAPPEKRRGLA

SEQ ID NO: 7181 - protein, 1122 aa, synthetic construct
  REGION 1..1122: note = Synthetic
VSHNKTPESLVFGFDIGIASVGWCVLSDTRIVDLGVRCFDKAETAKDGEPLNLARRIARLMRRRLRRRAWRLVKLARLLKREGLIAHLDEVRSPAPVSPWRLRVEGLDRRLTSEEWARVLYHLCKHRGFHWLSRAEEKKAEGDKKEGGKVKEGLANTQRRMKEKNYRTAAEMVLAEFPDAWRNKAGAYDKSLSRALLADELALLFQRQRELGNPHAGTALEAKILGTGNRKSGIFWEQKPPLSGEALLKMLGRCTLERTGGPDGKGEYRAPKASFTAERHVWLTRLNNLRLVVDGVTRPLTEAERQIILPLPYRQAGDFKYEHVRKALTKAGLGDFTFAGVNEDKEKDVLVKLPAWQTLRKAMKDKGLETEWEGLAGRAIGGDPAMLDAIAWVLSVFKDGAEVEAELAKLNLPGGEKMIEALSEVSFDKFHNLSLKALRKIVPHMEGGLRYDEACQAAGYHHSQPQAGEGKKSRFLPPLYSGRDKDGRMIFNDRLDVPRNPVVLRALNQARKVMNALIREYGSPAAVHIEMARDLSRPFDERNKIRKAQEEYREKNEKDKAAFAAEYGIAAKSREFEKFQLYREQQGKCAYSLKPLDLHRVIFEPGYAEVDHVLPYSRSFDDGKNNKVLSLTEENRNKGNRTPYEYLMAIDPSGERWREFAAFVEANKNYRLAKRQRLLRKDFTGKAAEEFRERNLNDTRYICRFFKNWVENHLQLAEKVEADGTVLPVAKRCVVLNGQTTAFLRARWGLLKIRSESDRHHALDAAVVAACSHSMVKRLADYSRRRELENLRAGFPDPETGEILDPAMFQRLAEHFPEPWPHFRQELQARLFVDDAEELRTRLEVFGTYSKEALAAVRPLFVSRAPQRRNGGAAHKDTIYAQPERLKAQGGVTQRVPLASLKLADLDKLIDPHRNEKLYAAIRARLEAHGGKGEKAFPPDNPLRKPDRDGNPTGPIVRTVTLVIDKLSGIPMRGGIAKNDTMLRVDVFRHKKDGKFHLVPIYVHHAAIYRRTGELPNRAIVAFKDEEDWTLIDDQNFDFLFSAHPNDFLRIALKQEVLSGYFASCDRSTGNIGLWAHDRNSGVGKDGFIRTGVKTATAFEKFHVDVLGNLYPAPKEVRRGLA

SEQ ID NO: 7182 - protein, 1120 aa, synthetic construct
  REGION 1..1120: note = Synthetic
MQKDFPTDKPQQSMNTLTFGFDIGIASVGWAVLAENRIVDLGVRAFDKAETPDRGEPLNAARRAARLTRRRLFRRAWRLTKLARLLKREGLIPDVHFFKSQPGFRDSPWMLRKEGLDRQLSPVEWARVLYHLCKHRGFHWLSKAEEARADQDAEGGRVKKALMHTQALMNDKGYRTAAEMVLSEFDTCRNKQGSYDKALSRALLDEELGRLFEAQRQLGNPHASAELERAIRGTGDRRSGLFWEQRPPQSVLSMLGRCRYERTGGPDGKGEYRAPKASFTAERHVWLTRLNNLRIVVDGEIRPLTDRERQRVLDDPYRAAERYTYKSLRKALLRDGELTHDFRFAGLSYPSEQQKVDQKVKDPEDQILVRLTGWHTLRLHLKNSCLATEWQILADDALSGKPDQLDQIAWALSVFKSDDEVRAELSRLALPGGERMVEALLSLNFDKFHALSLKALRKIVPLMEQGLRYDEAVERIPEYGHHSNRPRENTGKQKYLPPFYEGTRTESGSMRIREGLDIPRNPVVLRALNQARKVCNALIREYGQPSEVHIEMARDLARPADERRAIQKLQEEYRERNEAERLQFAETFGRKPSGAELEKWLLYREQHGKCAYSLEPLDLARVIKDPGYVQVDHALPYSRSFDDSRNNKVLVLTRENQNKGNRTPYEYLTSFPGGEEGDRWRHYKAWVEANKSYRQAKRNRLLRKHFGAEEEQAFKDRNLNDTRYICRFFKNYVEEHLQLASDSTARRCVVLNGQLTAFLRAKWGLLKIREQSDRHHALDAAVIAACSHAMVKRLADYARKKELAYLSKGLPDPETGVVASASAHDALSHAFPEPWPHFRHELEKRLTIESVDELRSEMKRLGTYPPEALESLRPLFVSRAPQRRGVGALHKDTLYSPRPLLEKNSEPGKQKNCTIVRKNVLELKLSDLQNIVGKEDPRNASLIKAIEDRLVAHGNDGKKAFATPLFRPSADGKKAPIVRTVRLYKTKETGAFVGTGVADLGEMLRVDVFRHERRYVLIPAYAMPLDKRINKNQPPDGAEFLFSLTKNDLVEVTIGSTTTRGYFVMFESDGRLTLRRHDQPIPDRSYFRKNIANATRLQKFHVDILGRVFLAPPEKRYGVA

SEQ ID NO: 7183 - protein, 1119 aa, synthetic construct
  REGION 1..1119: note = Synthetic
MSDKYHDEINSVPLTLGLDIGMASVGWAVLAPDRILDLGVRAFDKAETAKEGESLNKVRRDARLMRRRLQRRAWRLTKLARLLKQEGLIPDIKLFKTQQPFTQSLWQLRVQGLDRLLSNEEWARVIYHLCKHRGFHWISRAEEKALESDSKGEGGKVKRGLAKTKQLTQEKGYRTAAEMVLTEFPGAQRNKAGDYGKALSRTLLADELKMLFRCQRKLGNPYSRIELETKILGNGDQKSGLFWQQNPALAGDALLKMLGCCTLEKMEYRAPRASFTAERHVWLTRLNNLRIILDGVIRPLNLQERTAVLLLPYQQTSDFTYKQLRNALQKIGLSDSFRYAGLAYPSEKQNGDGKAKNPEDEKLIRLPAWQTLKKVLKDEGLEAEWQQISTAALEGHPELLDQIARVLSVYKEEQEISGELEKLDLPNKTRMIEALSEISFKEFHALSLKALYKIVPLMETGLRYDQACEQAGYHHSQLPAVIKDKYLPPFYAGRTKDGRMIFNKDRDVPRNPVVLRALNQARKVVNAIIRKYGLLHSVHIEMARDLSKPFNERKKIEKAQGEFRERNDKDKAQFTEEFNFVSTPKGKEFEKYQLYREQQGKCAYSQEPLDIHRALFEQGYAEIDHALPYSRSFDDSKNNRVLVLSRENRNKGNMTPYEYLDGKNNSERWRQFVAFVESNKAYRQAKRNRLLKKDFGEEDAKDFRERNLNDTRYISRFFKNYIERYLQLHEDSEAKRCVVVNGQLTAFLRARWGLNKSRQESDRHHALDAAVVAACSHGMVKRLADYSRNRELDQVHAGFIDMTTGEVVDSAMLRKLEVHFPSPWPHFREELKLRLQVDDPSLLRKEIEKFATYPPETLTTLRPLFVSRAPQRRNGGAAHKDTIYSQPKQLQEIGRAAQKVPLSSLTLSDMDKLIDPHRNEKLYTAIRTRLEQHGGKGDKAFPPDKPLRKPGRKGDLNGPVVRSVKLVDKLTGIPVRGGIAKNDTMLRVDIFTKAGKFHLVPVYVHHKVAKELPSRAIVAFKDENEWTLIDDSFTFCFSLYPNDLLKIKLKKETQFGYFAGCDRSTGAIQLWAHDRSQNVGKDGLIRGIGAKTALSIEKFHVDVLGHIFPAPKEKRCGLA

SEQ ID NO: 7184 - protein, 1118 aa, synthetic construct
  REGION 1..1118: note = Synthetic
MQNKKNLGPLAFGLDIGIASVGWAVLGENRIIDLGVRCFDKAETADKGESLNLARRMARLLRRRLRRRAWRLTKLARLLKREALIHDVSVLKQAPSAGFKTPDLWRLRVAALERKLEPEEWARVIYHICKHRGFHWLSKAEEKAAESDKEGGAVKKGLAGTKRLMQEKQYRTAAEMVISEFPDAQRNKRGDYSKALSRLLLDDELRILFDRQRSLGNPHTSETFEQALRDRQTGLLWAQHPALSGENLLEMLGECTFEKPEYRAPKASFTVERHVWLTRLNNLRLIVDGERRALNEAERHRVLNLPYEQSSDFSYKQLRKALEKAGLTADFRFAGLVYPNANQEQHKTKDPEEEKLVKMPAWQTLRKSMKEAGLEEDWRQVTVAALDGKPQLYDEIARVLSVYKEDEEVERELNKLDLPNKDDLIQALLTVRFDKFSNLSFKALYRILPYMEKGQRYDEACIEAGYHHSQPQQSIDHNYKDIYLPPLYEQHRGKEKHNKNKMIFSKKIEREIQGGIPRNPVVLRALNQARKVVNALIKIYGSPHEVHIEMARDLSRPLDERRKIEGEQKAFRDVNEQERERFVKDFGRQPSGREMEKWLLYREQDGQSPYSQKPLAPFGDVAEIFSDNTTQIDHVLPYARSYDNSRNNKVLVLTKENQEKGNRTPFEYLNGSNENIMWHNFVGWVTSNKKYRSAKRNRLLKKDFGEDEEQSFRERNLNDTRYICRFFKNYVEKYLKLADCDKVKRCVVVNGSLTSLLRARWGLGAKKRDTNDRHHALDAAIVAASGHLTVQRLATFVNEQNWTQRKNETTGHMEYVNTKTGEVLPVSDFVKLDEVLRLFPHPWSHFRQELLTRLNEDNLAVLRKELKQLGNYSLEELEKLRILFISRSPKRRNGGALHEATIRSPKRLNQGISYVKVPLQQLTLAKLKGIVGATYSRNAPLIALLRERLEQYGNDGKKAFADPVHKPSKTGKGSLVKSVKVASTQNNGVMLDNGIAELGDMHHVNVFKNGDRYLIEPIYQIFTNRLMKPLQIPSEAEFLFTLNKNDYIKLCLGGVSYEGYFVMYESDGRLTLRAHDQPKPDKDYFRKSVTSAQYIQKFHVDILGNLYPALPEKRRDLA

SEQ ID NO: 7185 - protein, 1117 aa, synthetic construct
  REGION 1..1117: note = Synthetic
VQTKNLLYTLGLDIGIASVGWCVLGENRIIDLGVRCFDKAETPDRGESLNKVRRDARLMRRRLRRRAWRLTKLARLLKHAGLIDSTRIVRDRHDGAVSPWQLRVEGLDRKLAPEEWARVIYHIVKHRGFHWISRAEERKAESDKGEGGKVKQGLSATKQLMVEKNYRSAAEMVLTEFPGAQRNKRGEYTKALSRILLAAELTTLFERQQELGNPHAGPDLQTKILGNGDRKSGLLWMQKPPLSGSALLKMLGKCTFEREEYRAPKASFTAERHVWLTKLNNLRVLVDGVTRPLSDPERRLALSLPYQQASDFTYKQLRAALCKNGLLPDSFQFSGLAYPTGAQQPDGKAKNPENDRLVKLPAWQEFRKTLRDAGLETEWESIAGMAAGGQPDLLDQIGWVLSVFKDGDEVLRELRKIPLPGGEKMVQALSGVSFDTFHNLSLKALRKIVPHMEAGLRYDEACLAAGYHHSDLRKDTDERSLYLPPLYSGRTTDGRMVFRDDIDVPRNPVVLRAINQARTVVNSVVRRYGSPSSMHIEMARDLSRPWDERNKVKRAQEEYRDRNEKLKIDFAAEYGIEPKSREFEKFLLYREQGGKCAYSLKPLDLDRVLRDLGYAEVDHALPYSRSFDDSKNNKVLVLAEENRNKGNRTPYEYLDGTSESPRWREFKAFVETNKAYRLAKRARLLRKDFSGKGSEEFRDRNLNDTRYISRFFKNYVERFLKLAEESEERTCVVLSGQLTAFLRARWGLAKVRGDSDRHHALDAAVIAACSRSMVKRLSDYARRHELEKVRTGFVDFETGEIVDAGKYRQIERDFPSPWPYFRDELLTRLNTDDPAELRERMQSLGSYPPEALETLRPMFVSRAPQRRNGGAAHKDTIYRQTERLKKVGSVTQKVPLAALNLRDLENLVDPHRNEKLYAAIRARLEAHGGKGEKAFPPNNPLRKPDRDGNPTGPIVRTVTLVIDKMSGIPVRGGVAKNDTMLRVDIFRSKKDGKFHLVPLYVHHAVAKQLPTRAVIAYKDEGEWTPINNHDFDFLFALYPNDLVRITLKKERHFGYYAGCNRATGAVSIWAHDRNQRIGKDGFIDGIGVKTALSVEKFHVDTLGNVYPAPPETRRGLA

SEQ ID NO: 7186 - protein, 1116 aa, synthetic construct
  REGION 1..1116: note = Synthetic
MGATYTIGLDIGIASVGWCVLGETHIIDLGVRAFDKAETAKEGESLNLARRNARLMRRRLFRRAWRLKKLARLLKSEGLIADTKTFQPEHAFTRPLWQLRVGGLDRRLNDEEWARVIYHLCKHRGFHWISRAEAKQAEGDSKSEGGKVKQGLAGTARLMAEKGYRSAAEMVLGEFPDAQRNKQGEYTKALARELLAKELALLFARQREFGNPHASSALETAILGNGDKKSGLFWQQKPALAGADLLKMLGTCTFEKGEHRAPKASFTAEHHVWLTRLNNLRIVTDGVTRQLTEQERLRCLPLPYQQAGDLTYKQLGTVLTKAGLLEAGSFKFTGLAYPTEAQKAEGKAKDPESATLIKIPTWQELRQTFTKADLDDEWKKLSVDALCGQPEILDQIAWVLSVYKDDDEVRAELAKLPLPNRDALIEALLNIRFDKFHSLSLKALRAIVPHMEKGLRYDEACVEAGYHHSQLHKVGEGEHKYLPPLYAGRDKDGRLRFAEDTDIPRNPVVLRSLNQARKVVNAIIRRYDSPAAVHIEMARDLSRPFDERNKIKKDQDEYQARNQRDREQFIELFGHPPKGPEFEKWRLYREQNGQCAYSQKPLAPSGNVAEIFLEGSTEIDHALPYSRSFDDSKNNKVLVLTRENRDKANRTPYEYLGGAENSERWQRYVAFVEANKAYRLAKRTRLLRKDFGTKEAEEFRQRNLNDTRYICRFFKNYVEQHLKLAEGSEVKRCVVVSGQLTNFLRARWGLLKVRSDSDRHHALDAAVVAACSHSMVQRLSNYSRTRELEQVRDGFVDIETGEIVNLAMHQQLRKHFPDPWPYFRHELEARLKIDSPELLREEMSRLGSYNEEELAALKPLFVSRAPQRRNGGAAHKDTIYGQPEKMKRTGGVTQKIPLSSLTLRDLDSLADPHRNVKLYEAIAKRLEAHGGKGDKAFPPSKPLRKPDKEGNETGPVVRTVTKVIDKLSGIPIRGGIAKNDTMLRVDVFTKAGKFHLVPVYVHHRVTGLPNRAIVAFKDEEDWTLVDESFEFLFSLHPNDLVRIHQKGKQPILGYYASCHRGTGNLNVWTHDRNTVVGKDGMLEGIGVKTALTLEKLHVDTLGNIYPAPPEKRRGLA

SEQ ID NO: 7187 - protein, 1116 aa, synthetic construct
  REGION 1..1116: note = Synthetic
METRYTLGLDIGIASVGWCLLGEDHIIDLGVRAFDKAETAKEGDPLNLIRRQARLARRRLAQRAWRLKKLARELKRHGLIADKRLFHPENPAVVSPWTLRVEGLDRLLAPEELARVIYHLCKHRGFHWISRAEAKQADGDAKNEGGKVKQGLAGTKRLMEEKGYRSIAEMVLAEFPDAQRNKRGEYTKALSRVLLGDELRKLFAEQGRLGNPLASESLEAAILGSGDRKSGLFWMQKPPLSGAALLKMLGKCTFEKDEYRAPKASFTAERHVWLTRLNNLRIVFDGETRPLNAQERAIALPLPYQQVSDFTFKQLHSALVKGGLLPDSFEFAGLRPTKDGKDPKSEKLVKLPAWQELRTTLKTAGLETEWEGLAGAACRGQPEILDEIARVLSIYKDDDEARAELNKLSLPNHEKMVESLLDIRFDKFHALSLKALYKIVPHMEGGLRYDEACAEAGYHHSQLHKPEDKKELYLPPLYENHRGKEPGEVDKMIFSERIERETLGGIPRNPVVLRALNQARKVVNAIVRRYGSPLAVNIEMARDLSRPLDERNKIKKDQDEYRARNERDKALFTEEFGQTPKGGEFEKFRLYREQLGKCVYSLDAIDLERLLEPGYVEIDHALPYSRSFDDSKNNKVLVLARENRDKGNRTPYEYLGGAENSLRWQQFVAFVESTKAYRLAKRSRLLRKEFGVKDAEEFKERNLNDTRYICKFFKNYVERYLKLAEGSEAKRCVVLSGQMTAFLRARWGIHKIRSESDRHHALDAAVVAACTHGMVKRLADYSRTRELTQVHTGFVDTTTGEIVDPAMFRQLKQHFPEPWPHFHHELEARLKIDDESVLRNEMTHLGTYDAAALDELRTLFVSRSPQRRNGGAAHKDTIYGQPEIMREKGSVTQKVPLASLTLKDLDKLIDPHRNARLYDAIRERLEAHGGKGEKAFPADKPLRKPDRDGNPTGPIVRSVTKVIDKLSGIPVRGGIAKNDSLHRLDVFTKTSKFYLVPSYAHHRVAKALPNCTADGETQVDDSFQFQFSIHPNDLVRVALGGGESIIGYFKGYGGPPNPSNITLQVHDRNKNGHRRANDKGEIPSIGVRTALALEKFHVDVLGNIHPAPPEKRRGLA

SEQ ID NO: 7188 - protein, 1112 aa, synthetic construct
  REGION 1..1112: note = Synthetic
MMGGFMSTPYTLGLDIGIASVGWCVLGEQHIIDLGVRAFDKAETAKEGDPLNLTRRMARLARHRLAQRAWRLKKLARELKRHGLIDDKRFFQPTNPTAVSPWQLRVQGLDRKLEPDEWARAIFHLCKHRGFHWVSRAEEKQAEDDAKSEGGKVKQGLAGTRRLMTEKGYRTTAEMVLSEFPDSQRNKQGEYTKALSRVLLGDELSRLFVEQRRLGNPQATPELEIIILGKGDRKSGLFWQQKPPLSGADLLHMLGKCTFEKSEYRAPKASFTAERHVWLTRLNNLRIVIDGITRPLNDAERAIAMPLPYQQTGDFTYKQLAAALNKAGLLPKEGFRFTGLSYPSEKQKTEGKAKDPEGGALVKFPGWQQLRSTLKNAGLETEWEGLAATAFDGQPEKLDEIAKILSVYKDDDEARTELAKLPLPSRERMIEALLDIRFDKFHALSLKALYKIVPLMEKGMRYDDAVAAIPEYGHHSQLHKPGEGQHKTLPPLYAGRDKDGRMVFADDPDIPRNPVVLRALNQARKVVNALVRRYGSPMAVNIEMARDLSRPLDERNKIKKEQEEYQARNERDKALFVEEFGQPPAGGEFEKFRLYREQLGKCAYSQQAIDLGRLLEAGYTEIDHALPYSRSFDNSKNNKVLVLTRENRDKSDRTPYEYLGGATNEPRWLQFVAFVESNKAYRLAKRSRLLRKDFGPKESEDFKERNLNDTRYICRFFKNFVEHHLKLDARSDAKRCVVLSGQMTAFLRARWGINKIRSESDRHHALDAAVVAACTHGMVKRLADYAKNRELAPVRGGFVDASTGEIVGKQYFPEPWPHFHHELEARVKIDDLELLREEMTRLGSYDDAALDALRPLFVSRAVQRRNGGAAHKDTIYAQPERLCATGGVTQKVPLGSLTLKDLENLVDPHRNEKLYAAIRARLEAHGGKGDKAFPASDPLRKPDREGNPTGPIVRAVTLVIDKLSGIPVRGGIAKNDTMLRVDVFTKAAKFHLVPVYVHHRVKGLPNRAIVQAKDESDWNLIDDSYEWLFSLHPNDLIRITQKGKTPIVGYYAGCDRATGNLAVWIHDRNSAVGNDGLIRGIGVKTALNVEKFHVDILGNIFPAKPEPRRGLA

SEQ ID NO: 7189 - protein, 1110 aa, synthetic construct
  REGION 1..1110: note = Synthetic
MADKPWTINLGPLTFGFDIGVASVGWCVLGTSRIIDLGVRCFDKAETADRGESLNLARRTARLMRRRLRRRAWRLTKLVRLLNQAGLIDDTQALQRPAETSPWQLRVEGLDRKLDPNEWARVLYHLCKHRGFHWISKAEQKKAESDSAEGGRVKQGLADTKHRMSEKNYRSAAEMVLTEFPEAQRNKQGEYNKALSRLLLGDELILLFERQREYGNPHATPDLEARIAGNGDRKSGLFWEQKPPLSGNDLLKMLGHCTFEKSEYRAPKASYAAERHVWLTRLNNLRIIIDGNARPLNEAERQAALPLPYKQVGDFTYKQLKSALIKHGLIPDDTKFAGLSYPIQQGESKTKDPESERLIRLPAWQELRKVLKDAALETEWQSIASQPDLLDQIAWTLSVFKDGDEVERELRKLPLPGAERMIEALSGISFDKFHNLSFKALRKIVPHMEAGLRYDEACVQAGYHHSQLFKTGEGQNKFLPPFYSGRDKDGRMVFDDKEDIPRNPVVLRSLNQARKVLNALVRKYGSPSAVHIEMARDLSRPMDERSKVKKAQDEFRERNEKDKLRFAEDFKIPAKGREFEKYQLYREQHGKCAYSLEALDLDSVLQEPGYAEVDHVLPYSRSYDDSKNNKVLVLSRENRNKGNRTPYEYLDGENDSARWHTFVAYVEGNKSYRLAKRSRLLRKNFGKEESRDFMERNLNDTRYICKFFKNYVERHLQLAEGGDKRCVVLSGQLTSFLRTRWGLIKVRSDSDRHHALDAAVIAACGHGLVKRLSDYSRRKELEQAGNVIDIETGEIRDSVLLAKLQQHFPKPWEFFREELLIRLNQDNLTLLRDEAERLAYPREARDALRPLFVSRAPQRRNSGAAHKDTIYRKAPTKDAPQRVTEKVKLSDLTLKDMEKLSDPHRNEKLYAAIRARLEAHGGKGEKAFPPNNPLYKPDREGNPTGPIVRTVTMVNEKLSGIPIRGGVAKNDTMLRVDFFRHKKDGKYHLVPVYVHHVVAKELPNRAIVAYKDEGEWTPIDEQNFDFEFSLHPNDFLRVSLKNETQQGYFAGCDRSTGAIGLWAHDRNVAIGKDGLIRGVGVKTALHVEKFHIDILGNIYPAPPEKRRGLA

SEQ ID NO: 7190 - protein, 1109 aa, synthetic construct
  REGION 1..1109: note = Synthetic
MPGQFMQHAYTLGLDIGIASVGWCLLGENRLIDLGVRAFDKAETAKEGDPLNLTRRMARLARHRLAQRAWRLKKLTRELKRHGLIEDKRHFQPSNPAEVSPWKLRVEGLDRKLNRDEWARVIYHLCKHRGFHWVSRAEEKQAEGDAKGEGGRVKRGLSGTRRLMEEKSYRSVAEMLLTEFPNAQRNKQGEYTKAISRLLLGEELKTLFSLQRKFGNPYTSAPLEMTILGNGDRKNGLFWRQRPALSGAALLKMLGKCTFEKAEHRAPKASFTAERQVWLTRLNNLRIVCDGVTRPLNAEERAIALPLPYLQASDLTYKQLHSALVKKGLLPESFEFAGLRAAKEGKDPKSEKLIRLPAWQELRNTLKRAGLETEWESLAGAANGGNPHTLDDIARILSIYKEDDEARTELEKLELPNRERMVEALLDIRFDKFHALSLKVLRKIVPFMEQGQRYDEACVSAGYHHSQLHAPDESKFRTLPPLYKGRDSDGRMLFAEDADIPRNPVVLRALNQARKVVNAIARRYGSPMAVNIEMARDLSRPLDERNKIKKEQDEYRTRNERDKTLFIEEFGQEPKGGEFEKFRLYREQLGKCAYSQEAIDLDRLLEAGYVEIDHALPYSRSFDDGKNNKVLVLARENRDKGNRTPYEYLGGAENSPRWQRFVVFVETNKAYRLAKRSRLLRKEFGSKEAEEFKERNLNDTRYICKFFKNHVERYLQLADGSEVKRCVVLSGQMTAFLRARWGINKIRSESDRHHALDAAVIAACSHGMVKRLADYSRTRELHQVRDGFIDTTTGEIINPAKFRQLKQHFPEPWSHFRHELESRLKTDDRMQLRADIERFGTYDDAALDALLPLFVSRAPQRRNGGAAHKDTIYAQPARFQQLGSVTQKVPLASLSLKDIDKLIDPHRNEKLYAAIRERLNAHGGKGEKAFPPDNPLRKPDRDGNPTGPVVRSVTMLIDKLSGIPVRGGIAKNDSMLRVDVFTKAGKFHLVPVYVHHKVTVLPNRAIVQAKDEGEWTLIDETFDWCFSLYPNDLVRVTQKGKQPIIGYYSSCHRGTGNLNIWVHDRNQQVGKDGMLEGIGVKTALALEKLHVDTLGHIYPAQPEPRRGLA

SEQ ID NO: 7191 - protein, 1108 aa, synthetic construct
  REGION 1..1108: note = Synthetic
MLSLYPKREMVMQSGIPSYTLGLDIGIASVGWCVLGQNRIIDLGVRAFDKAETAKEGDSLNLVRRSARLMRRRLRRRAWRLTKLARLLKRHGVIDDTRIFQPQHPFLHSLWQMRVAGLDRPLSNEEWARVVYHLCKHRGFHWISRAEERQAEADNKGEGGKVKQGLAGTAKLMQENGYRSSAEMVLAEFPKAQRNKQGDYSKALARTLLGEELALLFKRQRELGNPHTGTALELAILGNGNRKSGLFWAQKPALAGNDLLRMLGKCTFEKGEYRAPKASFTAERHVWLTRLNNLRIVVDGGTRPLNAQERQIALPLPYTYDSDFTYKRLRSALLKAGHLPESFRFAGLPYPSAAQQADEKAKDPEAAALVKFPAWQEMRRTLKKAGLETEWHGMAGAAIDGRPELLDQIAWVLSVFKDDEEVTAELRKLPLPSSEQMIDALLDIRFDKFHALSLKALRRIVPHMEVGLRYDEACAQVGYHHSQLHKAGEGEHKYLPPLYAGRDKSGRMVFSEEMDVPRNPVVLRALNQARKVVNAIVRRYGAPMAAHIEMARDLSKPIDERRKIEKNQTEYRERNDKDKALFAEHFQRMPTGIEFEKWRLYREQQGKCAYSVEPLDINRLLEQGYVEVDHALPYSRSFDDSKNNKVLVLAKENRDKGNRTPYEYLGGAESTPRWQTFVAFVESTKAYRLAKRSRLLRKDFSAKEAEEFRERNLNDTRYICRFFKNYVERYLQLAEGDKTKRCVVLSGQLTSFLRARWGLLKVRGNNDRHHALDAAVVAACSHGMVKRLSDYARRRELEKVREGFVDLETGEIVSPAMFQQLRQHFPDPWPHFRDELEARLNIDDPVQLRADMERLGSYPTEALEQLHPLFVSRAVVRREGGEIHKAKIFSIKASEVNRAFEKVPLSSLTLAKLEKMVGKDDPRNHSLYEILRERLSKFDDDPKKAFGPQQPKILKPSKDAKNAPEVRAVRVEITQNAGLLVRGGIADLGEMVCVDVLRQTDGFAVIPQYQASRSKMRGATVSSVEGNFCFSLTKNEFVEVVIGEETIRGYFVMYESDGRMTLRGHDQPQPDKRFFRKSIFKATRATKFHVDVLGNIYPARPEPRRGLA

SEQ ID NO: 7192 - protein, 1107 aa, synthetic construct
  REGION 1..1107: note = Synthetic
LRDYLIAATALTPESYNAPKFTPEETQHNMNNKSSHAYTLGLDIGMASVGAALLAQDHILALHVRTFDKAETAKEGEPLNKTRREARLTRRRIRRRAHRLLRLARCMKRMGLIERAEPQAFALKETSPWTLRAEGLDRRLEPTEWAAVLYHLVKHRGFQSTRKSEAKDDEKAGQMLSGVSANQQRMKSGGWRSVGEMAARDAAFINAKRNKGGSYTHTFARADLTDELTLLFVHQRETGNPHATPEFEAQIHDLLLARRPALAGDDLLKLVGKCTLEPGEYRAPKASYSAERHVWLTKLNNLRISEVGEQRSLTAGERQVLLDEPYKLAKLTYKQVRQKLGLIESARFNSLTYRGDKDPEAATLFEAKAYHILRKAYEAAGLKDFWQRDALDSEKLDRLAYALTCYKTDDDIRASLAEQGVEPTIAEAVLDVSFDKFVALSLKALRSILPFMEQGQRYDEAVQSAGYAHHSQLNADIAKSFALPPPDRDQIRNPVVYRALNQARKLVNAIVREYGPPAAVHIELARDLSKPIDERRRIEREQKEFQANKEKNRADFVSQFGFEPKGLDLQKYRLYREQMSQCAYSQKPVDVTRLFEPGYAEIDHALPYSRSFDDSQNNKVLVLTAENRNKGNRTPYEYLDGASNSPQWQAFEAWVLSSKSYRRAKRDRLLRKHFGENEAREFRDRNLNDTRYICRAFKRMIEDHLQWHSVSDAGNRCVVVSGQLTSLLRARWGLLKVRENGDLHHALDAAVIAAASRALVKRMADHARRDELAQVRDRYIDPETGEVLDLAALRDLEERFPTPWPHFRTELLAWLAPDPETGLADVPGYDEARRANVRPIRVSRAPTRRGLGAAHQETIRSVGREGRLLRDGQSAVKTPITSLKLKDVDNIVGAEDPRNAMWIAALRERLAQFGGDGAKAFAPNQPPLLKPSAPGKTAPAIRTVKLLATQKSGIPIRQGIANNGAMLRVDVFTKGGKFYTVPVYVADAARTEPPNRAVVAYKPEEEWPEMGESHAFLFSLHPNDWVRLSYKNGPVKEGYYSGLNRATGAIDIWVHDRNSGTVKNGLFEGCGVKTALAVEKFHVDLLGKLHRAHTETRRPLRRQKAKG

SEQ ID NO: 7193 - protein, 1088 aa, synthetic construct
  REGION 805..810: note = misc_feature - Xaa can be any naturally occurring amino acid
  REGION 1..1088: note = Synthetic
MQSKQNFGNLTFGFDIGIASVGWAVLNERRIVDLGVRCFDKAETAKEGESLNLARRNARLLRRRLRRRAWRLTKLARLLKKQDLIADVAIFKPGNPFATSLWELRKQGLDRLLTHEEWARVIYHLCKHRGFHWVSKAEEKKAEEDIKGEGGKVKQGLAGTTRLMKEKGYRTAAEMVLAEFPQAQRNKRGEYSKALSRVLLGEEFAKLFDIQRALGNPHSTAELQTKLLDRKTGLFWAQKPALAGKDLLKMLGHCTFEKTEYRAPKASFTAERHVWLTRLNNLRIVMDGITRSLNEDERRIALPLPYMQASDLSYKQLKSALVKAGLLPEAVRFTGLNYPSAAQLERDKAKDPEATTLVKIPAFHEIRKILKDAGLETEWQGLVNSAFGSDAGLLDQIAWVLSVYKDDEEVEHELNALALPNKAKVIEALLGVRFDKFSNLSLKALRKIVPHMEQGLRYDEACIEAGYHHSQLVKSDDDKLKYLPPFYSSRDKTGKLICNETLDIPRNPVVMRALNQARKVMNALIKQYGAPHQVNIEMARDLSRPLDERRDIEKLQNEFRERNQKDRDTFNAEYNSTGTLKGREFEKYQLYREQQGKCAYSIEPLDLNRLFEQGYVEIDHALPYSRSFDDSKNNRVLVFREENQRKGNKTPYEYLDGKSNSERWRQFVAFVEGTKSYRLAKRSRLLRKDFGEKESAEFRDRNLNDTRYICKFFKNYVEQFLQLAETSESKRCVVLSGQMTAFLRAHWSLTKVRADSDRHHALDAAVVAACSHGMVKRLSDYSRRKELDKVRTGFVDVTTGEIANXXXXXXVIAHILRMNLNNPCLYLERHSDAIAALPIRKLFMGSPKAKLKVARKKSQSRVPLKTWKNSSRIVMRSSTLPLRNGRAKMHVRNVPKRLKLARGAVKINALRLVKKLKLNVYVSCRANPLMTDLQGQLYARRWSISYQVFLFVEVWRKMTLCCGWTCLPRQVSFTWCQCMCIIRLLKNCLIRRLCKLKMRLSGRMIVLRFVFHCIQMIWCGWCKRVKSRYVTTAVVIEALVTLISGRMTAINVKKALLKAELKPHSHKNSMSMCATSILHKKKSGVVWR

SEQ ID NO: 7194 - protein, 1094 aa, synthetic construct
  REGION 1..1094: note = Synthetic
MQQAVSYDLGLDIGIASVGWCVLGERHIIDLGVRAFDKAETPDGESLNTARRTARLLRRRLRRRAWRLLKLSRLLKREGLITDSRLFLQQTPITQSLWKLRAEALDRQLNTEEWARVIYHICKHRGFWFASKADAEGSEGGKVKQGLERTRNLMREHGYRSAAEMMLAQFPNNQRNKRGDYGQSLSRELLADELHSLFEKQREFGNPHTNDDFKDAILNTKTGLLWQQKPALSGKEMLERIGFCTFERKKSGKNKDEYRAAKHTWSAERFVWLTRLNNLRININGESRPLSEVERKAVIDLPYEKAKLTHKQLKAHLIKLGPWPEAVRFTGLNYRDNSKDPEESKLIELTGWHTLRTTLEKAGLKTEWQGIATQPLLINAITSILSIYKTDEEIQRELTACNLTPAVINSLLAISFSDFIRLSLKALDGILPGMERGQRYDEACLAAGYHHSVLVENSASRFLPAFDEDAPNNPVVKRALNQTRKVVNAIIRQYGAPQRVHIEMARDLSRPLDERYKIEKAQSEFAERNEKDRERFSEAFGRRPTGREFEKWQLYQEQDGKCAYSLSPLDLNRLIDDANYAEVDHALPYSRSFDDSKNNKVLALTRENRDKANRTPFEYLDGASDSERWQRYAAAVNSNKKYRQAKRDRLLRQQFGKDEASGFIERNLNDTRYICKYFKNFVEQHLKLASDAKRCIVVSGQLTSFLRARWGLAKLREGSDRHHAVDAAVVAACSAGMVKRLSDYARRKETLNAKDGLIDLETGEVANLAMWRQLEQHFPRPWEHFEMELSLRAGLDRSTGKVNNTLSLELTREALAALGYDETMLSSIRPLFVSRAPQRRNSGAAHKDTIYAQRPMPAQPNRVTQKIALSALKLSDLDLDPERCGLIEPHRNVALYTALRERLEAFGGKADKAFATPFYKPTRDGSQGPIVRTVTKVIDNLSGIALRGGIAKNDSMLRVDVFTKAGKFHLVPIYVQHRIIKNVKDLPNRAIVAAKEESDWTQIDDTFSFCFSLHPNDLVRIQLKGKPAIEGYYSGCDRATGGVNLWVHDRNQAIGKDGLIRGVGVKVALSVDKFNVNVLGQVYLNQAGSRRGLA

SEQ ID NO: 7195 - protein, 1087 aa, synthetic construct
  REGION 1..1087: note = Synthetic
MALNPPLPYTLGLDIGMASVGAALLTEQRILGLHVRAFDKAETAKEGDPLNKTRRESRLTRRRIRRRAHRLLRLARLFKRTGLIAAAHPEAFALPGISPWDLRADGLNRLLTPAEWAAVLYHLVKHRGFQSTRKSEAKEDEKAGQMLSGVSANQQRMKEKGWRTVGEMAARDEAFAEAKRNKGGAYTHTFARTDLVAELKLLFKQQAGFGNPHVGVDFENDVEQLLLARRPALAGDALLKLVGKCPFEPTEYRAPKASYSAERFVWLTKLNNLRISEVGEQRALTAGERQILLNQPYLLAKFTYKQARQRLSLADTAKFTVLTYRGDKDPESTTFFEAKAYHELRKAYEKAGLESRWQRDALDPTRLDRLAWALTCYKTDDDIRAHLAEHGVEPEITEAVLGESFDKFVGLSLKALGKILPFMEQGQRYDEAVQSAGYAHHSQLNRDTTKNQYLPPPDKDQIRNPVVYRALNQARKLVNAIVREYGSPAAIHIELARDLSKPMDERRKIEREQKEFQERKAKDREAFIEQFSFDPKGLDLQKYRLYREQMSQCAYSQKAIDVTRLFEPGYAEIDHALPYSRSYDDGQNNKVLVLTAENRNKGNRTPYEYLDGASDSPQWQRFEAWVLQNKAYRRAKRDRLLRKHFGEDEAEGFRERNLIDTRYICRAFKTMVEDHLQWHADSDAKNRCVVVAGQLTSLLRARWGLIKVRENGDLHHALDAAVIAAANRSLVKRMADYSKRNELAQVRDRYIDPATGEILDIAAMRQVEEHFPSPWPHFRSELLAWLSPNPAHGLDGLAHYPPEELEHLRPMRVSRAPTRRGLGAAHQETIRSVGREGRLLADGQSAVKTPLTAIKLKDLENIVGYSHSHNHAMIEAIRKRLETNGNDGAKAFKMPLFKPSATNGYDADKSHVGETDQRAPQIRSVKLLATQKSGIPIRKGIANNGSMLRVDVFGKGGKFYAVPVYVADAARAELPYRAVAAFKPENEWPEMDEKQFMFSLHPNDWVTVKLKAETISGYFAGMDRSTGAISVWAHDRNQSIGKDGQWRGVGMKTALAVEKYHVDLLGNLHRVHTEMRLPLHGSKASKD

SEQ ID NO: 7196 - protein, 1086 aa, synthetic construct
  REGION 1..1086: note = Synthetic
MSHCDQILSDYTLGLDIGIASVGAALLGKDRIIALHVRTFNKAEDAENGESLNKIRREARLLRRRLHRRACRMKDLSSLMKTVGLIDKPFVNLQAEGALANIQAWQMRSEGLDRLLSPLEWAVVLYHIVKHRGFQSNRKSELKADAKVGKMLEGINKNYDLMKEKNYRTVGELAFKDDRFSKRKRNKHGDYSHTFKRKELLDELILLFERQRYFHNFHAHAVFEQEVINLLMKRKAALSGNALLSMVGNCTLEPNEKRCPKTSIYAERFVWLSKLNNLSINHDGLQRKLTSIEHGLLRELPFSTTSKITYKTLRKKLDLLPNEHFNGIRSIDDETKVFFEAKGFHALRKCYEQSNLTDIWLNDVNNTERLHHLAYAITCYKEDTEIKEWLLKQGIEESVAEAVLDVSFEQFIRLSAVAIKNLLPHMEKGLRYDEAVAATPQYGHHSQLLKNVKQKYLPLFDPEEIRNPVVYRALNQARKLVNAIIKKYGSPASVHIELARDLSKSFKERKRIEGEQKEFQAKKKKLEEDFVEFFGKDQLRGENLLRFRFYKEQGSKCAYSLNEIDLNRLCEDGYVEIDHIIPYSRSFDNSTNNKVLVLTRENRNKANRTPYEYLDGVDHERWQKFYDWVKASRFTLAKQKRLLMRDLDEKTSDEFRARNLSDTRYICRIFKNHIESFLQLSSNAQGSRCVVLSGQLTAYLRARWGLSKQRENGDLHHALDAAVVAAASHGMVKRLSDYSRRGQLSKLSPSSLGQYIDPETGEILDEKLFKELQIKQEFPQPWIGFRDELLARLSTNPQEKLKEHPAYSSEILTTLQPIRVSRMPTRRKLGSAHKETVRSIGKQSTLLKQELSAVKVPLINLKLKDLENIVGYKDPRNQSLILALKERLEQYGGDGKKAFSDKPFYKPGSDPSIAPCVRAIKLLSKQKNGLLVRGGIADNSDMMRVDIFKKNGKFYAVPLYVSDSSSIALPNRAATNKKLKEQWEIMDDSYQFLFSLYKNDWVKVNDKKSIREGYFVSLDIATAAITLRVHDRDIRIGKNGEIRSIGIKTAKAVEKYHVDLLGNLYQVKNEQRKPLISKKLTPLVKR

SEQ ID NO: 7197 - protein, 1083 aa, synthetic construct
  REGION 1..1083: note = Synthetic
MTTTSYTLGLDIGMASVGAALLDSDSIKALHVRTFDKAETAKEGDSLNLVRRESRLTRRRIRRRAFRLLRLRRLLKREGLLSTNDPMALIYTPATPWALRAKSLDEKLTGQELAVVIYHMVKHRGFMSNRKSELKSDEKAGQMLSGVKANQALMTEKNYRTVGEMAAKDAAYEEAKRNKGGSYTHTFARADLVYELAEVFAAQQRQGNVLATSTLHDRVHELLLQRRPTLSGANLLKMVGKCTFEPAEFRAPKASYSAQRFIWLSKLNNLKIVTSGKSVELSATQREALQNLPFTQKKLTFKQVRKVLDLPEHTRFNLLSYRSANGKNPEETTFFESGSFHRLAKAYERIGRTSDWQKDVYHGERLDQIAYALTCFKDDKECKAWLLEHHFDDALIDSLLEESFDDFIRLSQKALAKILPYLQQGQRYDEAVLSAGYHHSQVQVTNARTTYLPAPDRDKIINPVVYRALNQARKLVNAIVREYGPPAAIHIELARDLSRGPVERRKIESDQKKYEAERAGARDMYAEQFGREPNGLDMLKWRLYREQNGQCAYSQKPIDTARLQEPGYVEVDHVLPYSRSFDDSLSNKVLVLTAENRNKGNRTPWEYFGSSDDSPRWLAFSAWVKSTAAYREPKRLKLLRKHFGEEEAEEFRDRNLNDTRYICREFKQMLETHLTWHESAAGHERCVVVAGRLTSLLRARWGITKVRQNGDLHHAQDAAVVAATSRSFVKRMAEHAKRKELAMVKESYIDPDTGEILDIDAFRKQQALKLDDRFPQPWPYFRQELEARLAPNPIRYFEEKLPDVLRPSDLMPVRVSRAPQRRNIGQAHKETIRSTGKEARLLADNKSSINTPLSALSLKDVDKIVGAEDPRNAGLIDAVRERLKAYGGDGKKAFGPDQPPLLKPSKPGKVAPVIRSVKLLSTQKSGMAVRHGIADNGAMIRVDIFTKAGKFYAVPLYVADAVADTLPNRAVVQSKPESEWPDMDETYQFLFSLCSGDWVRVILKNQPAREGYFGGLDRATGNINIWLHDRNTKLAKDGLLRSNGIKTALKVEKCHVDLLGRLFLAKPEVRQPLRKARPGKPLI

SEQ ID NO: 7198 - protein, 1080 aa, synthetic construct
  REGION 1..1080: note = Synthetic
MNKKTNHAYTLGLDIGMASVGAALLGATCIIGLHVRAFDKAETAKEGDPLNKTRREARLTRRRIRRRTHRLLRLARLMKREGMIGRASPGAFAVPDTSPWALRAEGLERRLTPEEWAAVLYHLIKHRGFQSTRKSEAKEDEKAGQMLSGVSANQQRMKDGGWRSVGEMAARDPAFAAAKRNKGGAYTHTFARGDLTDELALLFRQQRAHGNPHTGEDFAAQVRELLLARRPALAGDALLKLVGKCTLEPGEYRAPKASYSAERHVWLTRLNNLRISEVGEQRSLTAGERQTLLDEPYKLAKLTFKQARQKLGLNDAARFNSLTYRGDKDPEAATLFEAKAYHTLRKAYEAAGLPGKWQRDALDPTRLDRLAYALTCYKTDEDIRAHLVAHSVEADIIDAVLDVSFDKFVALSLKALGKILPFMALGQRYDEAVQSAGYAHHSQLNQDSVKTRYLPPPDRDQIRNPVVYRALNQARKLVNAIIREYGPPAAVHIELARDLSKPIDERRRIEREQKEFQVNKEKARADFIDQFHFEPRGLDLQKYRLYREQMSQCAYSQKGIDVARLFEPGYAEIDHALPYSRSFDDSQNNKVLVLTFENRNKGNRTPYEYLDGASDSPQWQAFEAWVLANKAYRRAKRDRLLRKHFGADEAAEFKERNLNDTRYICRAFKRMVEDHLQWHPDSDANNHCVVVSGQLTSLLRARWGLIKVRENGDLHHALDAAVIAAASRALVKRMADHSRRNELAQVRDPYIDPETGEVFDVAALRAIEEHFPKPWPHFRDELLCWLSPDPALGLAAVSGYDAARLGDIRPVRVSRAPTRRGLGAAHQETIRSTGREGRLLRDGQSAVKTPLASLKLKDIDNIVGAEDPRNAEWIAALRARLQQFNGDGTKAFAANQPPLLKPSAPGKQAPAIRSVKLLATQKSGLPIRHGIANNGAMLRVDVFGKGGKFYAVPVYVADAARGALPNRAVVAYKPEEEWPEMDESFGFLFSLHPNDWVCLRYKNAPSREGYYSGLNRATGAIDIWVHDRNSAVVKNGLFEGNGMKTALAVEKFHVDLLGRLHRVQSETRQPLQRKMPKRGS

SEQ ID NO: 7199 - protein, 1079 aa, synthetic construct
  REGION 1..1079: note = Synthetic
MKYRLGLDIGVASVGAALLTDDRILALHVRTFEKAETAKEGESLNKIRREARLTRRRIRRRAFRLTRLRRALHQANLIDTPDVESLNIVGISPWDLRAKALSQKLAPQELAAALYHIVKHRGFQSNRKSEAKEDEKAGQMLSGVAKNKALLEQKNYQTIGEMVAKDENFQQAKRNKGGDYGHTFARQDLVNEVEKLFAAQQNLANSYATDDLKNKVIELLLARKPALSGEALLKMVGKCTFETTEYRAPKACYTVERFVWLTKLNNLRLLSNGGSRALTEEERQTLIELPFNQAKLTYKQVRKKLDLADDIKFNGLSYYSKNGKDPEETNLFEAKYFNQLKKAYKEAGLESQWLQDSQDAHKLDHLTYAQTVFKDDKESQAWLLAKGIEQPVIDAVLNMSFSEFIRLSLKALNNILPFMEQGQRYDQAVVSAGYQHHSDLTTAQKTNFLPPLDKDDFTNPVVYRAINQTRKLVNAIVKQYGAPMSVHIELARDLNKSFKERKDIEREQKENEANRNQELAQFIELSGKQPNGHELAKMRLYREQDGRCAYSQERIELERLCEIGYVEIDHALPYSRSFDNSFGNKVLVHTAENRNKGNRTPYEYLGGKDNNQAWLQFEAWVKSTIKNFRKQQKLLRKDFDEKQAAEFRDRNLNDTRYAGRVMKNLIETHLQLHDESTAQKCVVVSGQLTAFLRGRWGLNKVRADGDKHHALDAAVVAACSHSMVKRLSDYARKQELEAVKRDFVDPQTGEVLDINALRQLEAQFPTPWPHFRKELLARLSDDPQAELANISEMDAEWITQIQPLRVSRMPTRRSLGAAHQETVRSAKQLDQNLSSVKTPLSKIKLKDLERIQGYEDLRNQTLIEALRKRLNTFSDNPEKAFAEPFYKPGKANGFNADISKLADYAGQPAHQVKTLPLLDTQKSGMPLRGGVVNNGDMLRIDLFTKGGKYFVVPIYVADVVKAELPNRAVVAGKLENEWTVMDENYAFLFSLYPNDWLKVSFKSKPTIEGYYAGLDRSTGAIHLWAHDRNQAVGKDGLIRSIGVKSADSLQKYHINILGRAYLAQPEVRQSLIKPKTKEA

SEQ ID NO: 7200 - protein, 1068 aa, synthetic construct
  REGION 1..1068: note = Synthetic
MPKSAKPQQAYTLGLDIGIASVGAALLGQQHIIGLHVRTFDRAETAKEGEPLNKIRRDARLTRRRLQRRAHRLLRLRRLFKRHNLIPDTDTSTFISGQSPWELRAQGLDRQLTSAEWTTVLYHIVKHRGFHSNRKSEVKTDEKAGQMLSGVNQNQALLKQSGLRTMGELAARHEAFREAKRNKKGAYNHTFSRHDLEDELHLLFSRQRELGNPYATPELEDAVHTLLMQRRPALSGTNLLKMVGHCTLEPDEFRAPKASYTAERFIWLTKLNNLRVSGSGETRPLNESERQALLSKPFSQSKLTYKQVRKILELPDNIRFVGLHYHPAQDNGKSPENRVFFEAKAFHALRNVYKKAGLNLEWQRDSQNPEKLDNITYALTVFKEDKEAKQWLIEKGVEASVIEAVLNESFSEFVRLSIKALRKIIPHMEIGHRYDEAVKLAGYSHHSHLPQPSKTPYIPRFSKQSIANPVVSRALNQARKLVNAIVREYGPPDAVHIELARDLNKPFDERRKIEKDQEKYQKDKARDIETFQENFGFTPKGLQLTKWRLYREQSGKCAYSLKPLDINRLFEDGYVEIDHALPYSRSFNDGMNNKVLTLTTENRNKGNQTPYEYLDGASNSAQWRNFVAWVNSNKSYRASKQRNLLRKDFAAQAATEFRERHLTDTRYIAREFKRMVETHLKLNKPNQRCVVVSGQLTAYLRARWGLIKVRENGDLHHALDAAVVAACSHAMVKRLADYSRRGELQYARGHHFDPETGEIIDINALRKLDDHFPQPWTDFRRELLAWLSPDPAQQLKNLAYYTDERLKQVKPIRVSRAPTRRGLGAAHQETIRSAKYLGENRSTVKTPLEKLKLKDIPNIVGYEDPRNHQLIQAISQRLTEHGDDGKKAFKEPLYKPGNNKSTAPVVRSVKLFTVQKSGIPVRGGIANNGNMVRVDIFTKKERYFAVPVYVSDAARNELPNKAVARGKDGWIDIDDSFSFLFSLYPNDWVSVVVKPHEAPCEGYYAGLDISTGAIHIWAHDRNRSVGKNGLMRSIGIKTAHSVEKYHVDLLGNLYRVVHETRKPLRAGK

SEQ ID NO: 7201 - protein, 1062 aa, synthetic construct
  REGION 1..1062: note = Synthetic
MQAPSKAEYTLGLDIGMASVGAALLTNDRILALHVRAFDKAETAKEGESLNAIRRAARLTRRRLRRRAHRLLRLRRLFKGMGLLDSQDPAALFTGKSPWVLRSEGLDRRLTSPEWAAVLYHIVKHRGFHSSRKSEAKADEQIGQMLSGVNRIKELLANTGLRTVGELAAKHEAFAEAKRNKGGAYTHTFARADLAAELSLLFAAQRRFGNRHADATFESAVRDLLMARRPALSGERLLKMVGKCTFEPTEFRAPKASHSAERFVWLTRLNNLRVSGLGETRPLTDSERATLMELPFAQAKLTYKQARKLLGLAEHERFAGLDYRDKDPENATLFEAKAFHALRKSYEEAGLKALWQRDALDPERLNTLAHAQTVFKEDGEARAWLAGQGVEPEIIEAVLNVAFSDFVRLSVKALRRIIPHMETGLRYDEAVRAAGYVHHSQLPGSKRALTIPRISKDDFPNPVVYRALNQARKLVNAIVREYGPPVRVHIELARDLSKSFDERKRIEREQKSFRENKQKDIADFVERFGVTPKGADLVKWRLYREQNAQCAYSQKAFDLDRLFEDGYAEIDHILPYSRSFDDGMSNKVLVHTAENRNKGNQTPYEYLDGQSDSERWRRFVAWIMGNKAYRQAKRQRLLRKDFGEAAAREFRERHLTDTRYIARSFKRLVERHLQLAGDTSNTRCMILSGQLTAFLRARWGLLKVRENGDLHHALDAAVVAACSQAMVKRLSDYSRRGELEQVRKGYIDPETGEVLDLAALRRLEAQFPTPWSHFRDELLAWLSADPATRLARLPNYPAKQAQRARPVRVSRAPTRRGTGQAHQETIRSAKRLGNGVSTVKTPLQNLKLKDIEKIAGFDDPRNATLLEAIRQRLEQHGDDGKKAFKEPLYKPGKPAPVIRSVKLMETQKSGLAVRGGVANNGNMLRVDIFTDGKRFHAVPLYVADAIKAELPKRAVVAYKPEAEWTVMDDKYAFLFSLHPNDWVVVTLKGAGQPLAGYFAGLDRSTGAISLWTHDRNQTVAKDGLIRGIGIKTALAIEKFHVDMLGRLHRVRQETRQRLRRAG

SEQ ID NO: 7202 - protein, 1061 aa, synthetic construct
  REGION 1..1061: note = Synthetic
MHTLPYTLGLDIGIASVGAALLSDESILGMHVRTFSAAETDKEGDPLNKIRREARSARRRIRRRAHRLLRLRRLLKRTGLISDTSLEVLKTSKTPWQLRSEGLDRLLSPSELAAALYHIVKHRGFQSNRKAELKTDAKAGQMLSGVSANQQLMRDKSYRTIAEMVCKDDAFKDHKRNKGGSYRNTFARSDLADELKTLLKKQREYDNPLATPELEEAVHTLLMARRPVFKDDDIEKLVGFCTFEHGEKRAPKAAFSSERFIWLGKLNNLRLIYPGEQRSLTPEERSQIINLPFTQASVKFSQIRKKLDLPEYVRFNLVRYKPGEETSKSETATFFEAKAFHELRKTYRESGISELWERDQHDPQRLDQIATAIAVYRDDERIRNELSPHTIENEVVEAVLNCDFTQFINLSLKALNKILPYMEQGQRYDEACTSAGYQHHSPQQNEEKSGRIPPPDKNVIRNPVVYRSLNQARKLINAITKRYGAPAAIHLEMARDLSKPFSERKSIEREQEKYRKQKVQLRNEYIEHFGTEPNGLNLLKFRLYKEQDAQCAYTQKALDLSRLNEAGYVEVDHILPYSRSYDDSLLNKTLVLTEANRDKGNRTPFEFMGGDDQSQHWQKFVRWVQMNPKIRQAKRNRYLRKDFSEKAAREFRDRHLNDTRYIGRELKAMIESHVQWHPDSKSKDCCVVLSGQLTALLRGRWGFNKDRAAGDLHHAVDAAVVAAATRGMIQRMARHSKFHELKNVRTSYADPDTGEVVNLAAARDLEKHFPLPWDNFRNDTLAYLNPSAISADESAQEGHRGVRVSRAPTRRKLGAAHQETIRSKGKDNILLEQGLSAVKTPLSKLTLKNIENMVGYEDPRNAALVKVLRERLEAFGGDGAKAFAPNQPPVYKPSKPGKQAPEIRSVKMASKSKGALHVREGLADSGRMIRIDIYETKNGYVGVPIYVSDKARSKLPKAYPKKGEDRANWPEVDTNDNFLFSLYSTDWIEAKTKKETIAGYVKSYDIFDGRLLVYAHDNKKVVRKLTLSALADLQKLHVSILGDLYKGGTPKCSPLRKGQEL

SEQ ID NO: 7203 - protein, 1059 aa, synthetic construct
  REGION 1..1059: note = Synthetic
MASVGAALLLPDAQRIIAMHVRTFDRAEVAKTGESLNSIRRESRLTRRRLRRHAHRLVRLARLMRRRGIIDSIVPKEFIDPLVSPWTLRAEGLERKLEPGEWATALYHLVKHRGFQSNRKSEARIDEKAGQMLAGVGHIQSLLKAQNYRTVGELIAHDQYFKEAKRNKGGSYSHTVARSDIEAELNTLFECQRELGQRYADANFQNEVRTLLLARRPTLSGEKLLQMVGRCTFEKDEFRSPKASYRAERFVWLGKLNNLKIINGGDARPLTDDERRKIIELPFILSKLTFQQVRNVLDLKRTQRFNMVSYRVNPDAAEKNHEDSVFFEAKYFKELCGAYRKAGLDKEWQRDSINPDRLDTLAYALTCYKNDAESRDWMMEQGIEPGIIEAVLVESFDQFIHLSQKALKKIIPFMEQGQRYDEAAAAAGYHPSQLNRDAIKTKWLPPPDSGLIRNPVVYRALNQARKLVNAVVRQYGPPAAVHIELARDLSKSYDERKKIEREQKEFQMEKEKSVSDFEERFGFRPKALDREKWRLFREQLDQCPYCQKALDINQLFSVGYAQVDHVLPYSRSLDDGMNNKVVVHIACNQNKGNRTPYEFLDGENDSERWRYFKAWVEGNKALRQGKRNSLLRIHFGAEQAEEFRARHLNDTRYICREFKRLVETYLEWHPDVKGSERCVVVSGRLTSLLRARWGLIKIRKNGDLHHAMDAAVIAATGRNLIKRMANYARRRELESVTERYTDPETGEILSKLTTVIPESRFPEPWPHFRKELQAWLTPDPASQLIDVPGYDDALREAIRPVRVSRAPTRRGLGAAHQDTIRSIREGFVSAIKTPLKELGMKDLENIVGYGRDTGLINTIRARLEAFGGDGKKAFDEKQPPLCKPSANPENAPIIRSVKLITTQKSGVLVRGGIANNGAMLRVDIFSKDSRFYSVPLYVSDIVKKEMPNRAYTSGKNENDWVVMDDGYQFLFSLYPNDWVTVRLKDEVREGYYAGFDRATGTINIWLHDRNQLQAKQGLLRSNGIKTALSIEKCHVDFLGNLHRVRQEKREPLRVSKGQR

SEQ ID NO: 7204 - protein, 1058 aa, synthetic construct
  REGION 1..1058: note = Synthetic
MPKPDRYTLGLDIGMASVGAALLACDHIIALFVRTFDKAETAKEGESLNKIRRDARLTRRRIRRRAHRLLRLRRLFKRISLLPTNPNNNTLSADNLSPWQLRAEGLDRRLDPQEWAAVLYHLVKHRGFLSNRKSEAKTDAKTGEMLGGVSTNQQRLSEGGYRTIGEMAWKDDRFSAAKRNKGGDYSHTFARADLVNELRSLFSCQRKFENPHTNPEFETATHELLMARRPTLSGDNLLKMVGKCTFEPTEYRAPKASHTAERFVWLTKLNNLRISGIGVTRPLTDGERQTLIHLPFSQAKLTYKQVRTKLALGEADRFVGLDYRNSKDPELAALFEAKAFHLLRKVYESAGLHQAWQRDGHDRQRLDLLAHALTVFKDDNEARQWLTVQGVEAEIIEAVLEESFDKFIRLSLKALHKILPHMEAGLRYDEAVQAAGYSHHSQIHTDSKTRYIPKISKEDIANPVVSRALNQARRLVNAIVREYGSPMAVHIELARDLNKPYDERRRIEKDQKTYKETKDKDIVDFEKRFEFTPKGLELVKWRLYREQDAQCAYSQTGFDLNRLFEPGYAEIDHALPQSRSFDNGMNNKVLVHSKHNRDKGNRTPYEYLGGDHNSPEWQHFVAWVEGNKKYRLTKRQRLLRKDFGKEEANKFRERNLTDTRYASKKFKQLVETHLQLAEESDSKRCVVLSGQLTAYLRARWVLNKVREDGDLHHALDAAVVAACSHSMVKRLSDYSRRKELEQSRGHFVDYETGEVLDLAALRRVEAHFPQPWPGFRKELEARLSPDPAATLHTLAGVAPVRVSRAPTRRGLGAAHQETIRSAKCLEDGTSSVKTSLTSLKLKDLPRIVGYNDPRNRTLITAIEQRLREHDDNGAKAFKEPLRRPAAPGKKDQAPIVRSVNLRDTQKSGLLVRDGIANNGSMLRVDIFTKGGKFFAVLLYVADTVKTELPNRAVVASKPESEWPVMDDSYAFLFSLHPNDWIKVTLKDQPLKEGYFSGLDRSTGAVSIWAHDRNSSVGKDGLMRSIGIKTALSLEKCHVDILGRLHRVHQETRQPLRHK

SEQ ID NO: 7205 - protein, 1011 aa, synthetic construct
  REGION 1..1011: note = Synthetic
LERKLAPEEWARVLYHLCKHRGFHWISRAEEKNAEADSKGEGGKVKKGLSDTKRRMNEKSYRSAAEMVLKEFPEAQRNKQGEYAKALSRLLLAEELALLFERQRELGNLHATPELEMRIAGCGDRKSGLFWEQKPPLTGEGLLKMLGRCTFEKTEYRAPKASFTAERHVWLTRLNNLRIVVAGNVRPLNEAERRIALPLPYQQASDLTYKQLKNALVKAGLLPENVKFSGLDYPTQQAEDKVKDPESERLVKLPAWQALRKTLKEKGLETEWRGIAGAATGGQPELLDRIAWTLSVFKDGDEIEQELRKLSLPGGEKMVDALSELSFDKFHNLSLKALGKIVPHMEVGLRYDEACAKAGYHHSQLSKTGDGQHKYLPPFYSGRDKGGRMVFDEEKDIPRNPVVLRSLNQARKVLNALVSRYGSPSVVHIEMARDLSRPMDERNKIKKAQEEFRDKNEKAKADFEAKFNMPAKNREVEKYLLYSEQHGKCAYSLKPLDLDRVLHDQGYAEVDHALPWSRSYDDSKNNKVLALTSENRNKGNRTPYEYLTSFAGGENGERWRNFAAFVEGNKSYRLAKRSRLLRKHFGKEESEGFKERNLNDTRYICKFFKNYVECYLKLAEGGDSKRCVVLSGQLTAFLRARWGLHKVRSDNDRHHALDAVVVAACSHSLVKRLSDYSRRKELEQAGNVIDMETGEIRDPELLSKLERHFPKPWEYFREELLLRLNTDDPALLKREAERHGYPSATLENLRPLFVSRAPKRRNSGAAHMETIYSQPERLKSTGSVTQKVSLTSLTLKDIDNLIDPHRNEKLYAAIRTRLEAHNGKGDKAFPSDNPLRKPDRDGNPTGPFVRSVTMLIDKLSGIPVRGGIAKNDTMLRVDVFRHKKDRKYHLVPVYVHHAVAKELPNRAVVAFKDENEWTLIDEENFDFCFSLYPNDLVKISLKKGGILGYYAGCNRATGAIDLWTHDRNRAIGKDGLIQSIGVKTALCVEKFHVDTLGNIYPAPPEERRGLA

SEQ ID NO: 7206 - protein, 1245 aa, synthetic construct
  REGION 1..1245: note = Synthetic
LITRASGSIDHSPCSATPSIRFSSIGSRIRSTLGRPHAVALHCVRGDRLTAELAPDRMAHAGRTKRRPDRFPCRAGFGRHPKVTPYCSNGSHPGKLHGVILRIPDREQQIMSATYTIGLDIGIASVGWCVLGETHIIDLGVRAFDKAETAKEGESLNLARRNARLMRRRLFRRAWRLKKLARLLKSEGLIADAKAFQPEHAFTHSLWQLRVDGLDRRLNDEEWARVIYHLSKHRGFHWISRAEAKQAEGDSKSEGGKVKQGLAGTAKLMTEKGYRSAAEMVLGEFPDAQRNKQGEYTKALARELLAKELALLFEKQRELGNPHASSALQTAILGNGDKKSGLFWQQKPALAGADLLKMLGTCTFEKGEYRAPKASFTAERHIWLTRLNNLRIVTDGVTRQLTEQERQLCLPLPYQQAGDLTYKQLGTALTKAGLLEAGSFKFTGLAYPTEAQKAEGKAKDPESATLIKIPAWQELRQTLSKAGLDDEWKKLSGDALCGQPENFDQIAWVLSVHKDDDEVRAELAKLPLPNRDALIDALLNIRFDKFHALSLKALRAIVPPMEKGLRYDEACVEAGYHHSQLHKVGESEHKYLPPLYAGRDQDGRMRFAEDADIPRNPVVLRSLNQARKVVNAIIRRHGSPAAVHIEMARDLSRPLDERNKIKKEQDEYQARNQRDREQFIELFGHPPKSLEFEKWRLYREQNGQCVYSQKPLAPSGNVAEIFLEGSTEIDHALPYSRSFDDSKNNKVLVLTRENRDKGNRTPYEYLGGAENSERWQRYVAFVEANKAYRLAKRTRLLRKDFGAKESGEFRERNLNDTRYISRFFKNYIEQHLKLANGSEAKRCVVVSGQLTNFLRARWGLLKVRSDSDRHHALDAAVVAACSHSMVQRLSNYSRTRELEQVRDGFVDIETGEIVNPAMHQQLREHFPDPWPYFRHELEARLKIDSPELLREEMARLGSYSEEELATLKPLFVSRAPQRRNGGAAHRDTIYGQPERMKRTGGVTQKVPLSSLTLKDLDSLVDPHRNVKLYEAIAKRLEAHGGKGDKAFPSSNPLRKPDKEGNETGPIVRTVTKVIDKLSGIPVRGGIAKNDTMLRVDVFTKAGKFHLVPVYVHHRVTGLPNRAIVQAKDEEEWTLIDESFEWCFSLYPNDLLQVTQRSGETVFGYYRGCHSGTGALNIALHDRFAFGEKTTSLACFKKDPNKPIPNDKLGLIEGVGVKMAAKLEKFHVDTLGNIYPAPPEKRRGLA

SEQ ID NO: 7207 - protein, 1169 aa, synthetic construct
  REGION 1..1169: note = Synthetic
MKSNFLSSTRDSLTFGFDIGIASVGWCVLGEQHIVDLGVRCFDKAETAKEGESLNLARRTARLMRRRLRRRAWRLVKLVRLLKREGVIDSIQSLRQPSAKSPWQLRVEGLDRKLAPEEWARVLYHLCKHRGFYWISRAEEKKAEADSAGEGGKVKKGLQDTKRRMNENNYRSAAEMVLKEFPDAQRNKQGEYTKALSRLLLGQELVLLFERQREHGNPHATPDLEMRIAGNGDRKSGLFWEQKPPLSGNDLLKKLGRCTFEKSEYRAPKASFTAERHVWLTRLTNLRVVVDGNARPLNEAERSVALPLPYNQASDLTYKQLKNALIKAGLLPEDVKFSGLTYPTQQTGDKAKDPESERLIKLPAWQALRKTLKDKGLETEWQSIAGAATGGHPEQLDQIAWVLSVYKDGAEVEQELRKLSLPGGEKMIEALSEISFDKFHNLSLKALRKIVPHMETGLRYDEACEKAGYHHSQLFKAGEGQQKYLPPFYSGRDKDGRMVFNDEEDIPRNPVVLRALNQARKVLNALVSRYGSPAAVHIEMARDLSKPLNGHFTENGRYIEGRRDIEKAQKEFQSENQKNKDEFVKLFEFEPKSREFEKYRLYNEQHAQCAYCQQPLAQNGVVHKIFKAGEAEIDHVLPYSRSFDNSKNNRVLVHAECNRNKGNRTPYEYLTSFAGGENGERWRSFAAWVEGNKSYRLAKRSRLLRKNFGEKEAGEFKDRNLNDTRYICKFFKNYVERHLQLAEGSDSQRCVVLSGQLTAFLRARWGLAKVRSDSDRHHALDAAVVAACSHALVKRLSDYSRRKELEQARNVVDAETGEIIDPALLSKLEQHFPKPWEYFREELLLRLNTDDLALLKSRVEHYGYPPEVLENLRPLFVSRAPQRRNSGAAHEETIYAKPRLAHKLKVEEKTKQGESRRAATPQELESMVIERVGVFDTTGQGEKKKYRLTVDRLKDIVDLERNERMVHALHLWLTERGDDLKQPGTKALPRKPQKSDPENGPFTGPEIKTVKMNGGKKSGIPIRGGIAKNDTMLRVDVFRHKTDKKYHLVPVYVHHTVAKEFPNRAVVAFKDESEWTLIDEENFDFCFSLYPNDLVKVSLKNEIRSGYYAGCDRATGAINLWAHDRSQAIGKDGLIRGIGVKTALCIEKFHVDTLGNIYPAPPEKRRGLA

SEQ ID NO: 7208 - protein, 1126 aa, synthetic construct
  REGION 1..1126: note = Synthetic
MASKHENLGALTFGLDIGIASVGWAVLGENRIIDLGVRCFDKAETAKEGESLNLARRTARLLRRRLRRRAWRLTKLARLLKREGLIADTNVFQKPFNLKDANEKGLSFWQLRVDALDRKLSAEEWARVIYHLCKHRGFHWISRAEEKAAEGDSKSEGGKVKQGLAGTKKLMQEKNYRTAAEMVLTEFPEAQRNKQGDYSKALSRILLGDEMTQLFKHQRELGNPHATEKLEAAILGNGDHKSGLFWAQNPALAGNDLLKMLGHCTFEKAEYRVPKASFTAERHVWLTRLNNLRIVVDGTTRPLNEAERHLALLMPYQQAGDLTYKQLRTALTKAGYLPESFRYTGLAYASGQKADEKAKDPESAPLVKLPAWHELRKTLEKKELASEWQKISSDALDGKPQLLDQIAWVLSVYKDDTEVEAELCKLNLPNAEKMIDALLDIRFDKFSNLSLKALRQIVPLMEQGQRYDEAVANIPEYGHHSQLHEVGAGEHKYLPPFYKERDKTGRMVFNDDMDIPRNPVVLRALNQARKVVNALIKEYGSPHEVHIEMARDLSRPLDERRDVEKLQKEFRDRNEKDKALFAQDFNIVGAVKGKEFEKYQLYREQQGKCAYSIEPMDIHRLFEQGYVEIDHALPYSRSFDDSKNNRVLVLAKENRDKGNRTPFEYLGGKDNSERWRQFVAFVEGNKSYRLAKRSRLLRKDFGKDEAKGFRERNLNDTRYICRFFKNYVEQYLQLHEDSDAKRCVVLSGQMTSFLRARWGLVKVRGDSDRHHALDGAIVAACSHSMVKRLSDYSRRKELEQVRAGFVDVDTGEIVNPAMFQQVQEHFPNPWPHFRDEVKLRLNVDDPALLHSEMNRFGTYSPEALKALRPLFISRAPQRRNSGAAHKDTIYAQPERLVAQGGVTQKVPLTSLTLKDLDKLIDPHRNEKLYSAIRIRLEQHGGKGDKAFPASNPLRKPDSEGNPTGPIVRGVTMVIDKLSGIPIRGGIAKNDSMVRVDVFTKAGKFHLVPVYVHHAVAKVLPNRAVVAYKDETEWTLIDDGFDFCFSMYPNDLLRIKLRNASHLGYYASCNRSTGAINLWSHDRNQQVGKDGMIESIGVKTALNVEKLNIDVLGNRYPAPPEKRRDLA

SEQ ID NO: 7209 - protein, 1116 aa, synthetic construct
  REGION 1..1116: note = Synthetic
MGGAMQTENQFYTLGLDIGIASVGWCVLGENRIIDLGVRAFDKAETAKEGESLNLARRSARLMRRRLFRRAWRLKKLARRLKQFGLISNCNVLQETGPAIGSPWQLRVEGLDRLLTNEEWARVIYHLCKHRGFHWTSKAEEKKADADGKSEGGKVKQGLAGTAKLMKENGYRSTAKLMKENGYRSAAEMVLAEFPEAQRNKAGDYGKALSRVLLGDELAQLFQRQRELGNLKATADLEAAVLGNGDRKSGLFWAQKPALAGDDLLKMLGKCTFEKSEYRAPKASFTAERHVWLTRLNNLRIILDGETRSLNNEERRLALPLPYQQAGDFTYKQLRAALVKNGKLPESFCFAGLAYPSARQKTEDKAKDPESAVLVKLPGWQELRSTLKKAGLETEWEGMAGAATGGNPELLDQVAWVLSVYKDDEEVEAELRKLPLPGGQAMIDALNEIRFDKFHALSLATLRNIVPHMDAGLRYDEACERAGYHHSQLHVVGAGESKFLPPLYVRRDKDGRMVFNEDLDIPRNPVVLRALNQARKVVNAIIRRYGSPAAVHIEMARDLSRNFDERNKIRKDQEDFRDRNEKDKAQFAETFGIVGAPKGGDFEKFRLYREQQGKCAYSVEPIDLHRLLEPGYVEVDHALPYSRSFDDSKNNKVLVLAKENRDKGNRTPYEYLGGAEDSPRWHRFVQFVENNKIYRQAKRSRLLRKNFGKEEAGEFKERNLNDTRYICRFFKNYVERYLQLAEGSEAKRCVVLSGQLTAFLRARWGLNKVRSDSDRHHALDAAVVAACSHGMVKRLADYSRHKELEKVREGFVDMETGEIVNPAMYQQLRQHFPEPWSHFREELRIRLGMADGIKDDPAQLRVAIEALGTYPQEALDELRPLFVSRAPQRRKGGAIHEDTIRSAKLLDEGKSYVKTPLQKLKLANLSNIVGASYSRNSPLITLLRERLEMHGDDGKKAFAEPVYKPSKNGTGSLVKAVKLASTQKGGMFVRGGVAEMGEMHHVDVYKSGNRYLIEPAYVASLEKRIKPTNLPEDSVFLFSLCKNDFVKICLGNVAHDGYFVMYESDGRLTLRAHDQPKPDKAYFRKGIGGASRIEKFHVDVLGNIYPAPLEPRRGLA

SEQ ID NO: 7210 - protein, 1133 aa, synthetic construct
  REGION 1..1133: note = Synthetic
LKEKRKPADAGFRVQLVILRLQFIVATALTPENYNRANLAQEKSMQQALRYDLGLDIGIASVGWCVLGEQRIIDLGVRAFDKAETPEGESLNAGRRSARLLRRRLRRRAWRLLKLARLLKHEGLIASSQLFQRQVPITQSLWILRVEALDRCLGGEEWARVIYHLCKHRGFWFARTADAMASEGGKVKQGLERTRALMEGKGYRTAAEMMLAEFPDNQRNKRGDYGQSLARDLLAEELACLFACQRELGNPHAATRFESAILAPETGLFWQQKPALSGEAMLNLIGKCTFEHNEYRAAKHSWSAERFVWLTRLNNLRISINGESRPLNADERVVALNLPYELASVKYKQLKTKLVTQGLWSADVRFTGLNYRDGSKDPEDAKLIELKGWHTLRKALEKGGLKTEWQSLSNRYYELDQIATILSLYKTDNEVVHELGQLGLAKPIVNALSVESFSDFVRLSLKALSGILPQMEQGKRYDEACLAAGYHHSMAAEKSLSHYLPKFDGEAPNNPVVLRALNQARKVVNALIRKYGPPYAVHIEMARDLSRPLDERQKIEKDQKEYATRNEQDRIRFAEAFGRSPTGREFEKWQLYHEQHGKCAYSLTALDLNRLIDDATYAEIDHALPYSRSFDDSKNNKVLVLTAENRNKGNRTPYEYLGGAVGAQQWLRFVTFVSSNHSYRQAKRDRLLRKHFNTQEATEFKARNLNDTRYACRYFKNFVENHLALHPEGGHQRCVVVSGQLTSFLRARWGLAKLRKASDRHHAIDAAVVAACSHGMVKRLSDFARRKELDAVREGFVDLETGEVVNLAILHQLDKHFPRPWLHFDDELCMRAGQDRSTGRVRDDLPLDEMRKHLAVLGYDELALAKIRPLFVSRAPKRRNGGAAHKDTIYAARSTNDKPNRVTQKLPLTDLTLAHFGGQEYDEGGCSLIEPHRNARLYRALHERLLAHGGKADKAFATPFYKPSVNHEREPLVRGVTLVIDKLSGIPIRGGLAKNDSMIRVDVFGKAGKFHLVPVYVHHRVAKALPNRAIVQGKDEDEWTLIDDSFEFRFSVYPNDLLRIQQKGKPMIEGYYAGCDRATGNLAVWAHDRDQQQGKDGLIRGIGVKTAVSVEKFNVDVLGRVYPAKSEVRRGLA

SEQ ID NO: 7211 - protein, 1135 aa, synthetic construct
  REGION 1..1135: note = Synthetic
LAVLRSAGQRGIIARQKLKRPDRQACRAGFGTSPKGDYLIAATALTPESYNDAILSKRDGAMQTKNLPYTLGLDIGMASVGAALLLPDQERILALHVRTFDKAETAKEGESLNKIRRDSRLTRRRIRRRAHRLVRLARLMKRVGLIADANPEAFALPGVSPWHLRADGLDRLLEPKEWAGVLYHLVKHRGFQSNRKSEAKADEKAGQMLSGVGRNQALLKEAGYRTVGELAARHEDFKEAKRNKGGSYSHTFARADLNAELNLLFERQRALGSRLASADFQENVRDLLMARRPTLSGANLLKMVGKCTFEKSEDRAPKAGYRAERFVWLGKLNNLKIVGSGDARPLTDAEHRIVIDLPFTQAKLTFKQVRKALELETHQRFNLLSYRPDPKGKDKDPEESTFFEAKSFHTLRKAYEGAGLKKEWQRDALDPDRLDALAYALTCYKDDTESRQWLVAQGIGTPIIEAVLAESFDKFIHLSQKALKAILPHMEAGQRYDDAAKSAGYDHSQPDAGTGKRATLPPPDKDTIRNPVVYRALNQARKLVNAIVAEYGPPAAVHIELARDLSKPIDERRDIEKGQKEFQALKEKLAAAFEETFHRKPSGLDLLKYRLFREQLDQCPYCQKALVVDRLFEPGYAQIDHALPYSRSFDDGMNNKVVVHVACNQDKGNRTPYEFLDGAGDSERWQRFVAWVQGNKAIRQAKRNRLLRVNFGTDEAKEFSKRNLSDTRYICREFKRTIETQFAWHSDAEGNERCVVLSGQLTSLLRARWGLIKVREDGDLHHALDVAVIAAASRSLVKRMADYSRRNELEMVRNRYVDPATGEVVDVAALRQIEDHFPKPWPLFREELLARLAPEPKLQLTCVSSYDEGLRESIRPIRVSRAPTRRGLGAAHQETIRSLRDGSQSAIKTPLRDLNLKDLENIVGFERDTALIDAIRTRLEAFGGEGKKAFDDKQPPLRKPSKDPDKAPIIRSVKLLVTQKSGIPIRGGIANNGAMLRSDIFTKAGKFYAVPIYVADAVRGELPHRAVAQAKPELEWPMMDESYQFLFSLHPNDWMTIRLKNEVREGYYAGLDRATGNISLWLHDRNQNVGQKGLLTGNGIKTALAVEKYHVDLLGKLHRVHKEERQPIHIKPGKR

SEQ ID NO: 7212 - protein, 1135 aa, synthetic construct
  REGION 1..1135: note = Synthetic
LQQRLSPRKATTIPTIREATVEGNTRNLTYGFDIGIASVGWAVLAPDHIVALGVRAFDKAETAKEGESLNLARRNARLMRRRLYRRAWRQTKVARLLKREGLIADAQFFHNQLPAPVSPWHLRVEGLDRLLSPEEWARVIYHLCKHRGFHWINRAEEKKAGEDTKGEGGKVKQGLAATSRMMQEKGYRTAAKMVISEFPDAQRNKQGSYDKALSRALLAQELEILFQRQRELGNPHTGDAFQVAILGNGDRKSGLFWSQKPALSGENLLKMLGRCTFEKNEYRAPKASFTAERHVWLTRLNNLRIVVDGVTRPLNENERRIALPLPYNQAGDLTHKQLRAALIKAGAIDNNFRFAKFPYAQSADGKTKDPESAVLVKLPAWQELRKTLKDKGLETEWQTIAGTALAGNPELLDRIAWVLSVYKDDNEVERELGKLGLPGNKPMIDALGEIRFDKFSNLSLKALRKIVPHMESGMRYDEACETAGYHHSQLFKLGEGEEHYLPPFYSGRDKDGRMVFKDDTDIPRNPVVLRALNQARKVINALVRKYGSPASVHIEMARDLSKPFDERRYIKKEQDEYQKRNQEDRTRFTEHYGQAPKGQEFEKWRLYREQQGKCAYSIEPIDLNRLLEPGYVEIDHALPYSRSFDDSKNNKVLVLAKENRDKGNATPYEYLDGANNSERWQRFVAYVEGNKAYRLAKRTRLLRKNFGTEDAKDFRERNLNDTRYISKFFKNYVERYLKLADDSESKRCVVLSGQLTAFLRARWGLMKIRSDSDRHHALDAAVVAACSHSMVKRLSDYARRKELEAVREGFADLETGEIVNPAMYQQLHEHFPDPWPQFRHEMKIRLGLDEDIKDDATKLKAAMESLGTYQSEELDALKPLFVSRAPQRRNSGAAHKDTIYAQPKCLKDQGGVTQKVPLSSLTLKDIDNLIDPHRNEKLYAAIRKRLEAHGGKGDKAFPASNPLRKPDKNGDPTGPIVRAVTLVIDKLSGIPVRGGIAKNDSMLRVDVFTKGGKFHLVPVYVHHRVKGLPSRAIVAFKDESEWTPIDDSFDFCFSLHPNDLVRVTLKKESHLGYYSSCNRSTGAVNLWSHDRNKDIGKDGLIESIGVKTAVALEKFHVDVLGNIYPAPPEIRRDLA

SEQ ID NO: 7213 - protein, 1122 aa, synthetic construct
  REGION 1..1122: note = Synthetic
MLGKHYNKKNLMPLTFGLDIGIASVGWAVLAPDRIVDLGVRTFDKAETAKEGESLNKVRRDARLMRRRLQHRAWRLTKLARLLKQEGLISDARLFKKQQSFSQSLWQLRVEGLTRLLDKEEWARVIYHLCKHRGFHWISRAEEAAAENDSKGEGGKVRQGLTKTSQLMKEKNYQTAAEMVLAEFPEAQRNKQGDYGKALSRSLLAEELKILFECQRHLGNSHAGTTLETRILGNGDKKSGLFWQQKPALAGDALLKMLGNCTFEKTEYRAPKASFTAERHVWLTRLNNLRIVVDGKTRPLNQEERTVVLNLPYQQAGDFTYKQLRNVLVKNGLVDSFRFPGLSYPSEKQQAEANVKNPEDEKLIRLPAWQALRKKLKEKELEAAWRQISTAALEGQPELLDQIARVLSVYKEDEEITRELQKLDLPDKDDVIEALREVSFREFHALSLKALYKIVPFMETGLRYDQSCEAAGYHHSQLYKTGEYEYKYLPPFYAGRDRDGRMLFNKKLDMDIPRNPVVLRALNQARKVVNALIRTYGSPHSVHIEMARDLSKSFDERKKIEKAQDEFRKRNEQDKAGFAAEFNIIGTPKSKEFEKYQLYREQQGKCAYSLEPLDINRLFEPGYVEVDHALPYSRSFDDSKSNRVLVLSRENRNKGNKTPYEYLNGISNDERWRRFEVFVNTNKLYRSAKRNRLLKKDFDEKDAEDFRDRNLNDTRYICRFFKNYVERYLQLHEESQDKRCVVVSGQLTAFLRARCGLIKLREESDRHHALDAAVVAVCSRGMVKRLSDYSRHRELDQVRTGFVDVETGEIVNLAMLQKLEAHFPNPWPHFRDELILRLKEDNPELLRKGVEKFGTYPPEALEALKPLFVSRAPQRRNGGAAHKDTIYGQPERLRTEGNVVQKVPLDSLTLDNMNKLIDPHRNEKLYSAIRARLEQHNGKGNKAFPPDNPLRKPGRHGNPDGPIVRSVKLVNKLSGIPVRGGIAKNDTMLRVDIFTKAGKFHLVPIYVHHKVAGELPNRAIIAFKDESEWTLINDSFSFCCSLHPNDLVRINLKKESQFGYYAGCDRSTGAISLWAHDRNQQAGKDGLIRGIGAKTALSIEKFHVDVLGRVYPAPPEKRRGLA

SEQ ID NO: 7214 - protein, 1096 aa, synthetic construct
  REGION 1..1096: note = Synthetic
MTSKHKNSGALTLGLDIGIASVGWAVLGEDRIIDLGVRCFDKAETAKEGESLNLARRTARLLRRRLRRRAWRLTKLARLLKREGLIADTNFFKHKIEKNTTAPKSSWQLRVDALDRPLNNEEWARVIYHLCKHRGFHWISRAEAKPIEGDSKSEGGRVKQGLADTEKLKKAKNYRTAAEMVLAEFPEAQRNKQGDYSKALSRVLLSEEFVLLFQRQRELGNQHTSAEFQEKILGNGDKKSGLFWAQNPALAGNDLLKMLGHCTFEKTEYRAPKASFTAELHVWLTRLNNLRIVVDGTTRPLNEAERHIALLMPYQQAGDFTYKQLRAALTKVGFLPESFRYTGLAYASKQKADEKSKDPESATLVKLPAWQELRKTLEKKELASEWQKISTDALHGKPQLLDQIAWVLSVYKDDTEVEAELRKLNLPNAEKMIDALLDIRFDKFSNLSLKALRQIVPFMEQGQRYDEAVANIPEYGHHSQLHQVGAGEHKYLPPFYKERDKTGRMVFNDDMDIPRNPVVLRALNQARKVVNALIKEYGAPHEVHIEMARDLSRPLDERREIEKLQKEFRDNNEKGKAQFAQDFNIVGAVKGKEFEKYQLYREQQGKCAYSIEPIDLHRLFETGYVEIDHALPYSRSFDDSKNNRVLVLAKENRDKGNRTPFEYLDGKSESERWIKFVRNVESNKAYRLAKRSRLLRKDFGEKEAKEFRERNLNDTRYICKFFKNYVEQYLQLHEDSEAKRCVVLSGQMTSFLRARWGLVKVRGDSDRHHALDAAVVAACSHSMVKRLSDYSRCKELEQVREGFVDIDTGEILNPAMFDQIEKHFPNPWPHFRNELEARLKIDDIAFLREEMKRLGTYSEEALESLRPLFVSRAPQRRNSGAAHKDTIYAQPERLKAQGGVTQKVALSNLTLKDLGEVGNEEETCKLVDWHRNKKLYTAIRARLEQHGGKGDKAFSANNPLRKPDTKGNPTGPVVHGVTMVIDKLSGIPIRGGIAKNDSMVRVDVFTKANKFHLVPVYVQHSAPVSKGQKRVLPNRAVVAFKDEAEWTLIDDSFEFCFSLHSNDLVRVQQKGKAAIVELEALISGHMTAAYKLVKMG

SEQ ID NO: 7215 - protein, 1059 aa, synthetic construct
  REGION 1..1059: note = Synthetic
MELSPKHYVLGLDIGIASVGAALLADDHIEALFVRTFDKAETAKEGESLNKIRRDARLVRRRLRRRVQRLLKLRRLFKRVGLLKQQNEIFDHAVLVSPWQLRSDGLGRKLASLEWANVLYHLVKHRGFQSNRKSELKNDEDKNMGEMLCSIAENQTLLAHYRTVGEMVWKDERFTLAKRNKGGSYNHTLSRADLAAELRLLFTQQRQLGNPHAANDFEQEVMSLLMERRPMQNILHLVGKCTFEPGEYRAPKACYSSERFVWLTKLNNLKIAGIGTARPLSPEERQLLMPLPFSQSKLTYKQVRKILGLGEAERFVGLDCRGDKDPEGKIALFEAKAFHKLRDKYEKSGLVTQWQRDSRDFGRLNDLGYALTVFKEDSETKAWLTDRGFEPEVIEAVLEISFTHVIRLSLKALDKILPYMERGLRYDEAVQEAGYAHHSQIQGESRTKTIPAISRDDIANPVVYRSLNQARKLVNAIVEKYGAPHSVNIELARDLNKPLSERQRIKKDQDKYRDTKEKDYAQFIETFGLQPRGDELLKWRLYREQNGQCAYSQKPLEITRLFESGYAEIDHALPYSRSFDDGLNNKVLVHAKENRDKGNRTPCEYLRGADDTQEWQQFVAWVVANKNYRMAKRQRLLRKDFGEKEANEFRERNLTDTRYACKKFKELVETHLQLADGSESKCCVVVSGQLTAYLRARWGLNKVRSNGDLHHALDAAVVAGCTRAMVKRLADYSRCKELAMVRGEFVDPETGEVLDSTGLAKAEKHFPQPFEGFRAELEARLSPNPGALLPSLVDVPPIRVSRAPTRRGLGAAHQETIRSARHLDEEISSVKVPLTALRLKDVPRIAGGGDPRNQALIAAIEDRLRQHGDNGEKAFKEPLRRPAAPGKEDVAPLVRTVRLTDVQKSGVILPHRGGGIAKNASMLRVDIFSKSGKFFAVPLYVADAVKKELPNKAVVAFKSEAEWTVIDGSYSFLFSLHPNDWLKVTFKKDAPKEGYYSGLNISTGAISLWAHDRNSSVGKGGFMEGIGIKTALALEKCHVDMLGGLHRVQSEVRQPLRRK

SEQ ID NO: 7216 - protein, 1173 aa, synthetic construct
  REGION 1..1173: note = Synthetic
MRIKHDFGPLTFGFDIGMASVGWAVLNATQIVDLGVRCFDKAETAKEGESLNLARRMARLTRNRLRQRAWRLTKLVRVLKKAGLIEGKETLYAPRPDLDNPWVLRVNGLDRKLTVDEWARVIYHLCKHRGFFWQSRAEEKKAEGDAKGEGGKVKQGLARTRALLADKDYRSAGEMVLNEFPDAQRNKRGDYNKALSRVLLGDEFRLLFNRQRELGNAYATAGLEKELIGTAEHRSGLFWLQKPALSGEKLLAMLGKCTFEKNEYRAPKASFTAERHVWLTRLTNVRLIDDGRTRSLNEIEWRTALTLPYESPEKFTYKHLRKVLVKLGASESFRFAGLAYPSARQRDEGKAKDPEIETLVKLPAWHELKAAFKKAELESEWQQISTAAIEGDPKTLDEIAWILSVYKEDDEVVRELSKLNLPNAEKMIDVLLDIRFDKFHSLSLKALRNILPHMERGLRYDEACIKANYHHSQLFKLGEGNQKYLPSLYKGRDKKKRMIFNEEIGDIPRNPVVLRALNQARKVLNALVHTYGSPTAVHIEMARELSKPFDERRDIKKDQDEYRALNQKDKSTFASEYNIVGSPRGGDFEKWKLYREQRGKCAYSLATIDINRLLEEGYVEIDHALPYSRSFDDSKNNKVLALTRENRNKGNKTPYEYLDGSSNSERWRQFVGFVESNKAYRIAKRSRLLRKDFGLEESKEFRERNLNDTRYICKFFKNQVEQFLKLHDKSEQKRCVVLSGQLTSFLRARWSLIKVRDESDRHHALDAVVIAACSHSMVKRMSDYSRRRELRQVSEGFVDVTTGEIPNPVMYDKLKEHFPDPWPHFRDEVQVRLKIDDTKLLREELARFGSYAPEVINQINGVFVSRAPQRRSGGAAHKETIYARARQAHALWVTEKGSKSSRPASGKELSNLVIERIGLEEKDQKGKFKITLNNLDLIVDPVRNEKQIYSLRQWLEGRDRREAEAKLIEANTGRGKEKRSLTAEEEAQIFELRGYPRKPLKSDPEHGPFTGPEMKTVKLNVGKTTGITVRGGVAANATMLRVDVFTKGGKFHLVPIYVHHRAKGLPNHAIVSGKDEDEWTLIDESFAWYFSLYPNDLLRVAQKGKAAISGYFSGCNRRNGSIDLWAQDRNKLIGNNGLIESIGVKTALTVEKFHVDVLGNIFPAQPEPRRGLA

SEQ ID NO: 7217 - protein, 1169 aa, synthetic construct
  REGION 1..1169: note = Synthetic
LSPKVKAWQVSLPGFWVRTGSFDPSLLQQRLSPRITTIGDKYNKGGFMTQYVFGLDIGIASVGWAVLGDTRIVDVGVRCFDKAETAKEGDPLNLARRQARLLRRRLYRRAWRLTQLARLLKREGLIDNAKLFAQSPSFTDSAWELRRQGLDRLLTPLEWARVIYHLCKHRGFHWMSKAEEAKADSDAEGGRVKKGLKDTAARMAEKGYRSAAEMVLAEFPSAQRNKHGQYDKALSRMLLGEELALLFATQRRLGNPHASEHFETQILGNGDRRSGLFWQQKPALAGADLLKMLGKCTFEKNEFRAPKASFSAERHTWLTRLNNLRVIENGRSRPLNDAERTAALLLPYQTESFKYATLKKAFIKKGLWSDEMRFGGLAYPSRAQAESDKAKDPEDQFLVKLPTWHELRKAFNKVGQEALWQRISTPALDGRPELLDQIAWVLSVYKDGAEIEQQLRLLALPEPDICIPILEKISFDKFSSLSFKALRRIVPLMQTGLRYDEAVAQIPEYGHHSQRIDPDAPKRLHLPPFYQDQRKYSGKNDHVGSMQFREDANVPRNPVVLRALNQARKVVNALIRRYGSPIAVHIEMARDLSRPLDERNKVKKAQEEFRDRNDKARTDFERDFGYKPKAAAFEKWMLYREQFGQCAYSQEPLDIQRVLDDPNYAQVDHALPYSRSYDDGKNNKVLVLTRQNQNKGNRTPYEYLTALDGGQEGERWRAFSAWVQGNKSYRMAKRNRLLRKSYGAEESKGFIDRNLNDTRYICKFFKNYVEEHLQLAERADGETTRRCVVVNGQLTAFLRARWGLAKVRGDSDRHHALDATVVAACTHGMVKRLADYSRRKELELLQEGFPDPETGDIINPAAFDRVRQHFPEPWAHFRHEVQARLFTDDLTKLREDMQRLGTYTAEDLTALRTLFVSRAPQRRNGGAVHKDTIYAQPESLKVQGGVIEKVQLTSLTLKDLDNLVEPHRNERLYAAIRTRLEDHGGKADKAFGPDNPLHKPDKNGQPTGPVVRSVKLVRNKQSGIPIRGGLAKNDSMLRVDVFTKAGKFHLVPVYVHHRVTGLPNRAIVAFKNEDEWTQIDDSFAFLFSIYPNDFLRVTLKKERFDGYYSSTDRSTGAVTLWAHDRAASVGKDGLIRGIGVKTALSIEKFNVDVLGHIYPAPLEVRRGLA

SEQ ID NO: 7218 - protein, 1117 aa, synthetic construct
  REGION 1..1117: note = Synthetic
MSVKSASAGSPTFGLDIGIASVGWAVLAPDRIIALGVRAFDKAETAKEGDSLNLVRRTARLARRRLRRRAWRLTKLARLLKRQGVIDDPRLFQPQHPFPHSLWQLRKEGLDRQLNAEEWARTLYHLCKHRGFHWTSRAEEKKAEADTKSEGGKVKQGLAGTAKLMQEKQYRSAAEMVLAEFPDAQRNKQGDYGKALSRVLLGKELALLFRKQRELGNPHAEPALEAAILGNGGRKSGLFWLQKPALAGNDLLKMIGKCTLEKGEYRAPKASFTAERHVWLTRLNNLRVVVDGRTRPLDEEERRIALPLPYSQIGDFTYKQLRSALVKAGRLPESFRFPGLPYPSASQQAEGKAKDPETAALVKLPAWQEIRSTLKKAGLETEWEGMAGAAIDGRAELLDQIAWVLSVYKEDEEVVTELGKLTLPGAGVMIDALLGIRFEKFHALSLKALRKIVPHMETGLRYDEACEQAGYHHSQLHVVGEGEHKYLPPLYSGRDKDGRMVFSEDMDVPRNPVVMRALNQARKVVNALVRHYGAPGAVHIELARDLSKPFDERKKIVKDQAEYREQNEKDKARFAEHFGQLPKGVEFEKWRLYREQQCKCAYSIEPIDLGRLLEPGYVEIDHALPYSRSFDDSKNNKALVHAKENRDKGNRTPYEYLDGSSDGPRWRQFVAFVESNKAYRLAKRSRLLRKDFGEKESAEFRERNLNDTRYICRFFNNYVEQYLKLADSSETKRCVVVSGQLTSFLRARWGLIKVRGDSDRHHALDATVVAACSHSMVKRLSDYARRKELKQVHEGFVDLETGEIVNPAMFQQLRQHFPDPWPHFRQELEVRLNVDDPMRMRAELEMLGNYPADELNVVQPLFVSRAPQRRNSGAAHKDTIYGQPERLKAQGGVTQKKPLTSLTLKDLDSLIDPHRNEKLYAAIRARLEANAGKGDKAFPASNPLHKPDRDGNPTGPIVRTVTQVIDKLSGISVRGGISKNDSMLRVDVFTKDDRFHLVPVYVHHRVKGLPNRAIIAFKDEEIWTLIDDSYAWCFSLYPNDLVRVSQKGKTPILGYYSSCHRGTGNINIWAHDRNQQVGKEGMIEGIGVKTALSLEKFHVDVLGNVFPARPERRRGLA

SEQ ID NO: 7219 - protein, 1203 aa, synthetic construct
  REGION 1..1203: note = Synthetic
MRVNQSFTPLDQFIFGFDIGIASVGWCVLGENRIVDLGVRCFDKAETAKEGESLNLARRTARLMRRRLRRRAWRLTKLARLLKREGLIDSIQSIHQPSAKSLWQLRVEGLDRKLSPEEWAHILYHLCKHRGFHWISRAEEKKAEEDSKGEGGKVKKGLQDTKRRMNEKNYRSAAEMVVQEFPDAQRNKRGEYSKALSRVLLAEELALLFRQQREYGNPHATPELEMHIVGCGDRESGLFWEQKPALPRENLLKMLGRCTFEKNEYRAPKASFTAERHVWLTKLVNLKIVVDGVTRRLQPEEVKAVVSLPYEYNSALKYRQLHSALVKKGLLSESFVFSGLTGKKDKDPLDQTLVAIPAWQAIRGTLEKAELKIEWQGIAGAATGGNPELFDRIAWVLSVFKDGDEVEQELRKLPLPGGEKMIEALSEISFDKFHNLSLKALRKIVPHMEAGLRYDEACEQAGYHHSQLFKAGEGQHKYLPPFYAGRDKDGRMVFDDKEDIPRNPVVLRSLNQARKVLNALVRRYGSPAAVHIEMARDLSRPMDERNKIKKAQDEFRDKNEKAKVDFAAEYDMPAKSREFEKFMLYREQQGKCAYSLKPLDLDRVLREQGYTEVDHVLPYSRSYDNSKNNKVLVFSRENRDKGNRTPYEYLTSFAGGENGEHWRNFVAYVESNKSYRLAKRSRLLRKNFGKDESKEFMERNLNDTRYICKFFKGYVERHLQLAEGSDSKRCTVLSGQLTAFLRARWGLTKVRGDSDRHHALDAAVVAACSHALVKRLSDYSRRKELEQAGKVIDAETGEILDPELLSKLERHFPQPWGYFREELLLRLNTDDPVLLKSEAERYGYPPEALESLRPLFVSRAPQRRNSGAAHKETIYGKNALPEQALSTAIQRVDVAQLQEKHLNMLVGGSDKRNNGLRLSLEQYLKNIKLAEEIEQNLGKGKERRKPTLEEEEHIKCLRELPRKPKKEDSSDGPYSGNIIKKVKVIITRTSGCYIRHGIAELGKVQFTKLYRLNDEFFFQPCYALNNEVIFGMEPIPVSAQDTGIRLYDNDVVRISHPNLSQCYKEIRRYKNEAGDLLIDIEAVFHDGVFFGYWAYFEPSNDRPVVQLHDSASFYLLASGKQCEETKLTIVAKEKRSKHTSSVQKVKEYEYIELNPPYDRKPLSFSLEKDIKRQIVTATRIEKFHVDTLGNTYPAPPEECRGLA

SEQ ID NO: 7220 - protein, 1149 aa, synthetic construct
  REGION 1..1149: note = Synthetic
LRPLLIAATALTPDNHNRAEYSKGGLMAQYVFGLDIGIASVGWAVLDEQRIIDLGVRCFDKAETAKEGDPLNLTRRQARLLRRRLYRRAWRLTQLARLLRREGLIADAKLFVQSPTFTDSAWELRRQALDRLLTPLEWARVIYHLCKHRGFHWTSKAEEAKADSDAEGGRVKKGLKDTAARMREKGYRSAAEMVLAEFPDAQRNKGGQYDKALSRVLLGEEMALLFASQRRLGNPHASERFEALILGSGDRRSGLFWQQKPALAGADLLKMLGNCTFEKDEYRAPKASFSAERHVWLTRLNNLRIVVDGRSRPLNEAERKAALPLPYQTESFKYKTLKTALVKAGLWGDELRFGGLAYPSSEQTEADKAKDPEDQVLVKLPAWHELRKAFKEQPSLWQRLSMPALEGNPDLLDKIATVLCVYKDGVEVEQQLRQLPLPEPDACIAVLEKISFDKFSSLSLKALRRIVPLMEAGARYDEAVAQIPEYGHHSQRVSADAAKRLYLPPFYETQRKYGKNDRVGSMQFREDANIPRNPVVLRALNQARKVVNALVREYGSPMAVHIEMARDLSRPLDERNKVKKAQDEFRDRNDKARTDFEKDFGYKPKAAAFEKWMLYREQLGQCAYSQQALDIQRVLDDPNYAQVDHALPYSRSYDDSKNNKVLVHTRENQNKGNRTAFEYLTGFPGGEDGERWRAFVAWVQGNKAYRMAKRSRLLRRNYGPEESSGFIDRNLNDTRYICKFFKNYVEEHLQLTPRADGETNRRCVVVNGQLTSFLRARWGLTKVRSDSDRHHALDAAVVAACTHGMVKALADYARRRELGFLQEGFPDPTTGEILNPAAFDRARQHFPEPWVHFRHELQARLFTDDVTALREDMHRLGTYADDDLKPLRTLFVSRAPQRRNGGAVHKETIYAKPERLLAREETQGSVIEKVALSSLKLQDLDTLVEPHRNERLYAAIRQRLEAHGGKAEKAFGPDNPLHKPDKDGLPTGPLVRSVKRVVKQTGIPIRGGLAKNDSMLRVDVFTKVGRFHLVPVYVHHRVTGLPSLAIVQGKDESEWTQIDDSFAFLFSVYPNDFVRVQQRGKSAIEGYFSSAHRGTGNINLWLHDRNTTSHKQGAIEGIGVKTALTLEKFNVDVLGRIYPAPPEVRRGLA

SEQ ID NO: 7221 - protein, 1184 aa, synthetic construct
  REGION 1..1184: note = Synthetic
LDTDEAFAKSLLQQRLSPRIATTRRMIGEERMTGNPSPTSAHDASQPPVAKPKLYRGLTKDQINALGPLTFGFDIGIASVGWAVLSETRIVDLGVRCFDKAETADKGESLNLARRTARLLRRRLRRRAWRLTKLARCLRRHGVLQDAKYFSKEPSFGDSTWVLRDAARSRLLQPIEWARVIFHLCKHRGFHWISKAEALAADGDAASESGRVKKGLAETSRMMREKGYETAAQMVLAEFPESQRNKRGEYSKALSRVLLDQEFRLLFERQRGFGNTLASAALEAEVLGSGDRRSGLFWAQKPPLAGADLLKMLGKCTFEREEYRAPKASFTAERHVWLTRLNNLRMTVDGITRPLDESERALALALPYVSGEKFSYKNLRTALEKAGLPKSFRFAGLSYPSERQREENKAKDPEGEVLIKLPAWHELRLAFKRADSETIWQKLSTDSLAGRPEQLDQIAWVLSVYKDDEEVERELRKLALPDAETSIEILLGIRFDKFHALSIKALRQIVPKMERGKRYDEAVAAIPEYAHHSQPESRRHEKRTLLPSFYRGADRSGKLLFNENLDIPRNPVVLRALNQARKVLNALVKVYGSPAQVNIEMARDLSRPLDERKKVKRLQDEFRERNEASKEHFASCFERKPTGIEHEKWLLFREQHSKCAYSLLPLDANRVVNDPTYVEIDHALPYSRSYDDSKNNKVLVLKVENQRKGNRTPFEYLTSFEGGENSARWREFVGFVESNKAYRQAKRSRLLRKNYGKDEAKSFMERNLNDTRYICKFFKNLVEQHLQLAETSDSKRCVVLNGQLTSFLRARWGLLKVREESDRHHALDSVVVAACDHGMVKRLSDYARRRELESVSSGFVDLETGEIIDGAMLARLEKDFPAPWEHFRHELEARLKLDDLTFMRETLSMLGNYDESALGAAKPLFVSRAPQRRNGGAAHKETIYSQPPDSVLAQEGAVKQRVALTSLSIKDLDRLVDPDRNERLYTAIRERMEEFGGKADKAFAADKPLYKPDKFGALIGPIVRCVNVRIDKMSGIPIRAGIAKNDTMLRVDVFQSKKDKRFHLVPVYVHHRVTGLPNRAIVAFKDETDWTEIDDSFGFLFSLCPNDLIEITQKGKAAIRGYYASCHRGTGNVNLWAHDRSSNVGKAGAIEGLGVKTAVSLVKLNADVLGNIFPAPSETRRDLA

SEQ ID NO: 7222 - protein, 1125 aa, synthetic construct
  REGION 1..1125: note = Synthetic
MSMTYTIGLDIGIASVGWCVLGETHIIDLGVRAFDKAETAKEGESLNLARRSARLMRRRLFRRAWRLKKLARLLKSEGLIADTKAFQPEHTFTRPLWQLRVDGLDRSLNDEEWARVIYHLCKHRGFHWISRAEAKQAEGDSKSEGGKVKQGLAGTARLMAEKGYRSAAEMVLGEFPEAQRNKQGEYTKALARELLAKELALLFEKQREFGNPHASSALQTAILGNGDKKSGLFWQQKPALAGADLLKMLGTCTFEKGEYRAPKASFTAERHVWLTRLNNLRIVTDGVTRQLTEQERQLCLPLPYQQAGDLTYKQLGTALTKAGLLEVGSFKFTGLAYPTEAQKAEGKAKDPESATLIKIPAWQELRQTLAKAGLDDEWKKLSGDALCGQPEIFDQIAWVLSVYKDDDEVRAELAKLSLPNHDALIDALLNIRFDKFHALSLKALRAIVPPMEKGLRYDEACVEAGYHHSQLFSSTDDKEVYLPPFYEQSRGHKRGEEGKMLFSERLDEEITGGIPRNPVVLRALNQARKVVNAIIRRYGSPSAVHIEMARDLSRPLDERNKIKKEQDEYRARNQRDRERFIELFKRPPKGNEFDKWRLYHEQNSQCPYSQKPLAPSGDVAEIFLEGSTEIDHALPYSRSFDDSKNNKVLVLTRENRDKGNRTPYEYLGGAENSERWQRYVAFVEANKAYRLAKRTRLLRKDFGEKEAEEFKERNLNDTRYICKFFKNYVERYLKLADGSHDKQCVVLSGQLTSFLRARWGLLKIRSDSDRHHALDAAVVAACSRSMVQRLSNYSRTRELEQIRDGFVDIATGEIINPAMHQQLREHFPDPWPYFRHELEARLKIDSPELLREEMARLGSYSEEELATLKPLFVSRAPQRRNGGAAHKDTIYGQPEKFKEKGSVTQKVALSSLTLKDLDSLADPHRNTKLYGAIRERLEAYGGKGDKAFPASNPLRKPDKDGNPTGPIVRTVTKVIDKLSGIPVRGGIAKNDTMLRVDVFTKAGKFHLVPVYVHHRVTGLPNRAIVAFKDEEEWTLIDESFEWCFSLYPNDLVQIKLKGEFYLGYYAGCDRATGAIGLWVHDRNANVGKDGLMRIGAKTASSVEKFHVDTLGNIYPAPPEKRRGLA

SEQ ID NO: 7223 - protein, 1116 aa, synthetic construct
  REGION 1..1116: note = Synthetic
MSATYTIGLDIGIASVGWCALGETHILDLGVRAFDKAETAKEGESLNLARRTARLMRRRLFRRAWRLKKLARLLKSEGLITDTKLFKPEQPFSASLWQLRVEGLDRHLNEEEWARVIYHLCKHRGFHWISRAEEKQAEGDGKGESGKVKQGLAGTTKLMAEKGYRSAAEMVLAEFPEAQRNKQGEYRKALSRVLLAKELALLFAQQRKLGNSYASSELETAVLGTGDRKSGLFWQQKPALAGIDLLKMLGTCTFEKGEYRAPKASFTAERHVWLTRLNNLRIVTDGVTRQLTEQERQLCLPLPYQQAGDLTYKQLGTALTKAGLQEAGNFKFAGLAYPTEAQKTEGKAKDPESSTLVKIPAWQELRQTLTKAGLDDEWKKISGDALCGQPEIFDQIAWVLSVYKDDDEVRDELSKLALPNPDALIDALLNIRFDKFHALSLKALRAIVPHMEKGLRYDEACVQAGYHHSQLHKVGEGEHKYLPPLYAGRDGNGRMIFADDADIPRNPVVLRSLNQARKVVNAIVRRYGSPAAVHIEMARDLSRPFDERNKIKKEQDEYQARNQRDREQFIELFGHPPKGQEFEKWRLYREQNGQCAYSQKPLASSGDVAEIFLDGSTEIDHALPYSRSFDDSKNNKVLVLTRENRDKGNRTPFEYLGGAENSERWQRFVSFVESNKAYRLAKRTRLLRKDFGSKEAEEFRERNLNDTRYICRFFKNYVERYLKLADGSEAKRCVVVSGQLTSFLRARWGLLKVRADSDRHHALDATVVAACSHSMVKRLSDYSRTRELEQVRDGFVDIETGEIVNPAMHQQLREHFPDPWPYFRHELEARLKIDSPELLREEMSRLGSYSEEELAALKPLFVSRAPQRRNGGAAHKDTIYGQPEKMKENGSVTQKVPLSNLTLKDLDSLVDPHRNVKLYAAIRERLETHGGKGEKAFPATNPLRKPDKDGNPTGPIVRTVTKMIDKLSGIPVRGGIAKNDSMLRVDVFTKAGKFHLVPVYVHHRVTGLPNRAIIAFKDEEEWTPIDESFQFLFTLHPNDLVRVIQKGKQPIWGYYSSCHRGTGNLNIWAHDRSNAIGKDGMQEGIGVKTALSLQKFHVDVLGNIYPAPPEKRRGLA

SEQ ID NO: 7224 - protein, 1124 aa, synthetic construct
  REGION 1..1124: note = Synthetic
MESRYTLGLDIGIASVGWCLLGENRIIDLGVRAFDKAETAKEGDPLNLTRRMARLARHRLAQRAWRLKKLTRELKRHGLIDDTRFFQPTNPVTTSPWQLRVQGLDRKLETDEWARVIYHLCKHRGFHWVSRADKKKSEGDAKGEGGRVTAALNDTSKRIDGYRSAAEMVIHEFLKPAQTDNGLPLLDKIGQPIPSGAARNKRGEYTKALSRVLLGDELKQLFAEQCRLGNPLASESLETAILGNGDRKSGLFWMQKPPLSGAALLKMLGKCTFEKGEFRAPKASFTAERHVWLTRLNNLRIVVDGETRPLDAEERAIALPLPYKQAKELTYKQLHSALVKSGRLPETFEFAGLRPTKDGKDPKSERLVKLPAWQELRATLKAAGLETEWESLAGAAGRGQPQILDEIARVLSIYKDDDEARAELNKLALPNREAMVEALLDIRFDKFHALSLMALYKIVPRMEAGLRYDEAVAAIPEYGHHSQLHKPGEGASRTLPPLYAGRNPDGRMRFAEDEDIPRNPVVLRALNQARKVVNAIVRRYGSPMAVNIEMARDLSRPLDERNKIRKEQEDYRARNEKDKAFFAEEFGQAPKGGEFEKFRLYREQLGKCAYSQEGIVIERLLEAGYVEIDHALPYSRSFDDSKNNKVLVLAKENRDKGNRTPYEYLGGEENSFRWQQFVAFVESTKSYRLAKRSRLLRKDFGAKEAEDFKERNLNDTRYICKFFKNYVERHLKLADGSEAQRCVVLSGQMTAFLRARWGINKIRSESDRHHALDAAVVAACTHGMVKRLADYSRTKELAQVHTGFVDTTTGEIVDPAIFRQLKQHFPEPWPHFRHELEARLKIDNPALLREEMTHLGTYDTTALDEIRPLFVSRAPQRRNGGAAHKDTIYGQPEKLRENGSVTQKVPLTSLTLKDLDKLIDPHRNARLYAAIRERLEAHGGKGDKAFPPDNPLRKPARAGKPTGPVVRTVTMLIDKLSGIPVRGGIAKNDSMLRVDVFTKAGKFHLVPVYVHHKVAGLPNRAIVAFKDEAEWTLIDDSFAWCFSLYPNDLVQITLKSESHLGYYAGVDRSTGGVSLWAHDRNHSVGKEGLIRGIGVKTALSVEKLHVDTLGNIHPAKSEPRRGLA

SEQ ID NO: 7225 - protein, 1122 aa, synthetic construct
  REGION 1..1122: note = Synthetic
MVDKTLGPLTFGFDIGIASVGWCVLAENRIIDLGVRCFDKAETAKEGESLNLARRTARLMRRRLRRRAWRLIKLARLLRHTGLVADTDQLHQPSAVSPWRLRVEGLDRRLTDGEWACVIYHICKHRGFHWISRAEERKAEGDAKGEGGRVKKGLADTQRRMQEKGYRSAAEMVLAEFPDTQRNKQGDYSKALSRILLGEELARLFKRQHELGNTHADAGLEAKILGVGDRKSGLFWEQKPPLAGVDLLKMLGKCTFEKDEYRAPKASFTAERHVWLTRLSNLRIIIDGATRPLDEEERRAALPLPYKQASDLTYKQLRVALTKAGLLPDSFRFAGLNYPYGKQPDEAKVKDPETEKLIKLPAWQELRKTLKDKGLETEWEGMAGAATGGDPTLLDEVARVLSVYKDGDEVTAELRKLPLPGGERMIDALSEISFDKFHALSLKALRRIVPHMEAGLRYDEACAAAGYHHSQLHAAGGGEQTYLPPLYSGRDKDGRMVFKEDLDIPRNPVVLRSLNQARKVLNALVRAYGSPAAVHIEMARDLSRPLDERNKVKKAQDEYRERNEKDKAAFAAEFDMPAKSREFERFQLYREQQGKCAYSLKPLDLNRVLRDIGYAEVDHALPYSRSYDDSKNNKVLVLTEENRNKGNRTAYEYLSSFPGGEDGERWHNFKIWVESNKSYRQAKKTRLLRKDFGDKAAEEFRERNLNDTRYICRFFTNYVERHLKMAAGDDGTAAKRCVVLNGQATAFLRARWGLSKVRGGSDRHHALDSAVVAACSHGMIKRLGDYARTRELEKVRDGFPDPETGEIVDPAKYQQLHTHFPDPWPHFRSELKIRLGVDDENELRERLAMFDTYPPEALAAVRPLFVSRAPQRRNGGAAHKDTIYAQPERLKPQGSVTQKVPLSSLALKDMEKLIDPHRNEKLYAAIRARLEAHGGKGDRAFPPDNPLCKPDRDGNPTGPIVRTVTMVIDKLSGIQIRSGIAKNDSMLRVDVFRSRKDGKFHLVPVYVHHAVARALPNRAIVAFKDEDEWTVMNGDFDFHFSVHPNDMLRITLKKEKHLGYFASCNRSTGAFNLWLHDRNSREGKGGMIESIGIKTAVAVEKFHVDVLGNIYPAQPETRRGLA

SEQ ID NO: 7226 - protein, 1166 aa, synthetic construct
  REGION 1..1166: note = Synthetic
MNYYNGFIITENAMTSKQDNLGALTFGLDIGIASVGWAVLGENRIIDLGVRCFDKAETAKEGESLNLARRTARLLRRRLRRRAWRLTKLARLLKREGLIADANLFKLKIEKNTPVPKSAWQLRVDALDRPLSAEEWARVIYHLCKHRGFHWISRAEEKAAESDSKSEGGKVKQGLAGTKRLMAEKGYRTAAEMVITEFFTQRVDEDGKPALTKKTSEPILDGAARNKQGDYSKALSRILLGDELKKLFEHQRQLGNPFATEKLEAAILGNGDRKSGLFWAQNPALAGNDLLKMLGHCTFEKSEYRAPKASFTAERHVWLTRLNNLRIVVDGTTRPLNEVERRIALMPYQQAGDFTYKQLRTALTKAGYLPGSFRYTGLSYASGQKTDEKTKDPESATLVKLPAWQELRKTLEKKELASEWQKISTDALEGRPQLLDDIAWVLSVYKDDDEVKAELSKLNLPNPEKMIDALLDIRFDKFSNLSLKALRQIVPLMEQGQRYDEAVANIPEYGHHSQLHKVGAGVHKYLPPFYKERDKTGRMVFNDDMDIPRNPVVLRALNQARKVVNALIKEYGSPHDVHIEMARDLSRPLDERRDIEKLQKEFRDNNEKGKAQFAQDFNIMGAVKGKEFEKYQLYREQQGKCAYSIEPIDIHRLFEQGYVEIDHALPRSRSFDYSKNNKVLVHIKENQNKGNRTPFEYLDGKDNSERWRQFVAFVEGNKAYRLAKCSRLLRKDFGEKEAKEFRERNLNDTRYICKFFKNYVEQYLQLHEDSEAKRCVVLSGQMTSFLRARWGLVKVRSDSDRHHALDAAVVAACSHGMVKRLSDYSRCKELKQVREGFVDVTTGEIPNPAMFDQLEQHFPKPWENFRNELEARLKIDDIALLREEMQRLGTYSEEALEATRPLFVSRAPQRRNSGAAHKDTIYAQAPSSDKPNRVTQKVALTNLTLSDLGKIDDSDTCKLIDPHRNKKLYDAIRMRLEQHGGKGDKAFPASNPLRKPDHEGNPSGPIVRGVTMVIDKLSGIPIRGGIAKNDSMVRVDIFTKANKFHLVPVYVHHTVAKTLPNRAVVAFKDEDEWTLIDDSFQFCFSMYPNDLLRVKLKNASHLGYYAGCNRSTGAINLWSHDRNHLVGKDGMIESIGLKTALSIEKFNVDVLGNLFSAPPEKRRDLA

SEQ ID NO: 7227 - protein, 1118 aa, synthetic construct
  REGION 1..1118: note = Synthetic
MREEDMLGKPTDPLTFGFDIGIASVGWCVLGEKHIVDLGVRCFDKAETAKEGESLNLARRTARLMRRRLRRRAWRLTKLARLLKREGLIDSVQTIHQPAAKSPWQLRVEGLDRKLAPQEWAQVLYHLCKHRGFYWISRAEEKKAEADGEGGKVKKGLQDTKRRMNEKNYRSAAEMVLKEFPDAQRNKQGEYSKALSRLLLAEELVLLFKRQREYGNPHATPDLETHIVGCGDRKSGLFWEQKPALSGEKLLKMLGRCTFEKSEYRAPKASFTAERHVWLTRLNNLRIVVGGNARPLNEAERSIALPLPYQQASDFTYKQLKSALFKAGLLPENVRFTGLAYPTQQTENKAKDPESERLVKLPAWQELRKTLKEKGLETEWQSIAGAAAGGQPELLDQIAWTLSVFKDGDEVERELRKLSLPGGEKMIEALSEISFDKFHNLSLKALRKIVPHMEAGLRYDEACEKAGYHHSQLFKAGEGQYKYLPPFYSGRDKDGRMVFDDKEDIPRNPVVLRSLNQARKVLNALVSRYGSPSAVHIEMARDLSRPMDERNKVKKAQEEFRDRNEKAKADFMAEFNMPAKSREFEKYMLYREQHGKCAYSLKPLDLDRVLHDQGYAEVDHALPYSRSYDDSKNNKVLVFASENRNKGNRTPYEYLTSFAGGENGEHWRSYAAFVESNKSYRIAKRSRLLRKNFGQDESSEFKERNLNDTRYICKFFKNYIERHLQLAEGSDSKRCVVLSGQLTAFLRARWGLTKVRGDSDRHHALDATVVAACSHALVKRLSDYSRRKELKHAENAIDAETGEIFDLDLLSKLEQHFPKPWEYFREELLLRLNTDDPALLKSEAERYGYPPKTVENLRPLFVSRAPQRRNGGAAHKDTIYSQPERLKSKGSVTQKVPLTGLTLKDMDNLIDPHRNEKLYAAIRARLEAHGGKGDKAFPSDNPLHKPDRNGNPTGPVVRTVTMIIDKLSGIPVRGGIAKNDTMLRVDVFRHKKDKKYHLVPVYIHHAVAKELPNRAIVQAKDENDWTLIDEGNFDFCFSLYPNDLLKIGLKNVVIQGYYASCDRSTGNIGLWMHDRNTAIGKDGFIRTGVKTALFLEKFHVDSLGNIYPAPPEERRGLA

SEQ ID NO: 7228 - protein, 957 aa, synthetic construct
  REGION 1..957: note = Synthetic
MADKSYRTAAEMVLAEFPEAQRNKQGDYSKALSRILLGDELKTLFEHQRKLGNFFATEKLETAILGNGDRRSGLFWAQNPALAGSNLLEMLGHCTFEKAEYRAPKASFTAERHVWFTRLNNLRIVVDGTTRPLNEMERRIALPMPYQQAGDLTYKQLRAALIKAGCLPESFRYTGLSYVSGQKADEKVKDLESAALVKIPAWQELHKTLEKKGLASEWQKISTDALEGRPELLDQIAWVLSIYKEDAEVEAELRKLSLPNAEKMVDALLDIRFDKFSNLSLKALRQIVPLMEQGQRYDEAVANIPEYGHHSQLHKAGEGEHKYLPPFYKERDKTGRMVFNDDMDIPRNPVVLRALNQARKVVNALIKKYGSPHEVHIEMARDLSRPLDERRDIEKLQKEFRDNNEKGKAQFAQDFNIVGAVKGKEFEKYQLYREQQGKCAYSVEPIDIHRLFEQGYVEIDHALPYSRSFDDSKNNRVLVLAKENRDKGNRTPFEYLDGKDDSARWRQFVAFVESNKAYRLAKRSRLLRKDFGEKEAKEFRERNLNDTRYICKFFKNYVEQYLQLHEDSEAKRCVVLSGQMTSFLRLKWGFVKIRGDSDRHHALDAAVVAACSHGMVKRLSDYSRRKEMRQVREGFVDVTTGEIPNPAMYDQLVNDFPDPWPHFHNEVKARLNIDNPALLREEMQRLGTYSEGALDATRPLFVSRAPQRRNSGAAHKDTIYAQPERLVAQGGVTQKVALSSLTLKDLDKLIDPHRNERLYAAIRTRLEQHGGKGDKAFPASNPLRKPDSDGNPTGPIVRGVTMVIDKLSGIPIRGGIAKNDSMVRVDVFTKANKFHLVPVYVHHTVTKALPNRAIVQAKDEAEWTLIDDSFSFCFSLHPNDLVQVQQKGKTAILGYYSSCHRGTGSLNLWAHDRSIQVGKDGMTESIGVKTALSIDKFNVDVLGNRYPAPPEKRRDLA

SEQ ID NO: 7229 - protein, 800 aa, synthetic construct
  REGION 1..800: note = Synthetic
  REGION 763..764: note = misc_feature - Xaa can be any naturally occurring amino acid
MREEGMTSNTHGPLTFGFDIGIASVGWCVLGEDRIVDLGVRCFDKAETAKEGESLNLVRRMARLMRRRLRRRAWRLTKLARLLKREGLIDDTALLRQPTPTSPWRLRADGLNRKLSADEWARVIYHLCKHRGFHWISRAEEKKAESDAKGEGGRVKKGLSDTKRRMEEKGYRSAAEMVLAEFPDSQRNKQGDYGKALSRVLLADEMALLFQKQREFGNTHAGAVLEAQILDRKSGLLWAQKPALSGEAMLDRIGRCTFERASVGRPGGPDGKGEYRAPKANFTAERHVWLTRLNNLRIVVDGEARPLNAEERRVALPLPYEQASDLTYKQLHAALVKKGLLPESFEFTGLRASKDKDPKAERLVRLPAWQELRKKLKEHGLETEWESIAGAATGGDPTLLDEIARVLSVYKDGDEVIGELRRLTLPGGQPMIDALSEVSFDKFHALSLKALRKIVPHMEGGMRYDEACAAAGYHHSQLQKVGAGEDKYLPPLYSGRDKEGRMIFRDDLDVPRNPVVLRALNQARKVMNALIRRHGSPSAVHIEMARDLSRPMDERNKVKKAQEEYRDRNEKDKAAFMEEFKMAARSREFEKFQLYREQQGKCAYSLAPLDLHRVLNDIGYAEVDHALPYSRSFDDSKNNKVLALTEENRNKGNRTPYEYLDGANTSQRWREFTAFVESNKAYRLAKRSRLLRKDFAGKAAEEFRERNLNDTRYVCRFFKNYVEQSLKLADGSEAKRCVVLSGQMTAFLRARWGLTKVRGDSDXXSSTRKRARYPIPPCTSSFTRTSPTRGRASATNCWPD

SEQ ID NO: 7230 - protein, 1366 aa, synthetic construct
  REGION 1..1366: note = Synthetic
LQQLGNPNSKGQDMEHAQLNFSYALGLDIGMASVGAAILADDHIHALHVRTFDKAETAKEGESLNLIRREARLTRRRIRRRAFRLLRLRRLFKRIGLIASHDTADFIDAASPWNWRAEGLERKLEPTEWAAVLYHLVKHRGFQSNRKSEVAEDEKAGQMLSGVSANQVRMKAGGWRTMGEMAARDDEFAHAKRNKGGAYTHTFARADLEDELRELFAAQRQHANAHSAPEFEAAVHELLMARKPTLSGENLLKMVGKCTFEPSEYRAPKASHTAERFVWLTRLNNTRITGLGITRSLSDDERLALINLPFTQAKLTYKQARKAANLAEQERFIGLAYRADKDPESAVLFEAKAFYKLRKAYEDAGLKTEWARDAVNPERLDTLAFAQTAYKDDREAREFLAKQSVEPAIIEAVLHVSFSDFVRLSLKALRKIIPHMNAGMRYDEAVLAAGYAHHSDLNQAVTKTRRIPRINKEDFPNPVVYRALNQARKLVNAIIDEYGPPARVHIELARDLSKPWDERKQIERDQKTFRDNKEKNADKFRELFGQAPKKDQLDKLRLYDEQDGKCAYSLTPLDLRRLDENGYVEIDHALPYSRSFDNGMNNKALVLTHINRDKGNQTPYEYLGGAHDDPRWHAFEIAVRSNKKIRQAKRDRLLRKDFSETEATGFRERNLTDTRYIARAFKTLVETHLQLSDDSAAKRCVVVSGQLTAFLRARWGLLKVRADGDLHHALDAAVVAAASHSMVKRLSDHSRHNELAEVRSQFVDPVTGEVADINALRQLEAHFPSPWPHFRHELMAWLNPNPALQLEHLPDYPKQYLRFAHPVRVSRAPLRRGLGQAHQETIRSAKRLDEGLSSVKTSLENLKLKDIERIVGWDDPRNEKLIAAISQRLQTHGDDGKKAFKEPLYKPSKPGKVAPIVRSVNLTDTQKSGLPVRGGIANNGSMLRVDIFTDGKKFYAMPLYVADAVKPELPNRAVVAFKPEDEWTVMEADKGYRFLFSLHPNDWVRIQQKGKPLLEGYFSGLDRATGNISFWAHDRNQSVGKEGLIRGIGIKTALSVEKLHVDMLGRLYPAKPESTVRIPLEDISVLVIDQPQVLLTASLLSACASAQIAVITVGGDHHPNGVLLPHLPHSRALKIIRAQLALTLPRKKRLWQIIVQRKLHNQADLLDQLSHARAALTLNNLAQRVRSGDADNAEAHGAQVYFKAVFGQGFSRAQIRWHNAALNYGYSVVRSTLARNLVAYGFITALGLHHSSEQNAFNLADDLIEPFRPLIDAHVLGLIAAPGEAQGAEPPPELSRNDKAHMVQILHEDIRLHRGDAPSVIEHFSVLAACEQLVISLSQRLFDENLTLDLPARAVKKPTEDGDHEQ

SEQ ID NO: 7231 - protein, 1123 aa, synthetic construct
  REGION 1..1123: note = Synthetic
MSGKQKNLGALTFGLDIGIASVGWAVLGENRIINLGVRCFDKAETAKEGESLNLARRSARLLRRRLRRRAWRFTKLARLLKREGLIADANLFKLKIEKNTPVPKSSWQLRVDAIDRQLSAEEWARVIYHLCKHRGFHWISRAEEKAAEGDKGEGGKVKQGLAGTKKLMAEKSYRTAAEMVLKEFPDAQRNKQGDYSKALSRILLGDELKKLFEHQRELSNPLATAQLEAAILGNGDRKSGLFWAQNPTLTGDKLLEMLGYCTFEKNEHRAPKASFTAERHVWLTKLNNLRIVVDGTTRGVNEVERRLALPMPYQQAGDLTYKQLRAALTKAGFLPESFRFTGLSYASGPKADEKAKDPESGVLSKLPAWHELRKILKDAGLESEWQKISTDALEGKPELLDQIAWVLSVYKEDSEVIPELRKLSLPNAEKMIDALLDIRFDKFSNLSIKALRQIVPFMEQGQRYDEAVANIPEYGHHSQLHIVGAGEHKYLPPFYSGRDKDGRMVFNDDMDIPRNPVVLRALNQARKVVNALIKEYGSPHEVHIEMARDLSRPLDERRDIEKLQKEFRDNNEKGKAQFAQDFNIVGAVQGKEFEKYQLYREQQGKCAYTIEPIDLHRLFETGYVEIDHALPYSRSFDDSKNNRVLVFASENRNKANRTPFEYLDGKFDSPQWRSFVGFVEGNKAYRLAKRSRLLRKDFGEKESKEFRERNLNDTRYICKFFKNYVEQHLQLHEDSEAKRCVVLSGQMTSFLRARWGLIKVRSDSDRHHALDATVVAACGHGMVKRLSDYSRRKEMRQMREGFVDVTTGEIPNPTMFDQLEQHFPKPWENFRNELEARLKIDDLALLREEIQRLGTYSEEALQSVHPLFVSRAPQRRNSGAAHKDTIYAQPERFVAQGGVTQKVALSSLTLKDFDKLIDPHRNEKLYAAIRTRLEQHGGKGDKAFPASNPLHKPDREGNPTGPIVRGVTMVIDKLSGIPIRGGIAKNDSMVRVDVFTKANKFHLVPVYVHHSVAKELPNRAIVAFKDEDEWTLIDDSFQFCFSMYPNDLLRVKLKNVSHLGYYASCNRSTGAINLWSHDRNQHVGKDGMVESIGVKTALSVEKFNVDVLGNRYPAPPEKRRDLA

SEQ ID NO: 7232 - protein, 1148 aa, synthetic construct
  REGION 1..1148: note = Synthetic
MNNNNNFGQLTFGFDIGIASVGWAVLNERRVVDLGVRCFDKAETAKEGESLNLARRTARLMRRRLRRRAWRLTKVARLLKRHGLINDVTIFKPEHPFTVSLWELRKQALDRTLNAEEWARVIYHLCKHRGFHWVSKAEEKKAEADTAGESGKVKQGLAATARLMKEKGYRTAAEMVLAEFPQAQRNKQGEYSKALSRALLSEEFSMLFAAQRAMNNPYASSELEIKLLDRKTGLFWAQKPALAGEALLKMLGKCTFEKSEYRAPKASFTAERHVWLTRLNNLRVVMDGITRPLNEAERQFTLSLPYNQASDLTYKQLKAAMVKQGLWPETARFTGLSYPSLNQLKEGKAKDPETATLIKIPAFQELRKTLKDAGLETEWQGMVNAAMSGDASLLDQIAWVLSIYKDDEEVERELKALNLPSKTNMVEVLQGIRFDKFSNLSLKALRKIVPHMERGLRYDEACIEAGYHHSQLIKPDDEKLHYLPPFYSARDKTGKLIFNENIDVPRNPVVLRALNQARKVMNALIKKYGSPHQVNIEMARDLSRPLDERRKIKDAQEDFRDRNKIARDKFNETFNASGDLKGRDFEKWQLYEEQECKCAYSRETLDIHRLFEMGYVEIDHALPYSRSFDDSKNNRVLVLARENRNKGNQTPYEYLDGKNNSERWHQFEVSVNSNKAYRQAKRSRLLRKEFGKEDSAEFRDRNLNDTRYICRFFKNYVEQFLQLADTSEAKRCVVLSGQMTAFLRARWGLTKVRADSDRHHALDAAVVAACSHGMVKRLSDYSRRKELEKVSEGFVDVTTGEIANPAMYQQLKEHFPDPWPHFRQELEARRLVDDWLLMKAELANLGTYSEDELESVKPLFVSRAPQRRNSGAAHKETIYGQTERLRKMGSVTQKVVVTNLSLKDLGEVIDGERVNCKLIDPHRNEKLYAAIAIWLQGKDEREKRAKEIEASAGRGKEKRALTMDERAEIERLRALPRKPMNDGSAGPIVRTVTMVIDKLSGISIRHGVAKNDTMLRVDVFTKANKFHLVPVYVHHAVAKTLPDRAVVAFKDEDEWTLIDESFDFCFSLYPNDFVKVTLKSEIQTGYYSGCDRATGAINVWAQDRNASVGKSGLIRGIGVKTALAVEKFNVDVLGNIYPVLKEERRGLA

SEQ ID NO: 7233 - protein, 1132 aa, synthetic construct
  REGION 1..1132: note = Synthetic
MAQLIFGLDIGIASVGWAVLGETRIIDLGVRCFDKAETAKEGDPLNLTRRQARLLRRRLFRRAWRLKKLARLLQHEGLIPNAQRFVEALANGHASAPGDPEHPNTWELRRQGLDRLLTPAEWARVIYHLCKHRGFHWTSKAEEARADSDAEGGRVKQGLKNTQALMVAKGYRSAAEMILAEFPGSQRNKRGQYDKALSRVLLGQELALLFESQRRLGNPHASERLQALILGNGDRRSGLFWQQKPALSGADLLKMLGTCTFEKSEYRAPKASFSAERHVWLTRLNNLRIIDDGRTRPLNGAERQAALALPYQTENFKYKTLKNALVKAGLWTADVRFAGMAYPSQAQMEDGKAKDPEEQALVKLSAWHELRLAFKREGHEALWQRIATPALEGKPELLDQIAWVVSVYKDGEEISDQLRRLPLPEPELSVPVLEKIGFEKFSALSLKALRRIVPLMEQGLRYDEAVARIPEYGHHSQIVKPDAARHLYLPPFYQDQRKYENKSDRIGSMVFREDANIPRNPVVLRALNQARKVVNALIRRYGSPTAVHIEMARDLSRPMDERNKIQRAQEEFRDRNAKAREDFERDFGYKPKSAVFEKWMLYREQHGQCAYSQQALDIQRVLDDPNYAQIDHALPYSRSYDDSKNNKVLVLTRENQNKGNRTAYEYLTSFPGGEDGERWRNFVAWVQQNKSYRLAKRNRLLRKNFGQEESRGFIDRNLNDTRYICKFFKNYVEEHLQLAPREDGDTNRRCVVVNGQLTAFLRAKWGLTKRREESDRHHALDAAVVAACTHGMVKALADHAKAKELAFLHEGFPDPETGEILNPAAYAQGQRHFPEPWPHFRHELQSRLFTDDLDALRADLQRLGTYTEDDLKGLRTVFVSRAPQRRNGGAVHKDTIYAQPQRLKATGGVIEKVPLSSLTLKDLDRLVDPHRNVKLYDAIRQRLEAHGGKGDKAFGPGNPLRKPDKNGLPNGPLVHTVKLLREKQSGIPIRGGLAKNDSMLRVDVFTKTGKFHLLPVYVHHRVTGLPDRAIVAFKDEDEWTPIDESFSFLFSVYPNDLVRITLKRQTYLGYFASCHRGTGAFNLWAQDRSIHVGKGGAVEGIGVKTALAVEKLNVDILGHIYPAPPEVRRGLA

SEQ ID NO: 7234 - protein, 1067 aa, synthetic construct
  REGION 1..1067: note = Synthetic
MHTLPYTLGLDIGIASVGAALLSDESILGMHVRTFSAAETDKEGDPLNKIRREARSARRRIRRRAHRLLRLRRLLKRTGLISDTSLEVLKTSKTPWQLRSEGLDRLLSPSELAAALYHIVKHRGFQSNRKAELKTDAKAGQMLSGVSANQQLMRDKSYRTIAEMVCKDDAFKDHKRNKGGSYRNTFARSDLADELKTLLKKQREYDNPLATPELEEAVHTLLMARRPVFKDDDIEKLVGFCTFEHGEKRAPKAAFSSERFIWLGKLNNLRLIYPGEQRSLTPEERSQIINLPFTQASVKFSQIRKKLDLPEYVRFNLVRYKPGEETSKSETATFFEAKAFHELRKTYRESGISELWERDQHDPQRLDQIATAIAVYRDDERIRNELSPHTIENEVVEAVLNCDFTQFINLSLKALNKILPYMEQGQRYDEACTSAGYQHHSPQQNEEKSGRIPPPDKNVIRNPVVYRSLNQARKLINAITKRYGAPAAIHLEMARDLSKPFSERKSIEREQEKYRKQKVQLRNEYIEHFGTEPNGLNLLKFRLYKEQDAQCAYTQKALDLSRLNEAGYVEVDHILPYSRSYDDSLLNKTLVLTEANRDKGNRTPFEFMGGDDQSQHWQKFVRWVQMNPKIRQAKRNRYLRKDFSEKAAREFRDRHLNDTRYIGRELKAMIESHVQWHPDSKSKDHCVVLSGQLTALLRGRWGFNKDRAAGDLHHAVDAAVVAAATRGMIQRMARHSKFHELKNVRTSYADPDTGEVVNLAAARDLEKHFPLPWDNFRNDTLAYLNPSAISADESAQEGHRGVRVSRAPTRRKLGAAHQETIRSKGKDNILLEQGLSAVKTPLSKLTLKNIENMVGYEDPRNAALVKVLRERLEAFGGDGAKAFAPNQPPVYKPSKPGKQAPVVRTVNLLATQKSGISVRHGVAANDTMIRTDIFTKDGKFHAVPIYVADTASQKIPNKAVVAYKPEEEWPEMDDSYQFLFSLYPNDWLKITLKKQSFEGYYAGLDRATGAVSLWAHDRDQIKGKNGMYRGIGIKTAVSLEKCHVDILGELHRVKSEHRQPLRKGQEL

SEQ ID NO: 7235 - protein, 1155 aa, synthetic construct
  REGION 1..1155: note = Synthetic
LQQRLSPRITTIGSEYSKGGFMAQYVFGLDIGIASVGWAVLGEQRIFDLGVRCFDKAETAKEGDPLNLTRREARLLRRRLYRRAWRLTQLARVLKREGLIDDARLFSRQSSFSAPDPNNRGKKQVVSAWELRRDGLDRLLSRLEWARVIYHLCKHRGFHWISKAEEAKADSDKEGGRVKQGLKDTAARMKDKGYRSAAEMVLAEFPDAQRNKRGQYDKALSRVLLGEELTLLFERQRALGNPHASERLQTLILGNGDRRSGLFWRQKPALAGADLLKMLGKCTFEKGEYRAPKASFSAERHVWLTRLNNLRVVIDGRSRPLNEAERAIALPLPYQTEAFKYKTLKAAFVKAGLRDEGVRFGGLSYPSRAQAEGEKAKDPEDQPLVKMPAWHELRKAFKSAGLESLWQRISTPALEGNPTLLDQIATVLSVYKDGDEITRELRALALPEPDACIPVLERISFDKFSSLSLKALRRIVPLMETGLRYDEAVAQIPEYGHHSQRIKPDANKHLYLPPFYEAQREYRDKNDHVGSMKFREDADVPRNPVVLRALNQARKVVNALIREYGSPMAVHIEMARDLSRPLDERREVQKLQDEFRDRNDQARAQFAEQFGYQPKGREFEKWMLYREQLGQCAYSQQALDIQRVLDDPNYAQVDHALPYSRSYDDSKNNKVLVLTRENQDKGNRTPYEYLTALDDGQEGERWRAFAAWVQGNKNYRLAKRNRLLRKNYGADEQRGFIDRNLNDTRYICRFFKNYVEQHLQLAARPDGDLNRRCVVASGQLTGFLRARWGLAKLRSDSDRHHALDAAVVAACTHSMVKALADHARRKEIEFLKQGFPDPETGEILDPSAFDHGKHYFPEPWPHFRHELQARLFTDDLAALRTDMQRLGTYSDDDLARLRTLFVSRAPQRRNGGAVHKDTIYAQPESLKAQGGVIEKVLLQDLKPADLDNLVDPHRNERLYASIRQRLEDHGGKADKAFGPDNPLHKPDRNGQPTGPVVRSVKLVRGKQSGIPIRGGLAKNDSMLRVDVFTKAGKFHLVPVYVHHRVTGLPDRAIVAFKDETEWTLIDESFAFLFSIYPNDLVRVALKKDSALGYYSGADRSTGAINLWAHDRSAAIGKDGLIRGIGVKTAVSLEKFNIDVLGRVYPAPPEVRRGLA

SEQ ID NO: 7236 - protein, 1107 aa, synthetic construct
  REGION 1..1107: note = Synthetic
MTDKTLEPLTFGFDIGIASVGWCVLGENRIVDLGVRCFDKAETAKEGESLNLARRTARLMRRRLRRRAWRLTKLARLLKREGLIADTKTLQTASPKSPWCLRVAGLDCKLDADEWARVIYHLCKHRGFHWISKADKKKAEGDKKEGGRVTQGLSDTERYMEELGTRSVAKMVLTKFPDAQRNKQGNYDKALSRVLLADELSLLFKQQRELGNPHATAELEAAILGIGDRKTGLFWEQKPPLAGADLLKMLGKCTFEKDEYRAPKASFTAERHVWLTRINNLRIVADGVTRPLNPEERRIALPLPYGYANAKLDYKQLRTALAKKTGLDNFNFAGIAGDKEKDVLVKLPAWEILSKTLKAKGLETEWQGMAGAATGGNPTLLDEITRVLSVFKDGAEVEAELRKLNLPGGVKMIEALSEISFDKFHNLSLKALRKIVPHMETGLRYDEACQAAGYHHSQLHQAGAGEHKYLPPFYARRDKDGRMVFAEDMDVPRNPVVLRALNQARKVLNALVRTYGSPASIHIEMARDLSRPLTGHWTDNGKYIEGRRDIEKLQEEYRKRNEDDKAVFSQEHGVARNGKGFGRDFEKFQLYREQNSQCPYCQNALDLNNVLSDTSYAQVDHALPYSRSYDDSKNNKVLVHTTCNQNKGNRTPYEYLTTQGGEDGERWIRYKVWIEATYPGKTKQAKRQRLLRKDFTGKTAEEFKERNLNDTRYICKFFKNYVERYLKLTPKAGASETVETKAKRCVVLNGQTTAFLRARWGLLKIRGESDRHHALDAAVVAACSHGMVKRLADYSRTKELAKARDGFPDPETGEILDPAAFQKLTAHFPDPWPHFRQELEARLGIGDLRELRARLETFGTYPPEALSAVRPLFVSRAPQRRGGGPIHEETIRSTKHVSANVSHVTVPLHKLNLSKLPDIIGATYSRNAPLITVLRERLTAHNDDGKKAFAEPVFKPSKKGTKTPVKSVKLASTQNSGIHVRGGVAELGPMHHIEVFKIGPRYHLEPAYQARPDCRINPPNIPKDAEFLFSLSKNDFLQVTFGDQQYRGYFVMYESDGRLTLRAHDQPKPDKDYFRRGVTTATRVEKFHVDVLGNIYPAPPEVRRGLA

SEQ ID NO: 7237 - protein, 1073 aa, synthetic construct
  REGION 1..1073: note = Synthetic
MQTTSPPYTLGLDIGMASVGAALLLPEEQRILALHVRTFDKAETAKEGESLNKIRRDSRLIRRRLRRRTHRLLRLRRLMKRVGLVAATTPQDFTLPGVSPWTLRAEGLDRRLNNQEWAAALYHIIKHRGFQSNRKSETKSDEKAGEMLAGVGRNQALLRESGCRTVGELAARHPAFADAKRNKGGSYLHTFARADLAAELKLLFECQRTLGSPFARTDIEQAVNELLLARRPTLSGDNLLKMVGKCTLEKSEYRAPKASYRAERFVWLGKLNGLKIVGGGDARVLTEAERRLIIEQPFVKAKLTFKQVRAALDLAPHQRFNLLSYRTSASGSDRDPEDATLFEAKAFHTLRKAYEAAGLKSTWQRDAIDPDRLDALAYALTCFKDDNEARDWLHKQAIPAEIIEAVLGESFDTFIRLSTKALKALLPHLEAGQRYDEAAKAAGYNHSQTEIVARTPRLPRPDSDTIRNPVVYRALNQARKLVNAIVDQFGPPAKVHIELARDLSKPFDERRKIEREQKEFQVEKEKAAADFADRFGRPPRGTDLQKWRLFREQLDQCPYCQSALDIHRLFSVGYSQIDHALPYSRSFDDSMNNKVVVHTVCNQNKANRTPYEHFGGAGDSESWQRFVAWVQGNKAIRQAKRNRLLRVNFGLEEAGEFRDRNLNDTRYICREFKRMIESHLTWHPESSGSERCVVLSGQLTALLRARWGLVKERAAGDLHHALDAAVIAAAGRGLVKRMAVYARRNELASLRDNIPDPETGEIIDVGALRRLEAHFPKPWEHFHNELLARLSLNPAALLDGVPGYSPELIASLRPVRVSRAPTRRGLGAAHQETIRSVLGNNQSAVKTPLTALSMKDIENIVGFGRDTALIDAITARLAVHGGDGKKAFDARQPPLRKPSQDPARAPIIRSVKLLATQKSGIPVRGGVANNGAMLRADIFFKGGRFHAVPIYVSDAVKAQLPNRAVVHSKPEEEWTLIDDSYQFLFSLHANDWVTIRLKGEVKEGYFAGLHRGTGAVSLWLHDRNQAMGSGGQWTGVGIKTAMSVEKYHVDLLGGLHRVRGESRRSISQKRKQH

SEQ ID NO: 7238 - protein, 878 aa, synthetic construct
  REGION 1..878: note = Synthetic
LLFERQNAFGCRIASADFYAAVHDLLLARQPTLSGANLLKMIGKCTFEKSEFRAPKASYRAERFVWLGKLNNLKIVGGGDARSLTDTERRIILDLPFTQAKLTFKQVRKALDLEAHQRFNLLSYRFDPKGRDKDPEESTLFEAKYFHTLRKAYEAAGLKAEWQRDAINSDRLDALAYAITCYKDDTEARDWMAAQGIESQIIEAVLGDSFDQFIQLSQKALKAILPHMEAGQRYDEAVKSAGYNHSQPDAATEKRKTLPAPDKDIIRNPVVYRALNQARKLVNAIIAEYGPPAAVHIELARDLSKPWDERKKIEREQKEFQVEKEKAFADFEDRFNFRPKGPDLQKWRLFREQLDQCPYCQQALEVDRLFEPGYAQVDHALPYSRSFDDSMNNKVAVHTKCNQDKGNRTPYEAFDGASDSDHWQRFEAWVQSNKAIRQAKRNRLLRVNFGAEEAEEFRDRNLNDTRYICKEFKRMVETHLAWHPDSTADNRCVVLSGQLTSLLRARWGLLKVRSEGDLHHALDAAVIAATSRSLIKRMSDYSRRKELATLRTNIPDPESGEIIDVAALRQIEEHFPMPWPYFCEELLAKLSANPSQQLERITSYDEAMRNSIQPVRVSRAPTRRGLGAAHQETIRSMGKAGKLLAGGQSAIKTPLASLTLKDLDNITEQRDTALIEAIRERLTAFGGDGKKAFAPNQPPLRKPSGEGKAAPIIRSVKLLATQKSGIHIRGGIANNGAMLRADIFTKAGKFHAVPVYASDAVKTELPNRAVIQAKPEEEWTVMDETYQFLFSLHPNDWVCIRYKNAPLREGYYSGLNRATGAVDLWLHDRNQTVAKNGMLEGNGIKTALAVEKYHVDLLGGLHRVHHEERQPIHRKRGR

SEQ ID NO: 7239 - protein, 1082 aa, synthetic construct
  REGION 1..1082: note = Synthetic
MDGSMQKENRPYTLGLDIGMASVGAALLLPEKQRILSLYVRTFDKAETAERGESLNKIRRDARLIRRRIRRRAHRLVRLARLMKRYGLIEAATPESFALPDVSPWTLRAEGLDRLLEPKEWASVLYHLVKHRGFQSNRKSEAKADEKAGQMLSGVSRNQALLKETGYRTMGELAAKHETFTDAKRNKGGAYTHTFARADLEAELALLFERQNAFGCRIASADFYAAVHDLLLARQPTLSGANLLKMIGKCTFEKSEFRAPKASYRAERFVWLGKLNNLKIVGGGDARSLTDAERRIIIDLPFTQAKLTFKQVRKALALEAHQRFNLLSYRFDPKGRDKDPEESTLFEAKYFHTLRKAYEAAGLKAEWQRDAIHSDRLDALAYAITCYKDDTEARDWMAAQGIESQIIEAVLGDSFDQFIQLSQKALKAILPHMEAGQRYDEAVKSAGYNHSQPDAATEKRKTLPAPDKDIIRNPVVYRALNQARKLVNAIIAEYGPPAAVHIELARDLSKPWDERKKIEREQKEFQVEKEKAFADFEDRFNFRPKGPDLQKWRLFREQLDQCPYCQQALEVDRLFEPGYAQVDHALPYSRSFDDSMNNKVAVHTKCNQDKGNRTPYEAFDGASGSDHWQRFEAWVQSNKAIRQAKRNRLLRVNFGAEEAEEFRDRNLNDTRYICKEFKRMVETHLAWHPDSTADNRCVVLSGQLTSLLRKHWGLIKVRSEGDLHHALDAAVIAATSRSLIKRMSDYSRRKELATLRTNIPDPESGEIIDVAALRQIEEHFPMPWPYFCDELLARLSANPSQQLECITSYDEAMRNSIQPVRVSRAPTRRGLGAAHEETIRSMGKAGKLLAGGQSAIKTPLASLTLKDLDNIAEQRDTALIEAIRERLTAFGGDGKKAFAPNQPPLRKPSGEGKAAPIIRSVKLLATQKSGIHIRGGIAKNGAMLRADIFTKAGKFHAVPVYVSDAIKAELPNRAVIQAKPEEEWTVMDETYQFLFSLHPNDWVTIRLKNEVREGYYAGINRATGNIDLWLHDRNQTLAKNGMLEGNGIKTALAVEKYHVDLLGGLHRVHHEERQPIHRKRGR

SEQ ID NO: 7240 - protein, 1129 aa, synthetic construct
  REGION 1..1129: note = Synthetic
MNPTTNNAPLPPDFLTLGLDIGIASVGWAVLSERHIVDIGVRCFDKAETAKEGESLNLNRRQARLMRRRLYRRSWRLTKLGRLLKQRGLIDSAAFFKHQPPATVSTWQLRVEGLDRQLSAQEWARVIYHLCKHRGFHWASKAEEVLAEGDAKGEGGRVKKGLADTAAKMAAKDYRTAAEMVLAEFPHAQRNKRGEYDKALSRVLLDQEFSLLFEQQRRLGNPWANAEFEQRIRGDGDRKSGLFWNQKPALAGSDLLKMLGQCTFEKSEFRAPKASFTAERHVWLTRLNNLRVVVDGASRPLTQNERILALLLPYQTDQLKYKTLKAALVKAGHIPDSARFGGLAYPSEAQKETGKTKDPEDQPLVRLPAWHDLRKALIKAGLQAAWQQISVAALDGQPQWLDSIGWVLSVYKDDAEVERELAALELPQAQAVIPVLLGLRFDKFHALSLKALRQIVPHMERGLRYDEAVAQIPAYGHHSQRVVLGTGAKRYLPSFYKDERSSTGSMVFRDDIDVPRNPVVLRALNQARKVVNAIIKKHGNLSSVHIEMARDLSRPLDERREVKKLQEEFRDRNDKARESFEADHGYRPKGIVFEKWMLYREQQGKCAYSLEGLDIDRVLNDANYAQIDHALPYSRSYDDSKNNKVLVLTRENQNKGNRTAYEYLTSFSGGEDGDRWRNYAAWVNSNKSYRMAKRNRLLRKNYGADEASGFKDRNLNDTRYICKFFKNYVEEHLQLAPRADGNANKRCVVVNGQLTAFLRARWGLSKVRSESDRHHALDAAVVAACSHGMVKALADYARNKEVAYLKEGFPDPETGEIINPEAHARGVQHFPEPWAHFRHELQARLYTDDLQALREDLQRLGTYSEQDLLGVRTLFVSRAPQRRNDGAVHKETIYAQPEALRKQGGVTQKVPLTSLNLKDLDNLADPHRNAKLYAAIRARLEANGGKADKAFGPDQPFYKPDKDGNPTGPIVRTVKLVIDKLSGIPIRGGIAKNDTMLRVDVFSKAGKFHLVPVYVHHRVTGLPDRAIVAFKDEEEWTLVDGSFEFLFSAYSNDLLEISLKKDRHVGYYAGCDRSTGALNLWTHDRAIHVGKDGLIRGIGAKTAQSIKKLNVDVLGITHPARPEQRHGLA

SEQ ID NO: 7241 - protein, 1150 aa, synthetic construct
  REGION 1..1150: note = Synthetic
MTSKQNNLGPLTFGLDIGIASVGWAVLGENRIIDLGVRCFDKAETAKEGESLNLARRSARLLRRRLRRRAWRLTKLARLLKREGVITNASVFKKPFNLQDASGKGLSFWQLRVDALDRQLSAEEWARVIYHLCKHRGFHWISRAEAKPIEGDSKSEGGRVKQGLADTEKLKKAKNYRTAAEMVLAEFPEAQRNKQGDYSKALSRLLLNDEFVLLFQRQRELGNSHTSAEFQERILGTGDKKSGLFWAQNPALAGSDLLQILGHCTFEKSEYRAPKASFTAERHVWLTRLNNLRIVVDGTIRPLNEAERRITLLMPYQQAGDFSYKQLRTALTKAGFLPESFRYTGLSYASGQKADEKTKDPESATLVKFPAWQELRKTLEKKELASEWQKISTDALEGKPELLDQIAWVLSVYKDDAEVEAELRKLNLPNAEKMIDALLDIRFDKFSNLSLKALRQIVPFMEQGQRYDEAVANIPEYGHHSQLHQVGVGEHKYLPPFYKERDKTGRMVFNDDMDIPRNPVVLRALNQARKVVNALIKEYGSPHEVHIEMARDLSRPLDERRDIEKLQKEFRDNNEKGKAQFAQDFNIVGAVKGKEFEKYQLYREQQGKCAYSIELIDIHRIFEAGYVEIDHALPYSRSYDDSKNNRVLVLTHENRNKGNMTPYEYLDGKDNSERWRQFVGFVEGNKTYRLAKRSRLLRKDFGEKESREFRDRNLNDTRYICRFFKNYVEQYLQLHEDSEAKRCVVLSGQMTSFLRARWGLVKVRGDSDRHHALDAAVVAACSHGMVKRLSDYSRRKELDQVREGFVDVETGEIVNPAMFQQMHEHFPDPWLYFRDELKARLSIDDPALLRAEMERLGTYSPDALVALKPLFVSRAPQRRNSGAAHKETIYAQPERLKAQGGVTQKVAVTSLTIKDLDNLVDPHRNKKLYAAIREWMNHRDTRDKRAKEIEASTGRGKDKRELTADEKAEIAELRALPRKPDKNGDPTGPIVRTVTMVIDKLSGIPIRGGIAKNDTMLRVDVFTKANRFYLVPVYVYHSVAKALPNHAVVAYKDEDEWTQIDDSFPFCFSLYPNDFVRVTLRNETQLGYYSGCDRSTGAINLWAHDRNQQVGKDGLVRGIGVKTALSVEKFNVDVLGNIYPAPPEIRSDLA

SEQ ID NO: 7242 - protein, 1123 aa, synthetic construct
  REGION 1..1123: note = Synthetic
MEQRGQQRYILGLDIGIASVGWCVMAEDHIIDLGVRAFDRAEVADSGEPLNLQRRMARLMRHRIQHRRARLVKLARTLVAHGLIPNQHFFKPANPHTGEDSLWALRVKALSEKVGPEEWARILYHICKHRGFHWVSRAEQKKAESESQSEGGKIKQGLQNIRQLMQAKGYESVAQMLLAEFPEAQRNKQGEYTKAVPRALLDKELALLFERQAQFGTPHATASLKEAILGNGDQKTGLLWQQKPSLSGEALLAMLGKCSFEPGEYRAPKASFTAEQHVWLTRLNNLRVTYDGKEYPLTEEQRRLAYPLPYQQSGDFTYKQLRKALLKAGLLPEDFKFKGITYPSQAEQQGTKQKNPEDECLIKLPAWQALHKCLKDHGLETEWQSIAGAATGGDPALYDKITWVLSVYKEDEEVERELQKLPLPNAAKLIPALLEERFEGFHALSLKALNKIVPPMLAGARYDQACLEAGYHHSQSQSLQEKQDYLPSFYQGRDHRGQLRFAADLDIPRNPVVLRALNQARKVINAIIKLYGPPDSVHIEMARDLSRPYDKRKAIEKEQKRYRDNNDKVREDCKSTLGINRDPSGREFEAFRLYREQNGQCAYSGEPIDLYRLTESGYVEVDHALPYSRSYDDSKNNKVLVLTAENRNKGNQTPYGYLGGVNQSPRWLHFKAWVENNKNYRGAKKSLLLKADFGKAQAEDFMQRNLNDTRYICRFLKNYIEQTLKLHPESRAQRCLVVSGQFTSFLRARWGLMKLRAESDRHHALDAAVIAAASFGMVKRLSDYARRKELDAVKEGFVDPETGEVLDLQKLRQLDAHFPKPWAHFQRELEERLHCDDVTKLRSTLEALGTYPAEALQTLQPLFVSRAPKRRKGGAAHEETIYHQSPALQKKGKGTKKVALSKLTLEKLGKAFDDRRNRALYAAIRKRLEDYAKAGGKFTKQGNKAFPPDNPLYKPSADGQTRGPVVRSIKLIESISGIRVHGGLACNGSALRVDIFTKAGEHYLVPIYIHHRTSGLPQRAVVAKRNEKDWTLVDDSFQFLMRIYPNDFIEVVTKTKTLSGYYIAMDRSNGSVDLWSHDRNINEGKGGKFEGIGLKTALSIKKYHVDVLGRRYSAAWEPRRGLA

SEQ ID NO: 7243 - protein, 1117 aa, synthetic construct
  REGION 1..1117: note = Synthetic
MQNKNDPYSLGLDIGIASVGWCLLGENRIIDLGVRAFDKAETAKEGDSLNLVRRMARLMRRRLRRRSWRLTKLARTLKRHGVIADTNILQPQHPFGQSLWQLRVDALDRQLAQEEWARVIYHLCKHRGFHWISRAEEKKAEGDKAGEGGKVKKGLAGTQKLMAEKGYRTAAEMVLAEFPDAQRNKAGDYGKSLSRVLLSNELTQLFERQRALGNRYANSGLQSAVLGNGDRKSGLFWSQKPALSGADLLKMLGHCTLEKSEYRAPKASFTAERHVWLTRRINLRIVCDGITRSLNEQERKLVLPLPYQQIGDFTYKQLRAALVKAGRLPDSFRFAGLSYPTGAQNESGKAKDPEAEKLVRLPAWQELRAGFKKAGLETEWEGIAGRAMSGQPEELDEIARVLSVFKDGDEVERELRALGLSGGETAVQALLDISFDKFHALSLKALRRIVPHMEKGLRYDEAVAAIPEYGHHSQLQKPEEGKQKYLPPLYKGRDKDGRMLFSEDMDIPRNPVVLRALNQARKVVNAIIREHGSPENVHIEMARDLSRPLDERRTIEKEQKEYHDRKDKDKALFAESFDQPPKGAEFEKWRLYREQQGKCAYSIDPIDLHRLLEPGYVEIDHALPYSRSFDDSKNNKVLVLARENRNKGNQTPFEYLDGKNSSPRWEAFKIFVESNKAYRLAKRSRLLRKGFGVKESEEFRERNLNDTRYICKFFKNYVEDHLQLADGSEAKRCVVLSGQTTSFLRARWGLLKVRGDSDRHHALDAAVVAACSHGMIKRLADYARRKELEKVREGFIDLGTGEIVNPAMLQQLQMHFPEPWPHFRHELEARLRIDDPAQLSVEMERLGTYPAEALAALRPLFVSRAPQRRNSGAAHKDTIYAQPERLKAQGGVTQKVTLSSLSLKDLDQLIDPHRNEKLYAAIRARLEAHGGKADKAFPADNPLRKPDREGNPTGPVVRTVTKVIDKLSGIPVRGGIAKNDTMLRVDVFTKAGKFHLVPVYVHHAATEVLPDRAIVAFKDEEEWTLIDESFEWRFSLYPNDFIRIQQKGKPALTGYYGSCHRGTGNINLWSHDRSQQVGKDGMIQGIGVKTALSLEKFHVDVLGNIYPAPMEPRRGLA

SEQ ID NO: 7244 - protein, 1202 aa, synthetic construct
  REGION 1..1202: note = Synthetic
LDGRRTGLPRAALIAEHGFSRSTLTRLIADLRDKLGAPIVCDPERGGYRYRYVASARGDFQRKQKTMCGNRKTRGKPRVLDSVHPRRDNLIAATALTPESYNQSKSTPKETRHAMALNTFLPYTLGLDIGMASVGAALLTEQRILGLHVRTFDKAETAKEGDPLNKTRREARLTRRRIRRRAHRLLRLVRLFKRTGLIAEARPEAFALSGVSPWDLRAEGLDRLLAPAQWAATLYHIVKHRGFQSTRKSEAKDDEKAGQMLSGVAANQTRCQEKGWRTAGEMAACDETFAAAKRNKGGAYTHTFARADLVAELKLLFRQQASFGNPYVSAEFENGVEQLLLARRPALSGDALLKLVGKCPFETTEYRAPKASFSAERFVWLTKLNNLRISEVGEQRALTAGERQILHDQPYILAKLTYKQVRQKLGLAETTKFNTLTYRGDKDPEGATFFEAKAYHALKKAYKEAGLESLWQRDALDPTRLNRLAWALTCFKTDDDIRAHLIEHNVEPDIAEAVLGESFDKFVGLSLKALGKILPFMEQGQRYDKAVQSAGYTHHSQLHQDSTKAHYLPPPDKDQIRNPVVYRALNQARKLVNAIVREYGPPAAIHIELARDLSKPKKERDEIKREQDKFQALKQRLSDEFIYDEERAPKRDELMQLRLFHEQLSQCPYCGKEIIRGRMFNNSDVYVQIDHALPYSRSYDDSQNNKVLVHTKCNQDKGNRTPYEYLDGTNDSPQWQLFEAWVLSNKAYRRAKRDRLLRKHFGEDEAKEFKERNLNDTRYICKEFKRMVETHFKWHDDAEGQERCVVVSGQFTSLLRARWGLIKVRENGDLHHALDAAVIAAASRSLVKRMADYSKRNELAQVRDRYLDPETGEILDIAAMRQVEEHFPAPWPHFRSELLAWLSPEPAHGLDGLAHYPIEELEQLRPVRVSRAPTRRGLGAAHQETIRSLGREGRLLADGQSAVKTPLTALKLKDLENIVGYSHSHNHAMIEAIRKRLEANGNDGAKAFKAPLFKPSAANGYDADKSHVGETDQRAPQIRSVKLLATQKSGIPIRKGIANNGSMLRVDVLSKGGKFYAVPVYVADAAKVELPNRAATAHKPEEQWPAVDNSYTFLFSLHPNDWIRVKLKEGIKEGYFCELDRASGASISIYTHDRNQATGEKGKLRGIGLTTALAIEKYHVDLLGNLHRVHTETRQPIHRKGR

SEQ ID NO: 7245 - protein, 1121 aa, synthetic construct
  REGION 1..1121: note = Synthetic
MDGKDFGSLTFGFDIGIASVGWCALNETRIVDLGVRCFDKAETAKEGESLNLARRTARLMRRRLRRRAWRLTKLARLLKREDLITDVHLMHGPSATSPWKLRVEGLDRQLTDDEWARAIYHLCKHRGFHWISRAEEKKAEGDKKEGGKVKKGLSDTQRRMSEKGYRSAAEMVLAEFPEAQRNKQGDYGKALSRVLLNDELALLFQHQRELGNPHASAELETAILGNGDRKSGLFWEQKPPLAGADLLKMLGKCTFEKEEYRAPKASFTAERHVWLTRLNNLRIVVDGTTRQLTEDERRVAMPLPYSYVDAKLSYKQLRSALTKKTGLNNFNFAGIAEDKEKDTLTKLPAWETLSKTLKGKALETEWESMAGAAAGGDPTLLDEIARVLSVFKDGDEVDAELRKLPLPGGEKMIEALSEISFDKFHALSLKSLRKIVPHMETGLRYDEACVAAGYHHSQLHEAGAGGHKYLPPFYTRRDKDGRMVFDEELDVPRNPIVLRSLNQARKVLNALVRTYGSPSAVHIEMARDLSRPLNGYFTDNGKRIDGRRDIEAKQKEYRERNEKDKATFAAEHGIAAKSREFEKFQLYREQQGKCAYSLKPLDLHRVLHDIGYAEVDHALPYSRSYDDGKNNKVLVLTEENRNKGNRTAYEYLTSFPGGENGERWRNFIAWVESNKAYRLAKRTRLLRKDFGGKAAEEFRERNLNDTRYICKFFKNYVERHLQLKVGADGTAAKRCVVLSGQTTAFLRARWGLLKVRGASDRHHALDAAVVAACSHGMVKRLADYARTRELAKVRDGFADPETGEIVDPAMFQQLHAHFPDPWPHFRGELEARLQLDNSAELRAQLEMFGTYPAEALETLRPLFVSRAPQRRNGGAAHKDTIYAQPERLKKQGGVTQKVALSSLSLKDIDKLIDPHRNEKLYAAIRERLEAHGGNGDKAFPADKPLLKPDREGNPTGPIVRTVTMVIDKLSGIPIRGGIAKNDTMLRVDVFRHKKDGKFHLVPVYVHHAVAQELPNRAIVQAKDEDEWTLIDDKFDFLFSLHPNDFIRVTQKNKAPIPGYYASCHRGTGNLNLWAHDRNQKVGKDGQIEGIGVKTAVALEKFHVDVLGNIYPAPIEPRHGLA

SEQ ID NO: 7246 - protein, 1138 aa, synthetic construct
  REGION 1..1138: note = Synthetic
MNYYNSFIITENAMTSKQENLGALTFGLDIGIASVGWAVLGENRIIDLGVRCFDKAETAKEGESLNLARRTARLLRRRLRRRAWRLTKLARLLKREGLIADAKHFQKPFNLKDANGKGLSFWQLRVDALDRPLNAEEWARVIYHLCKHRGFHWISRAEEKAAEGDSKGEGGAVTQALKKTESLKAKYRTAAEMVLAEFPEAQRNKQGDYSKALSRILLGDELKALFEYQRKLGNPFATEELEAAILGNGDRKSGLFWAQNPALSGSDLLKMLGHCTFEKSEYRAPKASFTAERHVWLTRLNNLRIVVDGTTRPLNEAERRVALPLPYQQAGDLTYKQLGSALIKEGFLQKDGFKFAGLPYPTKQASEEKTKDPESAVLCKLPAWHTLRKTLEKHGLESEWQKISTDALESKPQLLDEITRILSVYKDDAEVEAELRKVALPNAEKMIDALLDIRFDKFSNLSLKALSKIVPFMEQGQRYDEAVANIPEYGHHSQLHIVGAGEHKYLPPFYSGRDKTGRMVFNDDMDIPRNPVVLRALNQARKVVNALIKQYGSPHEVHIEMARDLSRPLDERREVEKLQKEFRDNNEKHKTEFASTFNIVGAVKGKEFEKFQLYREQQGKCAYSIEPMDIHRLFEQGYVEIDHALPYSRSFDDSKNNRVLVLAKENRDKGNRTPFEYLGGKDNSEPWRQFVAYVEGNKAYRLAKRSRLLRKDFGEKEAKEFKERNLNDTRYICKFFKNYVEQYLQLHTDSEAKKCVVLSGQMTSFLRARWGLVKVRGDNDRHHALDAAVVAACSHGMVKRLSDYSRRKELEQVRAGFVDIDGVILNPAMFEQIEKHFPNPWPNFRNELDARLKLDDPAQLREEMQRLGTYSDEALQSVQPLFVSRAPQRRNSGAAHKDTIYAQPERLVAQGGVTQKVALSSLTLKDIDKLIDPHRNEKLYAAIRTRLEHHGGKGDKAFPSSNPLRKPDSEGNPTGPIVRGVTMVIDKLSGIPIRGGIAKNDSMVRVDVFTKASKFHLVPVYVHHSVAKALPDRAIVAFKDEDEWTLIDDSFSFCFSLYPNDLVQVQQKGKAAILGYYSSCHRGTGNLNLWAHDRSLQVGKEGMIEGIGVKTALSLEKFNVDILGNRYHTPQEKRRDLA

SEQ ID NO: 7247 - protein, 1132 aa, synthetic construct
  REGION 1..1132: note = Synthetic
VESNNKNLTFGFDIGIASVGWAVLAPDRIVALGVRAFDKAETAKEGESLNLARRSARLMRRRLYRRAWRQTKVARLLKREDLIADARLFHDQRPAPLSPWQLRVEGLDRLLAPEEWARVIYHLCKHRGFHWISRAEEKKAGEDAKGEGGKVKQGLAATTKRMREKNYRTAAEMVLAEFPDAQRNKQGDYGKALSRALLAEEINLLFERQRALGNPHTSEAFQTAILGDGDRKSGLFWMQHPALSGGKMLERIGRCTFERAPMRPGGPDGKGEYRAPKASFSAERHVWLTRLNNLRVVVDGVTRPLDATERAVALPLPYQRAGDLKHEHLRKALTNAGLWNERVRFAKFPYAQSSDGKAKDPESEVLVKLPAWQALHKLLKDKGLETEWQGMAGAAQTDDSEMLDQIAWVLSVYKDDTEVECELGKLNLPGGKAMIDALGEIRFDKFSNLSLKALRKIVPYMEAGQRYDEACEAAGYHHSQLFKLGEGEERYLPPFYSGRDKDGRMVFNDDMDIPRNPVVLRALNQARKVMNALIRIHGSPASVHIEMARDLSRPMDERKKIKTAQDEYRERNDKIKATFAAEFGVPAKSREFEKFQLYSEQQGKCAYSIEPLDLHRVLHDIGYAEVDHALPYSRSFDNSKNNKVLVLAKENRDKGNATPYEYLDGANDSERWRRFVAYVEGNKTYRLAKRTRLLRKNFGPEEAKGFSERNLTDTRYICKFFKNYVERYLKLADESESKRCVVLSGQLTAFLRARWVLTKIRSDSDRHHALDAAVVAACSHGMVKRLSDYSRRKELKAVRDGFVDLETGEIVNPAMYQQLETHFPDPWPEFRHELETRLFTDDPAQLRAGIEQLGTHTPDALDALKPLFVSRAPQRRNSGAAHKDTIYAQPERLKTQGGVTQKVPLVNLTLADFGEANNEDKPCKLIDPHRNERLYAAIRERLEAHGGKGDKAFPASNTLRKPDRDGNPTGPVVRSVTKVIDKQSGIPIRGGLAKNDTMLRVDVFTKGGKFHLVPVYVHHRVKGLPDRAIVAFKDEREWTLIDESFAFCFSLHSNDFVRVSQKGKMPILGYYSSCHRGTGNINLWAHDRNTQVGKDGMIEGIGVKTALSIEKFHVDVLGNLYPAPPEKRRDLA

SEQ ID NO: 7248 - protein, 1092 aa, synthetic construct
  REGION 1..1092: note = Synthetic
MQKKSPPYTLGLDIGIASVGAALLILKEKRILALHVRTFDKAETADKGESLNKIRRESRLTRRRIGRRAFRLKRLARLMKRKGIIERASPDTFVTPHLSPWDLRAAGLNRMLEKKEWAAIIYHMVKHRGFQSNRKSEAKADAKIGDMLAGVRQNSTLLKKGEYRSIGELAVQDPAFSGSKRNKGGEYNHTFAREDLTAELDLLFERQGALKNPFAGETFHAEVKKLLLQRRPPLSGDALLKMVGTCTFEKDELRAPKAGYTSERFIWLGKLNNLKIVGDGNPRPLTDEERKAVIELPFETSKLTFNQIRAKLNLTQNQRFNLLSYRNGKKGDDKDPEKKTFFEATFFHKLCKAYSDAGLDSQWERDKANPGGKLDTLGYALTVFKEDSKSREYLRANGVDDAIIEAALTESFEKFIHLSQKALNKILPFMEDGQRYDEAANSAGYNHNQPIPTAERKPSLSAPDRNSIRNPVVYRALNQARKMVNAIIKQYGPPAQVNIELARDLSKSFDERNRIAKEQENFRTEKEGAARDFQRLFQRAPKGPDIMKWRFFKEQIDQCPYCQKALDVNRLFNDNYSQIDHILPSSRSFDDSLNNKVVVHIKCNQDKRNLTPYEFLDGATDGERWRKYSGWVQSNKSIRQAKKNRLLRVNFGAEEAEKFRERNLNDTRYICREFKNMVESNLKWHENSEGNERCLVLSGQLTALLRARWGLLKNREGGDLHHALDAAVIAATNSSLVKRMSDYSRRKELEMVRENCPDPETGETLDVATLRQIVSDFPKPYPHFREELLGRLSATPAEKLRDIQGYDVDLISEVRPIHVSRAPTRRGLGSAHQDTIRSIGGKKKKVTENRWLKKDESAVKTPIDKLRLADLEKIVGADDPRNKKWIDALRERLEPHKAEDGKSNKCAGAKAFAKGQPPLFKPSGDGKTQPQIRNVKLKTTQKSGIQIRGGIANNGDMLRADIFTKEGKFYAVPLYVADAVKKELSDRAVSPKKPENQWPVMDKSYQFLFSLYRNDWVVIRLKNEVREGYYAGLNRSNNSIDLWSHDHKTMLEGNGIRTALGLEKFHVDILGNLYRAKPETRKKIHVVRQTKR

SEQ ID NO: 7249 - protein, 1368 aa, synthetic construct
  REGION 1..1368: note = Synthetic
VLEFQPQRLVEGDGGGLARRVVGQPRHGGDAGRRGDGDDVPPALRQHAGQEGAREAERRQRIHREGALDLRVRRLQQPLAVHDAGIVDQHIDRAVLRQRARGGGLDGLALGEVAGIRRRLPAGGGDLRRHRRQVRLIHIPQNHPSAPRRDAQRHQAADAAGGAGDQHASTLEFGHDFTLGKVQPQVALWRRREIRRIVETDFSVAGNSKARQASLSGRIRSLPEGNYLIVATALTPEDYNGNILSAWGAVMQQEKLPYTLGLDIGIASVGWCVLGENRIIDLGVRAFDKAETAKEGDPLNLIRRTARLMRRRLRRRAWRLTKLTRLLKRHGLIEDAGFFQPQRPFQGSLWRLRVEGLDRRLDNEEWARVIYHLCKHRGFHWISRAEEKKAEEDKKGEGGKVKQGLAGTAKLMREKGYRSAAEMVLAEFPDAQRNKHGDYGKALSRILLGDELALLFKRQRELGNPHADPALETALLGNGDRKSGLFWAQKPALSGQDLLKMLGKCTFEKGEYRAPKASFTAERHVWLTRLNNLRIVVDGTTRPLNEQERRTVLPLPYKQAGDFTYKQLRAALVKAGLLPESFRFAGLSYPTGAQQAEGKAKEPETEKLVKLPAWQELRKTLKDKGLETEWESMAGAAAGGQPELLDEIARVLSVYKDDEEVAAVLRRLTLPGGERMVEALLDIRFDKFHALSLKALRKIVPHMETGLRYDEACEKAGYHHSQLHEAGKGDQQYLPPLYSGRDKDGRLVFREDLDVPRNPVVLRAINQARKVLNAVVRRHGSPAAVHIEMARDLSRPFDERNKIKKDQDEFRARNERDKAEFAAQFRISGTPKGGDFEKWRLYREQQGKCAYSVEPIDIDRLLEPGYVEVDHALPYSRSFDDSKNNKVLVLAKENRDKGNRTPYEYLDGAGNSPRWQQYVAFVESNKAYRLAKRTRLLRKDFGAKAAEEFRERNLNDTRYVCRFFKNYVERCLKLDADSAAKRCVVASGQLTAFLRARWGLIKVRAANDRHHALDAAVVAACSHGMVKRLADYARRKELEKVREGFVDAETGEIVNPAMFQQLKQHFPEPWPHFREELEARLKIDDPALLRNQMALLGTYPEEVLAALRPLFVSRAPQRRNGGAAHKDTIYGQPDRLKAQGGVTQKVPLTSLTLKDMDKLIDPQRNENLYAAIRARLDAHGGKGEKAFLADNPLRKPDREGNPTGPIVRSVTIVIDKLSGIPVRGGIAKNDSMLRVDVFRHRKDGKYHLVPVYVHHAVAKELPNRAVVAFKDEAEWTLIDGNFDFCFALYPNDLVRVTLKKESHTGYYASCNRSTGAINLWVHDRNQQVGKDGFIEGIGVKTAVAVEKFHVDVLGNIYPAPMETRRGLA

SEQ ID NO: 7250 - protein, 770 aa, synthetic construct
  REGION 1..770: note = Synthetic
MAVKTTDSLTFGLDIGIASVGWAVLAPNRIVALGVRAFDKAETAKEGDSLNLIRRTARLMRRRLHRRAWRLKKLARVLHASGIAESVNPQKSQNAAVRSPWELRVEGLDRQLSPPEWAQVIYHINKHRGFHWVSRAEEKKADDDPKGEGGKVKKGLAGTARLMREKSYRTVAEMVMAEYPDAQRNKRGDYGKALSRVLLADELAQLFTRQRALGNPDAPVELEQAILGNNDRKSGLLWMQKPALSGADLLKMLGKCTFEKNEYRAPKASFTAERHVWLTRLNNLRIVVDGVTRPLNDQERQLALPLPYQQAGDLTYKQLRSALVKAGLAEVTGFQFAGLPYPSEKQKAEGDAKDPEKTVLVKIPAWQEIQSTLKKAGLETEWQGIAGAAITGTPEVLDQIAWILSVYKEDDEVEAELRKLSLPGGDKMVQALLATRFDKFHALSLKALRKIVPLMENGARYDEACERAGYHHSQLHKAGEGKETYLPSLYSGRDKWGRMVFSDDLDILRNPVVLRGLNQARKVVNALVREYGSPASVHIEMARDLSKPLDERRKIEKSQIEYRDQNDADKKRFEEHFSARPRGMEFEKWRLYREQQGKCAYSVEPIDIDRLLEPGYVEVDHALPYSRSFDDSKNNKVLVLAKENRDKGNQTPYEYLHGAANSERWRRFVAFVESTKAYRLAKRSRLLRKDFGAKDADEFKERNLNDTRYICRFFKNYVERFLKLADDSSSRRCVVLSGQLTSLLRARWGLLKVRDESDRHHALDAVVVAA

SEQ ID NO: 7251 - protein, 1081 aa, synthetic construct
  REGION 1..1081: note = Synthetic
MMNNNRNTSYTLGLDIGMASVGAALLAQDRILALHVRTFDKAETAKEGDPLNKTRREARLTRRRIRRRAHRLLRLARCMKRTGLIERAEPQAFALDGISPWTLRAEGLDRRLEPTEWAAVLYHIVKHRGFQSTRKSEAKDDEKAGQMLSGVSANQQRMKDGGWRSVGEMAAHDPAFANAKRNKGGAYTHTFARADLTDELTLLFAHQRETGNPHTSPEFEAQVRELLLARRPALAGNALLKLVGKCTLEPGEYRAPKASYSAERHVWLTKLNNLRISEVGEQRSLTAGERQTLLDEPYKLTKLTYKQARQKLGLNESARFNSLAYRGDKDPEVATLFEAKAYHMLRKAYETAGLKAFWQRDALDPEKLDRLTYALTCYKTDNDIRASLVEQGIEPEIIEAVLDVSFDKFVSLSLKALRRILPFMEQGQRYDEAVQSAGYAHHSQLNTGCIKSLYLPPPDRDQIRNPVVYRALNQARKLVNAIIREYGPPTAVHIELARDLSKPIDERRRIEKEQKEFQANKEKLRADFIGQFGFEPKGLDLQKYRLYREQMSQCAYSQKPIDVTRLFEAGYVEIDHALPYSRSFDDGQNNKVLVLTAENRNKGNRTPYEYLNGASSSPQWQAFEAWVLANKAYRRAKRDRLLRKHFDEDEANEFRERNLNDTRYICRAFKRMVEDHLQWHPDSDAKNRCVVIAGQLTSLLRARWGLLKVRENGDLHHALDAAVIAAASRALVKRMADHARRDELAQVRECYIDPETGEVLDLAALRDLEERFPTPWPHFRTELLAWLSPDPATALIGVPGYDEARRANIHPIRVSRAPTRRGLGAAHQETIRSMGRKGRLLRDGQSAVKTPLTSLKLKDVDNIVGAEDPRNAAWIAALRERLEQFGGDGAKAFAPNQPLLLKPSAPGKAAPAIRTVKLLTTQKSGIPVRQGIANNGAMLRVDVFTKGGKFYTVPVYVADAARTMLPNRAVVAYKSEEEWPEMDESYAFLFSLHPNDWVRLTYKNGPIREGYYSGLNRATGAVDIWVHDRNPGAAKNGLFEGCGIKTALTVEKFHVDLLGNLHRVHTETRQPLRQARKPKAD

SEQ ID NO: 7252 - protein, 1110 aa, synthetic construct
  REGION 1..1110: note = Synthetic
MDGKTPEALTFGFDIGIASVGWCVLGENRIVDLGVRCFDKAETAKEGDPLNLARRTARLMRRRLRRRAWRLVKLARLLKRSGLIGDPRQPSSTSPWKLRVEGLDRRLSDDEWARVIYHLCKHRGFHWISRAEEKKAEGDKKEGGKVKQGLSDTLRRMTEKGYRSAAEMVLTEFPDAQRNKAGDYGKALSRILLADELALLFRRQRELGNPHADDNLEAKILGNGDRKSGLFWEQKPPLAGVDLLKMLGKCTFERDEYRAPKASFTAERHVWLTRLNNLRIVVDGVTRPLNENERRIALPLPYGYANAKLDYKQLRTALTKAGLSNFSFAGITEDKEKDALIKLPAWETMSKALKAKGLETEWEGMAGAATGGDPTLLDEIARVLSVFKDGAEVEAELRKLNLPGGKKMIDALSEIGFDKFHALSLKALRKIVPHMEAGLRYDEACQAAGYHHSQLHAAGAGEHKYLPPFYARRDKDGRMVFDEDMDVPRNPVVLRALNQARKVLNALVRTHGSPAAVHIEMARDLSRPLDERNKVKKAQNEYRERNEKDKAAFAAEYGIAAKSREFEKFQLYREQQGKCAYSLKPLDLHRVLHDIGYAEVDHALPYSRSYDDGKNNKVLVLAEENRNKGNRTPYEYLTALGGETGERWRNYVAFVESNKSFRLAKRQRLLRKDFSGKAADEFRERNLNDTRYICKFFKNYVERHLKLAPKVGAGGTADATTNKRCVVLNGQTTAFLRARWGLLKVRGDSDRHHALDAAVVAACSHGMVKRLADYARTKELAKARDGFPDPETGEIVDPAMFQQLHAHFPDPWPHFRQELEARLNLDNADELRAQLEMFGTYPPEAITAAKPLFVSRAPQRRNGGAAHKDTIYAQPARLKAQGGVTQKVALSSLKLADLDKLIDPHRNEKLYAAIRARLEAHGGKGDKAFLPDNPLRKPDRDGNPTGPIVRTVTMVIDKLSGIPVRGGIAKNDTMLRVDVFRHKKDSKFHLVPVYVHHAVTKELPNRAIVAFKDEEEWTQVDDNFDFCYSVHPNDLLRITLKKEKHVGYFASCNRSTGAFNLWSHDRNRQSGKDGMIESIGVKTAVALEKFHVDVLGNIYPAPPEQRRGLA

SEQ ID NO: 7253 - protein, 1086 aa, synthetic construct
  REGION 1..1086: note = Synthetic
MALNTFLPYTLGLDIGMASVGAALLTEQRILGLHVRTFDKAETAKEGDPLNKTRREARLTRRRIRRRAHRLLRLVRLFKRIGLIAEARPEAFALPGVSPWDLRAEGLDRLLAPTEWAATLYHIVKHRGFQSTRKSEAKDDEKAGQMLSGVASNQKRCQEKGWRTVGEMAARDEEFAAAKRNKGGAYTHTFARADLVAELKLLFKQQASFGNPYVNAEFENGIEQLLLARRPALSGDSLLKLVGKCPFETSEYRAPKASYSAERFVWLTKLNNLRISEVGEQRVLSAGERQTLLGLPYTLAKLTYRQVRQKLGLAETTKFNTLTYRSDKDPEGATFFEAKAYHALKKAYKEAGLESLWQRDAIDPKRLDRLAWALTCYKTDDDIRTHLIEHNVEPDIAETVLGESFDKFVGLSLKALGKILPFMEQGQRYDEAVQSAGYAHHSQLHQDSTRARYLPPPDKDQIRNPVVYRALNQARKLVNAIVREYGPPAAIHIELARDLSKPMDERRKIEREQKEFQERKAKDREAFIDQFGFEPKGLDLQKYRLYREQMSQCAYSQKAIDVARLFESGYAEIDHALPYSRSFDDGQNNKVLVLIAENRNKGNRTPYEYLDGESNSPQWQQFEAWVLSNKGYRRAKRDRLLRKHFGGEEAEGFRERNLNDTRYICRAFKQMVETNLQWHPNSDEKNRCVVVAGQLTSLLRARWGLIKMRENGDLHHALDAAVIATANRSLVKRMADYSKRKELAQVRDHYIDPATGEVLDDTALRQIEEHFPTPWPHFYRELNAWLSPNPEHGLNGLEHYPPRELECLRPVRVSRAPTRRGLGAAHQETIRSVGREGRLLADGQSAVKTPLTSLKLKDLENIVGYSHSHNHAMVEAIRKRLEANGNDGAKAFKAPLFKPSAANGYDADKSHVDETDQRAPQIRSVKLLATQKSGIPIRKGIANNGSMLRVDVFGKGGKFYAVPIYVADAARAELPNRAVVQSKPENEWPEMDETYTFLFSLYPNDWVCLRYKNAPNREGYFSGLNRATGAIDIWVHDRNPSMVKNGLFEGNGMKTALAVEKYHVDLLGNLHRVHAEARQPIHRKGR

SEQ ID NO: 7254 - protein, 1128 aa, synthetic construct
  REGION 1..1128: note = Synthetic
MKEGDMVDKPSEPLIFGFDIGIASVGWCVLGEKRIVDLGVRCFDKAETAKEGKSLNLARRTARLMRRRLRRRAWRLTKLARLLKHERLINSIQVLRQPATKSLWQLRIDGLDRKLSAEEWARVLFHLCKHRGFYWVSRAEEKKAEEDGEGGKVKKGLQDTKRRMSEKKYRSAAEMVLKEFPDAQRNKRGEYNKALSRILLAEELALLFEKQREYGNLYATPELETHIAGSGDRKSGLFWEQKPPLSGKDLLKMLGRCTFEKNEYRAPKASFTAERHVWLTRLNNLRIVVDGNPRPLNEAERRVALPLPYQQASDLTYKQLKNALTKAGLLPENIKFSALAYPTQQTEDKPKDPESERLVKLPAWQELRKTLKENGLETEWQSIAGAAVGGNPELLDQIAWTLSVFKDGNEIEQELRKLPLPGGEKIIEALSEISFDKFHNLSLKALRKIVPHMETGLRYDEACEKAGYHHSQLFKGGEGQHKYLPPFYSGRDKDGRMVFDGKEDIPRNPVVLRSLNQARKVLNALVSRYGSPSAVHIEMARDLSRPMDERNKIKKAQEEFRDKNEKAKADFEAEYSMPAKSREFEKFMLYREQHGKCAYSLKPLDLDRVLRESDSKYAEVDHILPYRRSYDNSKNNKVLVLIKENQDKGNRTPYEYLTSFTGGENGERWRNFVAYVEGNKSYRLAKKNHLLRKNFGEDEAKDFRARNLNDTRYICRFFKNYVEQHLKLSNGHRRCVVISGGLTSLLRARWGLPTSTKKREESDRHHAMDAAVIAACGHFVVQRTSEMLNTDGWSHKPDLGEYVNAETGEFLTTQEFVRKDEIYKLMPRPWKYFREELLLRLNTDDPTLLISEAQRYGYPPEALENLRPLFVSRAPQRRNSGAAHKETIYSQPECLKNTGSVTQKMPLTDLALKDMDNLIDPHRNEKLYAAIRNRLEANGGKGDKAFPPDNPLRKPDRDGNPTGPIVRTVTMVIDKLSGIPVRGGIAKNDTMLRADVFRHKKDRKYHLVPVYVHHAVTKELPTRAIVQSKDEDGWTLIDEVNFDFCFSLYPNDLVKVTLKKEVRFGYYSGCNRSTGAIDLWVHDRNQAIGKDGLIQSIGVKMALYVEKFHVDTLGNIYPAPPEERRGLA

SEQ ID NO: 7255 - protein, 1082 aa, synthetic construct
  REGION 1..1082: note = Synthetic
MRQEQKYDLGLDIGIASVGWCVLGKKRIIDLGVRCFDKAETPDGESLNLARRSARLLRRRLRRRAWRLTKLARLLKREGLIADASLFQQQTPITQSLWQLRVDALDRKLTGEEWARVIYHLCKHRGFWFARKAEADSSEGGKVKQGLERTKALMHEKNYRTAAEMMLAEFPEHQRNKRGDYSQALSRELLGEELATLFTRQRELGNPHASQELETRILDRKEGLFWQQKPALSGEAMLNLMGKCTFEPTEYRAAKRTWSAERFVWLTRLNNLRISIDGESRPLTDAERQATLDLPYKLASVKYKQLKAELVKHGLLPESARFGGLNYRPDKDPEDAKLIELSGYHDLRKALEGKGLKTEWQGLATQPNLLDSIASILTIYKTDEEIHAQLAALDLAAPVIAALETVSFTDFIRLSLKALSKILPGMETGKRYDEACTAAGYHHSQLIENTGSRYLPKLDDDAPNNPVVLRALNQARKVVNAIIREYGPPQQVHIEMARDLSRPLDERYKIEKEQKTYQETRQKAREHFAETFGQAPRAKDFEKWLLYKEQDGKCAYSLQALDLNRLFEDGYTEVDHALPYSRSFDDSKNNKVLVLTSENRDKGNRTPFEYLDGASNSPRWQLFETFVKTNKQYRQAKRDRLLRKNFGKDEAASFKERNLNDTRYICRYFKSFVEHNLVLHPESSYQRCVVLSGQLTSFLRARWGLAKVREASDRHHALDATVVAACSHGMVKRLADYARRKELEEARGRYIDEETGEIIDIAKLRQLEIHFPRPWAHFEDELCLRLGIDRSSGAVLPAETLAAQRDHLQLRHGYSAEEIAAAKPLFVSRAPKRRNGGAAHKDTVYAQPERLKAQGGVTQKVALSSLKLTDLGKLIDPHRNEKLYSAIKARLEQFGGKGDKAFPPGYEFRKPDKDGNPTGPIVRTVTALIDKLSGIPLRGGIAKNDSMIRVDVFTKAGKFHLVPVYVHHRVAKALPTRAIVALKDENEWTPIDESFGFCFSLYPNDLVSVSLKGKSIVTGYYAGLDRSTGAISLWAHDRNQAEGKDGLIRGIGVKTALKVEKFHVDVLGRIYPAKPELRRGLA

SEQ ID NO: 7256 - protein, 1125 aa, synthetic construct
  REGION 1..1125: note = Synthetic
MISKHENLGALTFGLDIGIASVGWAVLGESRIINLGVRCFDKAETAKEGESLNLVRRSARLLRRRLRRRAWRLTKLARLLKHEGVISDGNLFKRKIEKKDQIPKSSWQLRVDALDRQLTAEEWARVIYHLCKHRGFHWISRAEENAAEGDSKSESGRVKQGLAGTKKLMAEKNYRTAAEMVLTEFPEAQRNKQGDYSKALSRILLGDEFKILFEMQRRLKNPFATKVLEAAILGTDDHKSGLFWAQNPALAGSDLLKMLGHCTFEKMEYRAPKASFTAERHVWLTRLNNLRIVVDGTTRPLNEVERRIALSMPYQQVGDLTYKQLRAALTKADYLPDVFRYTGLSYASGNKVDEKAKDPESAVLVKLPAWQKIRKTLERKNLNADWQKISTAALNDKSRLFDQIAWVLSVYKDDDEVRIELSKLNLPNAEELIEALLDIRFDKFSSLSLKALYQIVPLMEQGHRYDEAIAKIAEYGHHSQLQKAGEGEYKYLPPFYMQRDEKGTMVFNDDMNIPRNPVVLRALNQARKVVNALIKEYGPPHEVHIEMARDLSRPLDERRDIEKLQKEFRDNNEKNKTQFAQDFNIVGEVKGKEFEKYQLYREQQGKCGYSIEPIDIHRLFEPGYVEIDHALPYSRSFDDSKNNRVLVLAKENRDKGNSTPFEYLGGKDNSERWRRFSAFVEGNKAYRLAKRSRLLRKDYGEKEAREFRERNLNDTRYICKFFKNYVEQYLQLHEDSDTKRCVVLSGQMTSFLRARWGLVKVRADSDRHHALDAAVVAACSHGMVKRLSDYSRRKELEKVRTGFVDVDTGEIINPAMFQQVQQRFPNPWPHFRDEVKLRLSVDDPSLLQSEIGKFGTYPSEALKILHPLFVSRAPQRRNKGSAHKDTIYAQPERLKAQGGVTQKVALSNLSLKDLAMLVDPHRNEKLYTAIRTRLEQHGGKGDKAFPANNPLRKPDSSGNPTDPIVRSVTLVIDKLSGIPIRGGIAKNDSMLRVDVFSKKGQFHLVPVYVHHAVGKALPNRAIVQSKDEAEWTLVDDSFQFLFSLYSNDFVRIQQKGKAPILGYYSSCHRGTGNLNLWAHDRSLHVGKGGMVEGIGVKTALTIEKFNVDVLGNRYPAPMETRRGLA

SEQ ID NO: 7257 - protein, 969 aa, synthetic construct
  REGION 1..969: note = Synthetic
LQQRLSPRITTIGSEYSKGGFMAQYVFGLDIGIASVGWAVLGDQRIIDLGVRCFDKAETAKEGDPLNLTRRQARLLRRRLYRRAWRLTQLARVLKREGLIADAKLFAKAPTYADSAWRLRVEGLDRLLTPLEWARVLYHLCKHRGFHWISKAEEAKADSNKEGGRVKQGLKDTAARMKDKGYRSAAEMVLAEFPDAQRNKRGQYDKALSRVLLGEELALLFERQRARGTPHASERLQTLILGNGDRRSGLFWRQKPALAGADLLKMLGKCTFEKGEYRAPKASFSAERHVWLTRLNNLRVVIDGRSRPLNEAERAIALPLPYQTEAFKYKTLKAALVKAGLWDDSVRFGGLSYPSQAQAEGEKAKDPEDQPLVKMPAWHELRKAFKSAGLESLWQRISTPALEGNPTLLDQIATVLSVYKDGDEITRELRALALPEPDACIPVLERISFDKFSSLSLKALRRIVPPMETGLRYDEAVAKIPEYGHHSQRVKPDAGKHLYLPPFYEAQREYRGKNDRVGSMKFREDADVPRNPVVLRALNQARKVVNALIREYGSPMAVHIEMARDLSRPLDERREVQKLQDEFRDRNDRARAQFAEQFGYHPKGREFEKWMLYREQLGQCAYSQQALDIQRVLDDPNYAQVDHALPYSRSYDDSKNNKVLVLTRENQDKGNRTPYEYLTALDGGQEGERWRAFTAWVQGNKNYRLAKRNRLLRKNYSADEQRGFIDRNLNDTRYICRFFKNYIEQHLQLAARPDGDLNRRCVVASGQLTGFLRARWGLAKLRSDSDRHHALDAAVVAACTHSMVKALADHARRKEIEFLKQGFPDPETGEILDPCAFDHGKHYFPEPWPHFRHELQARLTGLPDRAIVAFKDETEWTLIDESFAFLFSIYPNDLVRVALKKDSALGYYSGADRSTGAINLWAHDRSAAIGKDGLIRGIGVKTAVSLEKFNIDVLGRVYPAPPEVRRGLA

SEQ ID NO: 7258 - protein, 1183 aa, synthetic construct
  REGION 1..1183: note = Synthetic
VEKLNLRFGFDIGIASVGWAVLSPTHIVDLGVHCFDKAETPKEGESLNLARRQARLLRRRFYRRAWRLTQVARLLKREGLIDSANLFKQQPSFSQPDPEDTGGKKQVFVSTWVLRKEGLDRLLTPIEWARVIYHLCKHRGFHWVSKAEEAAAEGDAKSEGGLVKKSLANTAARMAEKGYRTAAEMVLAEFPDAQRNKQGDYSKALSRKLLDQEFEHLFEAQRRLGNPHTSDALEVLIRGNGDRKSGLFWRQKPALSGADLLKMLGRCTFERTGGADGKGEFRAPKASFTAERHVWLTRLNNLRVMIDGISRPLNKAEHQVALNLPYLNSEKFTYKNLRTALLNTGLPESFRFAGLAYPSDKQKEEEKAKHPEDQILIKLIAWHTLRQAMKKAGLEDVWQQISMAALDGQPDTLDQIGWILSVYKDDDEVSAQLSKLPLPQAQKTISVLLSIRFDKFHALSLKALRQIVPHMEGGLRYDEAVANIPEYGHHSHRKQPEEGKALYLPPFYEEQRTYKGKSDRIGSMVFRQDINLPRNPVVLRALNQARKVVNALIKQYGSPTAVHIEMARDLSRPLDERREIQKLQDEFKERNQKAREDFEAQFHRNPSGKDFEKWMLYREQGGQCAYSLLPLAPSGDCNEIFLEGKTQIDHALPYSRSFDNSKNNKVLVLTRENQNKGNRTAFEYLTSFTGGENGERWRNFVAWVNQNKAYRTAKRNRLLRKNYGAEEAKGFKDRNLNDTRYICKFFKNYIEENLHLASKVDGETNQRCVVVSGQLTAFLRARWGLLKVREESDRHHALDAAVVAACSHGMVKALADYSRFKEVEFLKEGFPDPETGEIINPAAFDRGRRHFPEPWAHFRHELEARLKTDDSAALRKDMQRLGTYSEGDLQQLRTLFVSRAPQRRNSGAVHKETIYSKPKLGHRLMVEEKSTNGKIFRCSTPKELKSIAIERIGLFETTDKGRKFRFNEAQLSEVVGGARNAWMIQALRFWLAKRGTNPKQPGTTSYPNKPQKGNPLDGPFTGPTIKSVKLNGGKTSGFEVRGGIAKNDSMIRVDVFTKAGKFHLVPIYVHHRVTGLPNRAIVQSKDENEWTLIDESFAFLFSVYPNDLVRVTLKKEIRFGYYSSCNRATGSIDLWVHDRAKSIGKDGLIQSVGVKLALSLEKFNVDLLGHIYPALPEQRRGLA

SEQ ID NO: 7259 - protein, 1192 aa, synthetic construct
  REGION 1..1192: note = Synthetic
MREDKMAGNTPEALTFGFDIGIASVGWCVLGENRIVDLGVRCFDKAETAKEGESLNLARRTARLMRRRLRRRAWRLTKLARLLKREGLIADLRSPATVSPWQLRVDGLDRRLTGEEWARVIYHLCKHRGFHWISRAEEKKAEGDAKGEGGRVKKGLSDTQRRMAEKSYRSAAEMVLAEFPDAQRNKAGDYGKALSRVLLADELALLFKRQRELSNPQADADLETKILGSGDRKSGLFWEQKPPLAGTDLLKMLGKCTFEKDEYRAPKASFTAERHVWLTKLVNLKIVVDGVTRRLTPEEVNAVVSLPYGYKSALKWKQLHNALIAHGLPQSLVFSGLTGKKDKDLLDQTLINLPAWQELRETFEKAELKTEWQGIASRPELLDQIAWVLSVYKDGNEVEAELRKLPLPGGDKTVCALSVVSFDKFHNLSLKALRKIVPHMEAGLRYDEACQAVGYHHSQLHEAGACEHKYLPPFYARRDKDGRMVFTEDMDVPRNPVVLRALNQARKVLNALVRVYRSPSAVHIEMARDLSRPLTGHWADNGKYIEGRRDIEKLQEEYRKRNEDDKTAFSQEHGVARNGKGFGRDFEKFQLYREQNSQCPYCQSALDLNSVLSDTNYAQVDHALPYSRSFDDSKNNKVLVHTTCNQNKGNRTPYEYLTTLYGEDGEHWIRYKVWVEATYPGKTRQAKRTRLLRKDFAGKAAEEFRERNLNDTRYICRFFKNYVERYLQLTPKVSRGDTPDEAVNKRCVVLSGQTTAFLRARWGLLKIRGDSDRHHALDAAVVAACSHGMVKRLGDYARTRELEKVRAGFPDPETGEILDPAKFQQLHAHFPDPWPHFRTELYSRLCAEVVTNPVTGKRELAFHDDPVRLSEEIERLGTYPSDALAAVSPLIVSRAPQRRNGGAAHKDTIYAQPEKLKLTNQVVQHIDLESLNRNHFGFLEDYFAERKRLSKGTLTRKAAAALFKTFSDQGADIWSIDRKWRECQLIDPERNKEFYEALYDQLAEHDWNGKKAFTSGFNKPTRRKNAVASPPVRKVATVISSSGIPVRGGIAKNDSMLRVDVFRHKKDGKFHLVPVYVHHAVAKELPNRAIVAFKDEDEWTLIDDRLDFCFSVHPNDLVRVTLKKEKHFGYFASCNRSTGAFNLWSHDRNRQSGKDGMIESIGVKTAVAVEKFHVDVLGNIYSAPKEERCGLA

SEQ ID NO: 7260 - protein, 1130 aa, synthetic construct
  REGION 1..1130: note = Synthetic
MRMTSKQNNPGILTFGLDIGIASVGWAVLGENRIVNLGVRCFDKAETAKEGESLNLARRSARLLRRRLRRRAWRLTKLSRLFKHEGLISHASALKIPFTHSLWLLRVEALDRRLNADEWARVIYHICKHRGFHWISRAEEKAAEGDSKSEGGKVKQGLAGTKKLMAEKNYRSVAEMVLAEFPAAQRNKQGDYSKALSRILLGDELKKLFNLQRELGNPHTSPEFEAKILGNGDRKTGLFWEQNPALSGAALLKMLGKCTFEKNEYRAPKASFTAERHVWLTRLNNLRIVVDGTTRPLNEIERRVALPMPYLQSGDFSYKQLRAALTKAGYLPESFQFTGLAYPNKQISVEKAKDPESAALAKLPAWQTLHKTLKDAGLENEWQKISTDALEGRPQLLDDLAWVLSVYKEDAEVEAELNKLALPNKNKLVLALSYISFDKFSNLSLKALRQIVPLMEQGQRYDEAVANISEYGHHSQLHQVGEGKHKYLPPFYSERDKTGRMVFNDDMDIPRNPVVLRALNQARKVVNALIKEYGSPHEVHIEMARDLSRPLDERRDVEKLQKEFRDRNEKDKALFASDFNIAGAAKGKEFEKYQLYREQQGKCAYSIEPMDINRLFELGYVEIDHALPYSRSFDDSKNNRVLVLAKENRDKGNRTPYEYLDGKDNSERWRQFVAFVESNKTYRTAKRSRLLRKDFGGDEAKGFRERNLNDTRYICKFFKNFVEQYMQLHDESSAHRCVVLSGQMTSFLRARWGLVKVRSDSDRHHALDAAVVAACSHSMVKRLSDYSRRKELKQVRAGFVDVDTGEIINPAMFDQLEQHFPNPWPHFRDEVIARMNIDNPLLLREEMQRLGTYSEEALEALHPLFVSRAPQRRNSGAAHKDTIYAQPERLVAQGGVTQKVALSSLTLKDLDKLVDPHRNEKLYGAIRTRLEQHGGKGDKAFPASNPLRKPDSEGNPTGPIVRGVTMVIDKLSGIPIRGGIAKNDTMLRVDVFTKANKFHLVPVYVYHAVAKSLPDRAVVAFKDEDEWTLIDDSYDFCFSMYPNDLINTKLKNESYWGYFSGCDRSTGAIGLWAQDRNKLVGKDGLNRVGVKMALSIEKFNVDVLGNRYPAPPEKRRLYPAQLSGAEHDLA

SEQ ID NO: 7261 - protein, 1109 aa, synthetic construct
  REGION 1..1109: note = Synthetic
VEGNNKNLTFGFDIGIASVGWAVLAPDRIVALGVRAFDKAETAKEGESLNLARRSARLMRRRLYRRAWRQTKVARLLKREGLIANVQLLRDQHHTPASPWQLRVDGLDRLLSAEEWARVIYHLCKHRGFHWISRAEEKKAGEDTKSEGGKVKQGLADTKRRMNDKGHRTAAEMVLAEFPDAQRNKQGSYDKALSRVLLAEELETLFSRQRALGNPHASEPMQAELLGGGDCRSGLFWMQKPALSGDNLLKMLGRCTFEKSEYRAPKASFTAERHVWLTRLNNLRIVVDGATRALNEQERRVALPLPYNQAGDLTHKQLRAALLKAGVLDESFRFARFPYAQSADGKAKDPETTVLVKLPAWQELRKLLKDKGLETEWQSIAGAAQVGDPELLDRIAWVLSVYKDDAEVERELGKLSLPGGKAMIDALSEIRFDKFSNLSLKALRNIVPHMEAGMRYDEACDVAGYHHSQLFKSGEGGERYLPPFYSGRDGNGRMVFNDDLDIPRNPVVLRALNQARKVANALIREHGSPTSVHIEMARELSKPFDERRDIKKEQDEYQKRNQEDKARFAEHFGQMPKGQEFEKWRLYREQQGKCAYSVATIDLERLLEPGYVEIDHALPYSRSFDDSKNNRVLVLAKENRDKGNATPYEYLDGASDSERWRHFVAYVEGNKAYRLAKRTRLLRKNFGAEEAKDFRERNLNDTRYICKFFKNYVERYLKLADGSESKRCVVLSGQLTAFLRARWGLIKIRSDSDRHHAMDAVVVAACSHGLVKRLSDYSRRKELEAVRDGFADLETGEIVDLAMHRQLKEHFPDPWPGFRHELEARLFLDDPLHLRTAVEGLGSYPPDALDTLKPLFVSRAPQRRNSGAAHKDTIYAQPARLKTQGGVTQKVPLANLGLKDLDTLIDPHRNEKLYRAIRERLEAHGGKGDKAFPASNPLRKPDREGNPTGPIVRTVTKVIDKQSGIPIRGGLAKNDTMLRVDVFTKGGKFHLVPVYVHHRVKGLPNRAIVAFKDEADWTLMDESFEFCFSLYPNDFVRVELKQETLSGYFAGCDRSTGNVGLWIHDRDIRIGKDGFIRTGVKTASSLEKFHVDVLGNLYPAPPESRRDLA

SEQ ID NO: 7262 - protein, 1124 aa, synthetic construct
  REGION 1..1124: note = Synthetic
MTGKQNNLGALTFGLDIGIASVGWAVLGESRIIDLGVRCFDKAETAKEGESLNLARRSARLLRRRLRRRAWRLTKLSRLFKREGLISHISELKAPQSFPQSLWQLRVEALDRQLSREELARIIYHLCKHRGFHWISRAEEKAAEGDSKGESGKVKQGLAGTKKLMIEKKYRTAAEMVLAEFPEAQRNKQGNYSKALSRVLLGDELKTLFQHQREFGNLHASADFETAILGNGDRKSGLFWQQNPALAGNDLLKMLGHCTFEKSEYRAPKASFTAERHVWLTRLNNLRIVVDGTMRPLNEMEHRVALPLPYLQAGDLTYKQLGSALVKEGFLQKDGFKFIGLLYASKSANEEKAKDPESAVLVKIPAWQALSKVLKGANLATEWQKISSDALEGKPQLLDQIARVLSVYKDDTEVETELRKLSLPNAERMVDALLDIRFDTFSNLSLKALYNILPHMEVGLRYDEACLQACYHHSQLHKVGAGEHKYLPPFYSSRDKDGRMVFDEDMDIPRNPVVLRALNQARKVVNALIKKYGSPHEVHIEMARDLSRPLDERRDVEKLQKEFRDRNEKEKSLFAETFSVTGAIKGKEFEKYQLYREQQGKCAYSVTALDINRLFDLGYVEIDHALPYSRSFDDSKNNRVLVLAKENRDKGNHTPYEYLDGKDNSERWRQFVAFVEGNKTYRLAKRSRLLRKDFGADEAKGFRERNLNDTRYICKFFKNYVEQYLQLHTDSDAKRCVVLSGQMTSFLRARWGLVKVRSDSDRHHALDAAVVAACRHSMVKRLSDYSRRKELEQVRSGFVDIDGEILNPEMFDRIEKHFPNPWHNFRDELKLRLYVDDPVLLREEMQRLDTYPLAALQTLQPLFVSRAPQRRNGGAAHKDTIYAQPERLVAQGGVTQKVPLSSLTMKDWDKLVDPHRNERLYAAIRTRLEQHGGKGDKAFSASNPLFKPDAEGNPTGPVVRSVTMVTDKLSGIPIRGGIAKNDSMLRVDVFSKAGKFHLVPVYVHHAVAKSLPDKAIVQAKDEADWTQIDDSFEFLFSLYPNDLVRVKLKKEFHLGYYAGCDRSTGCINLWAHDRNQQVGKDGLIRGIGVKTAIAVEKYNVDVLGNCYPAPPEIRRLYPAQHNKA

SEQ ID NO: 7263 - protein, 1108 aa, synthetic construct
  REGION 1..1108: note = Synthetic
MISKPIVFGLDIGIASVGWAVLADDHIVNLGVRAFDKAETAKKGESLNLARRMARLMRRRLRRRAWRQIKLARLLRREGLIAETSVVQSPSPISPWQLRVEGLDRPLAAEEWARVIYHLCKHRGFHWVSRAEAKKAGEDAKGEGGKVKKGLAETQRRMSEKGYRSAAEMVLAEYPDAQRNKADDYGKALARTLLADEMALVFERQREFGNPHASPDLEEKILGNGDHKNGLFWSQKPPLAGADLLKMLGRCTFEKAEYRAPKASFTAERHVWLTRLNNLRIVADGETRGLNDTERQIALPLPYAKAGDLTHKQLRAALTKAGLWDERVHFAYFSYAQSADGKAKDPESAVLIKLPAWQELRKTLKDKGLETEWHSLAGTAQAGNPELLDQIAWVLTVYKDDAEIERELTQLNLPGSRAMIDALLEISFDKFSNLSLKALRKIVPHMETGLRYDEACVKAGYHHSQLHQTGTGTHKYLPPLYSHRDKDGRMVFADDVEIPRNPVVLRSLNQARKVVNALIREYGSPHSVHIEMARDLSKPFEERRKIEKEQHEYRDRNEEDKARFAEHFGQLPKGQEFEKWRLYREQQGKCAYSVTPIDLARLLEPGYVEIDHALPYSRSFDDSKNNKVLVLAKENRDKGNHTPFEYLTSFPGGEDSPRWRHFVAFVEGNKAYRLAKRTRLLRKNFGEKESSEFKERNLNDTRYICKFFKNYVERYLKLAEGSESKRCVVLSGQLTAFLRARWGLLKIREESDRHHALDAVIVAACSRGMVKRLSDYARCKKLESVRDGFVDLETGEIVNPARYHQLQTHFPDPWTGFRYELETRLKLDNPEKLRTAVADMGTYSPEELTKLKPLFVSRAPQRRNGGAAHKDTIYAQPDALKAQGGVTQKVPLTSLKLADLENLIDTHRNEKLYAAIRTRLEAHGGKGDKAFPASNPLRKPDRDGNPTGPIVRTVTMVIDKLSGIPIRGGIAKNDTMLRVDVFTKGGKFHLVPVYVHHRVKGLPNRAIVASKDEAEWTLIDDSFNFCFSLYPNDLVRVGLKNETILGYFSGCDRSTGNIGLWAHDRNQSVGKDGFVRTGVKTALTLEKFHVDVLGNIYPAPPETRRGLA

SEQ ID NO: 7264 - protein, 1122 aa, synthetic construct
  REGION 1..1122: note = Synthetic
MAVKVTGSLTIGLDIGIASVGWAVLAPDRIVALGVRAFDKAETAKEGASLNLVRRTARLTRRRIHRRAWRLTKLARLLKRQGVIDDTRMFQPQRPFPHSLWRLRVEGLDRQLNAEEWARVIYHLCKHRGFHWISRAEEKKAEADTKGEGGKVKQGLAATKKLMQEKGYRSASEMVLMEFPEAQRNKQGDYGKALSRISLGEELADLFRRQRELGNAHAGAELEAAILGSGDRKTGLFWAQKPALAGEALLKMLGKCTFERDEYRAPKASFTAERHVWLTRLNNLRINVDGVIRPLQEAERQVVLPLPYLQAGNFTYKQLHDALVKKGLLPQSFDFVGLRSTKDKDPLKETLVKLPAWQELRKAIEGAGLKSEWQKISGDALESKPDLLDKIAWILSVYKEDEETERELRRLDLPNAEETVAALLSFSRSSFSGFHALSLTALRKIVPRMESGLRYDEAVADISEYGHHSQLLKSADEKNDYLPPLYEHHRDKESRNRNKMLFNKRVEQEIQGGIPRNPVVLRAINQGRKVLNAIIREYGSPYAVHIELARDLSRPLVGHKDKHGNYIKGRRDIENEQVENRARNETDWQEYVAYAPSFSAVGSPNGRDFEKWQLYRQQDGKCPYCLGRIDSDRLLEPKYVEVDHALPRSRSFDNGRNNKVLVHTHENQNKGNRTPHEYFQELDGSVDGPLWRHFEAFVKTNPKYPTPKKERLLRKNFGEKEARDFSERNLYDTRYIGKFFKSYVERYLKLADDSDSKRCVVLSGQLTAFLRRRWGLPKLRSESDRHHALDAAVVAACSHGMVKRLSDYSRRKELAQVREGFVDVETGEIVNSAMFQQVRQHFPDPWPNFRHELEARLKIDDPAMLRAEIGRLGNYPPGALNALQPLFVSRAPKRRDGGELHQDTIRSAKLLDQGLSYVSVPLQKLRLTDLDKIVGAGDPRNASLIDALRKRLHAHDGDGKKAFSTPVFKPSAPGSQAPLVRTVKLSSTQKGGVRVRGGVADQGEMLHVNVYRHKERFLIEPAYGIDAEKHLSLPEIPAEAEFLFALSKNDYVKVVLGDATHEGYFVMYESDGRITLRAHDQPKPDKDYFRKGVVNASRIEKFDVDVLGNRYPARPEKRRGLA

SEQ ID NO: 7265 - protein, 1130 aa, synthetic construct
  REGION 1..1130: note = Synthetic
MNKLDIRFGLDIGIASVGWAVLSPRHIIDLGVRCFDKAETAKEGESLNLARRQARLLRRRLFRRAWRLTQVARILKREGLIGSASFFKQQLGFPQADPEDTSGKEQVFVSTWVLRKEGLDRLLTQIEWARVIYHLCKHRGFHWISKAEEAAAEGDAKSEGGRVKKGLADTAARMAEKGYRTAAEMVLAEFPDAQRNKRGDYSKALSRKLLDQEFEHLFETQRRLGNPHTSDALEVLIRGNGDRKSGLFWRQKPALSGADLLKMLGRCTFERTSGADGKGEFRAPKSSFTAERHVWLTRLNNLRVMVDGISRPLNETEHQVALNLPYLNGEKFTYKNLRAALIRAGLPESFRFGGLAYPSDNQKEEEKAKHPEDQILIKLTAWHTLRLAMKKAGLQDAWQQIGMAALDGQPDTLDHIGWILSVYKDDDEVSEQLRKLPLPQAQKTISALLNIRFDKFHALSLKALRQIVPHMERGLRYDEAVANIPEYGHHSQRKLPEEGKALYLPPFYEEQRKYKGKSDRIGSMVIRQDIDLPRNPVVLRALNQARKVVNALIKQYGSPTAVHIEMARDLSRPFDERRNIQKLQDEFKERNQRIRADFEAQFHRKPNGKDFEKWMLYREQGGQCAYSLLPLAPSGDCNEIFLEGKTQIDHALPYSRSFDDSKNNKVLVLTRENQNKGNRTAYEYLTSFTGGEDGDRWRNFVAWVSQNKAYRPVKRNRLLRKNYGAEEAKGFKDRNLNDTRYICKFFKNYIEENLHLASNVDGETNQRCVVVSGQLTAFLRARWGLLKVREESDRHHALDAAVVAACSRGMVKALADYSRIKEVEFLKEGFPDPETGEILNPAAFDRGRRHFPEPWAHFRHELEARLKTDDLAALREDMQRLGTYSGSDLQQLRTLFVSRAIQLRGTPEIHKGTLRSPKYISEQKSTVRIPLSELTINKLNGIVEGHGRNKPLVDSLRERLKAHDDDPKKAFATPFYKPSSKKKTAPQVNSVRIISTQRTGLQLKNAIADLGPMMGVDVYRIGKEFFFDPAYPARVSARLNVKKIPEEAQFLFFLTKNHFVQIEIGGEITRGYFVMFESDGRMTLRAHDQPKGDKKFFRKSVTAAINIIKFNVDLLGHIYPAPPEQRRGLA

SEQ ID NO: 7266 - protein, 1127 aa, synthetic construct
  REGION 1..1127: note = Synthetic
MGAAMQSENLPYTIGLDIGIASVGWCVLGENRIIDLGVRAFDKAETAKEGDSLNLIRRTARLMRRRLRRRAWRLTKLARLLKRQLLIDDIGLFKEQRTFPLSPWQLRVEGLDRQLDSEEWARAIYHLCKHRGFHWISRAEEKQADEDSKGEGGKVKQGLAGTAKLMKEKGYRSAAEMVLIEFPEAQRNKQGGYSKALSRVLLGEELSLLFKRQRELGNLIAGQELEVAILGSGDNKSGLFWAQQPALAGDKLLEMLGRCTFEIPGGPDGKGEYRAPKASFTAERHVWLTRLNNLRIVVDGSTRPLNEQERRIALPLPYSQVGDFTYKQLRSALVKASALGDAFRFASFSYAQQPDGKAKDPETAVLVKLPAWQELRLALRKAGLETEWQGMAGAAADGRPELLDNIAWVLSVFKDDEETIAELRKLPLPNTEKMIDALLDCPRIAFAKFHALSFKALRRIVPLMETGLRYDEAVAAIPDYGHHSQIHKVGEGEHKYLPPLYSGRDKDGRMIFSEDMDVPRNPVVLRALNQARKVVNALIRSYGSPGAMHIEMARDLSKPIDERRKVEKDQAEYRDRNDRDKGMFAEQFGQPPNGVEFEKWRLYREQQGKCAYSVEPLDLHRLLEPGYVEVDHALPYSRSYDDSKNNKVLVLTKENRDKGNRTPYEYLGGDEGSPRWRQYAAFVEGNKAYRLAKRSRLLRKLFGKDESEEFRERNLNDTRYICKFFKNYIERYLLLAKGSESKRCVVLSGQLTSFLRARWGLIKVRSDNDRHHALDAAVVAACSHRMVQNLSNYARRKELEKVRAGFVDMETGEIIDPAMFQQLRQHFPEPWPHFRAELEARLKIDDPVVLRENMERLGTYRPEALEALRPLFVSRAPQRRNGGAAHKDTIYGQPERLKAQGGVTQKVSLSDLTLKDLDKLIDPHRNEKLYAAIRTQLEAHGGKGDKAFPSVNPLRKPDRDGNPTGPIVRTVTMVIDKLSGIPVRGGIAKNDSMLRVDVFTKAGKFHLVPVYVHHTVADVLPNRAIVAFKDEDEWTLIDDSFNFCFSLYPNDLVRVTLKSEAHLGYYASCNRSTAAVNLWVHDRNVNIGKDGMIQSIGVKVARSIDKFNVDVLGNIFPAPPETRRGLA

SEQ ID NO: 7267 - protein, 1118 aa, synthetic construct
  REGION 1..1118: note = Synthetic
MTGEFMPLPYTLGLDIGIASVGWCLLGESRIIDLGVRAFDKAETAKEGEPLNLTRRLARLARRRLARRAWRLKKLTRELKRHGLIDDKRFFQPTNPTSVSPWQLRVQGLDRKLEPDEWARVIYHLCKHRGFHWVSRAEEKRAEGDAKSEGGKVKQGLAATRRLMEEKRYRTIAEMVLVEFPEAQRNKQGEYTKALSRVLLGDELKQLFAQQRNLGNPFATEALEALILGNGDRKSGLFWQQKPPLSGADLLKMLGKCTFEKMEYRAPKASFTAERHVWLTRLNNLRIVIDGVTRPLTDAERGLALPLPYQQASDFTYKQLATALHKAGLLPKDGFRFAGLSYPSEQQKTEGKAKDPESAALVKLPGWQQLRTAFINAGLETEWGSLAAAAFDGQPEKLDEIAKILSVYKDDDEARAELAKLPLPNPDHLIEALLDIRFDKFHALSLKALNKIVPLMEKGMRYDEAVAAIPEYGHHSQLHKPGEGQHKTLPPLYAGRDKEGRMVFADDADIPRNPVVLRALNQARKVVNAIVRRYGSPMAVNIEMARDLSRPLEERNKIKKEQDEYRIRNEKDRALFIEEFGQPPKGGEFEKFRLYREQLGKCAYSQQAINLERLLEPGYVEIDHALPYSRSFDDSKNNKVLVFAKENRDKGNRTPYEYLGGAENSVRWQQFIAFVESTKAYRLAKRSRLLRKDFGSKEAEEFKERNLNDTRHICRFFKNYVERHLKMAEGSEAKRCVVLSGQMTAFLRARWGINKIRSESDRHHALDAAIVAACTHSMVKRLAEYSRTKELAQVSNGFVDTTTGEIVDPAMFRQLKQHFPEPWPHFHHELEARLKIDNPAVLREEMARLGSYDTAALDALRPIFVSRAVQRRNNGAAHKETIYGQPKKMRERGSVTQKVPLASLTLKDLDNLIDPHRNEKLYAAIRERLEAHGGKGDKAFPATNPLRKPDRKGNPTGPVVRTVTLVIDKLSGIPVRGGIAKNDSMLRVDVFSKAGKFYLVPVYVHHRVTGLPNRAVIAYKDESEWTQIDDTFTWCFSIYPNDLIRISLKKESHFGYYAGCNRATGAVAIWVHDRNHAVGKAGFIEGIGLKTALNVEKFHVDTLGNIHPAKPEPRRGLA

SEQ ID NO: 7268 - protein, 1175 aa, synthetic construct
  REGION 1..1175: note = Synthetic
  SITE 517: note = misc_feature - Xaa can be any naturally occurring amino acid
MTHYVFGLDIGIASVGWCVLGEERIVDLGVRAFDKAETAKEGDSLNLVRRQARLMRRRLYRRAWRLTKLARLLKRHGLIDALGAFGPENPTRTSPWLLRVAGLDRLLTRDEWACIIYHLCKHRGFHWVSRAEEKAAEGDGKSEGGRVKQGLAGTAKLMAEKNYRTAAEMIVTEFPYPDAQRNKQGDYGKALSRLLLSEELGLLFARQRALGNSHADADLEALILGNGDRRSGLFWAQKPALSGADLLKMLGKCTFEKGEYRAPKASFTAERHVWLTRLNNLRVVVDGQTRALNETERRLALPLPYQQAGDFTYKQLRNALVKAGFLPDDARFAGLSYPSEAQKTEGKAKDPEAAALVKLPAWQVLRQTLKKADLETEWQGMAGTAMGGDPGLLDEIARVLSVFKDDDEVRAELSKLPLPNPEKMLEALLDIRFDKFHALSLKALRNIVPHMERGLRYDEACVEAGYHHSQLHVVGGGSDKYLPPFYASRDKDGRMVFRDDADIPRNPVVLRALTQAXAKHLYLPPFYQDQRKYENKSDRVGSMVFREDANIPRNPVVLRALNQARKVVNAIVRRYGQPQSVHIEMARDLSRPLDERNKIKKEQEEYQVRNERDRTQFQDLFGYPPSPREFEKWRLYREQNCQCAYSQRPLAPNGNVAEIFAAGATEVDHALPYSRSFDDSKNNKVLVLAKENREKGNRTPYEYLKAVDGCENGERWRSFVAYVEANKQYRMAKRSRLLRKDFGKKEAEEFRERNLNDTRFICRFFKNYVERHLQLAEGSEARRCVVVSGQLTAFLRARWGLNKVRSDSDRHHALDAAVVAACSQGMVKRLSDYARRRELDQVREGFVDVETGEIVNPAMYQQLREHFPDPWPHFRDELKARLHIDSTPLLREEIDRFGTYPEEALAALKPLFVSRAPQRRNGGAAHKDTIYGQPERLKAQGGVTQKVPLSSLTLKDLDKLSDPGRNAALYEAIRLRLEAHGGKGDKAFPPGNPLRKPGKLLNRETGERGPDGPIVRTVTLVIDKLSGIPVRGGIAKNDSMLRVDVFSKAGKFHLVPVYVHHMVAKALPNRAIVAFKDEEEWTPVDESFEFRFSLHPNDLVRVRQKGKAPILGYYSSCHRGTGNINIWAHDRSQQVGKDGMIEGIGVKTALSLEKFHVDVLGNIYPAPPEKRRGLA

SEQ ID NO: 7269 - protein, 1073 aa, synthetic construct
  REGION 1..1073: note = Synthetic
MELPQQCYTLGLDIGMASVGAALLADGHIHALHVRAFNAAETAKEGESLNNIRREARLTRRRIRRRAHRLLRLRRLFKREGLIASHAAEALSTPVSPWDLRAQGINQRLAPQEWAAALYHIVKHRGFQSNRKSEAKADEKAGQMLSGVTANQNRMSEDNWRTVGEMAARDETFAHAKRNKGGDYSHTFARADLEHELKTLFAAQRTLANPHTSPALEQAVHTLLMARRPTLSGENLLKMVGKCTFETTEYRAPKASHTAERFVWLTRLNNLRINDQGETRGLHDEERQAIIHLPFVQAKISYKQLRSKIGLSDTARFIGVDYWKKRKEGNELAAEDAALFEAKAFHLLRKAYEEAGLKTEWTRDAANPDRLDALAYAQTVFKDDAEARDWMQQQGIEPTIIEAVLTVSFSDFIRLSIKALHNILPYMQAGQRYDQAVQSAGYAHHSQLHTEDNKKPRLPPISKEDYPNPVVYRALNQARKLVNAIIDEYGAPNEVHIELARDLSKPWDERKKIEREQKGFAERKETLVTKFRERFDSNPRRDQLLKMRLYDEQQAHCAYSQKPLDLGRLLEDGYAEIDHALPYSRSFDDGMSNKVLVLTVENRNKGNRTPYEYLDGEQNSERWRSFQAFVQGNKSYRQAKRERLLRKDFSDKAAEGFRERNLNDTRYIARAFKTLVEQHLQLAEDSESKRCTVVSGQLTAFLRTRWGLNKVRENGDLHHALDAAVVAAANHRMVKRLADYARRKELNQAREGFIDPQSGEVLDIAALRQLEAAFPAPWPHFRDELQAWLSPDPALHLEHVSNYDKARAQTINPIRVSRAPLRRGLGQAHQETIRSAKLLDQGMSAVKTPLENLKLKDIERIVGWDDPRNEKLIEAIRQRLIAHGDDGKKAFKEPFYKPSKPGKAAPLVRTVNLTDTQKSGIPIRGGIANNGAMLRVDIFTDGKKFHAVPLYVADVVKPALPNRAVMAYKPEDEWTVMDENYRFLFSLHPNDWVKISFKKDSAKEGYFSGLNRATGAISIWTHDRSNLNGKGGFLDGIGIKTALSVEKYHVDLLGRLYPVKEETRQPLNHKRKG

SEQ ID NO: 7270 - protein, 655 aa, synthetic construct
  REGION 1..655: note = Synthetic
MATYGLSEDAAKATANIRLPDGHDMLGLTATTKVLEHLKKEVVPYNVAVERGLGRSHSDERDGVVHDSLPFYGEILERHTLGGSGDPKDSDEKRYGRIANPTVHVGLNQLRRVVNALIRLYGNPEQILVELARDLKMSQKQKDELAKKQKGFEDDNKARKALLESESFDYSSANLRLLRLWEELGFPKLCVYSGETIGIENLFSGDVEIEHILPYSRTLDDTMANKTLSYRMHNRLKRNKAPAEAFSGDEYEAIRLRAQVLPPNKRWRFEKDAMEKYEKEGSGFAARQLNETKHLAVLARKYLVSVCNSENGVRIVTGQMTALLRQRFGLNGILSDDNHKNRTDHRHHAIDACVIGVIDPWILHEIAANAADFENKNELSKITTRFPEPFRGQPRGDFRERVKAKIDAIIVSHKPEHGTGGALHNDTNYGINNTADKLDGELITRKAIDALTPNEVDKVRDLHLRAQLQAIKAEVGKDAKTLAKKLAEFGEAQSPPIRRVRILKKQEDFIPIKDRKTGAPYRTVIAGENHHADIIEDASGKWRGFSVSIFEINQKNYEPKWKVTYPDAKLMMRVHKGDLIELLDSDGIKRIKRVVVLDLSAGRIRLAEHKESGELQKRHEDIDDPFRWDLATISKLKERECRLYAINEIGKLRDY

SEQ ID NO: 7271 - protein, 1061 aa, synthetic construct
  REGION 1..1061: note = Synthetic
MADKYRFAFDLGTNSIGWAVYLLNQAKMPADLVDAGVRIFSDGRDPKSGASLAEERRGPRAMRRRRDRYLQRRTFLMDELIKAGLMPTEEAERKALEKLDPYVLRRRGLDEPLSLHEFGRVIFHLNQRRGFQSNRIADAGNDDESGKIKTAAKKLLAALKEQDCRTYGEFLAKRQAAPKVREREAVRIRLIGAGAKALYDFYPTRDILKHEFDALWDAQLAFHPFLLTVELRGKLHDTMFFQRPLKDPIVGKCTFFPEEPRLAKSHPLSQARRIYQDLNHLRLKEGEAPARNLTLGERDKLAFVLLSGEEITLKAGIRKILKYLPANTTTSLEEGGKTDRLIGDQLVARFGKKGPLKNIWGNFNLAQRADIAWKIGTEQSEPTLVAYLRTTYGVSEEAAQATANIKLPDGHDHLGLTATARILEALKAEVIPYNVAVDRGLELHHSDERDGVIHDRLPFYGEILERHTLGGSGDPNDTDEKRYGRLANPTVHVGLNQLRRVVNALIRLYDNPEQIVVELARDLKMSRKQKDELAKQQKGFEEKNKECKALLESDASAGGADYNPGNLRLMRLWEELGPMPRRCVYSGNIIGIENLFNADVEVEHILPYSRTLDDTMANKTLSFRMHNRLKRNMSPAEAFSDTEYEEIRRRAQILPPNKRWRFEKDAMEKYKKEGGGFAARQLNDTKHLAVLARKYLVSVCNSENGVRVVTGQMTALLRQRFGLNGILSDDNHKNRTDHRHHAVDACVIGIIDPWILNEIASNAADFENKNELSKITTRFPEPFRGKPRGDFRERVKAKIDAIIVSHKPEHGSHSNAKDKSTSGQLHEDSSYGINNSSDREDGNLVKRKALDSLTTKEIDKIRDGYIRSQLQEKRDRLLERGLGKKEFEKELSKILVKFGEDHKVRRVRILIREREFISIKDRKTRRPYRAVIGGENHHIDVVEDTDGVCKGFATTVFEFNQKDRSAEWKTEYPDAKFIMRLHKGDLVQIKDDDGITKVKRVVRLEIKDKRIRIADHNESGVLQKRHEDPDDSFRWDAPPFASFKERDCKLYNVDELGKPRK

SEQ ID NO: 7272 - protein, 1030 aa, synthetic construct
  REGION 1..1030: note = Synthetic
LGTNSIGWAVYQLNQANQVTDLIDAGVRIFSDSRDPKSGAPLAKNRRGPRSMRRRHDRYIQRRTFLMDELVKAGLMPKDEFARKEMEALDPYQLRLKGVDQKLDLYAFGRALFHLNQRRGFQSNRIADDFEEGGKIKQAERRLKGQLEAENCRTYGEFLARRQDDPEVRKRLPVRVRLQGRGMSALYAFYPTRDLLKQEFNVLWSVQAGFHPELTPALHDCLFNATFFQRPLKPPVIGKCTYYPKEARVAKAHFLSQARRIYKDLNHLKYRRGLTPWQTLTLDERDRLAVFLMAGENLTFDKIRKELKLPADSIFSIEDGAKSDKLIGNQIVERLGYKKGPLKHYWPNLTLEQREEIVEKLTSEPDEDALVDYLRATYGLTNEIAHATIKVRLPQGHDNLGLTATTKILAELKKEVVSYDVAVNRGIGADHSDERDDVILDRLPYYGEVLERHTVGGSSDPRDGNEKRYGRLANPTVHVAMNQLRRVTNALIERYGHPEQIVLELAPELKLSQKQKEEFEREIRKNRDKNEVRRRVLEDAGYSASFGNLELLRLWEELGAPAQRYCVYTGRPISLHQLLSGDVEIEHILPYSRTLDDTFANRTIAFIDANRGKRNLAPCESFQGAEYDAIRVRSRTLPSNKRWRFEPDAMDRFEDEDRDFLARQLNDTRHLAKLARKYTERVCNNPKEVWVVTGQLTAIVRARLGLDGVLSDDNKKNRTDHRHHAIDACVIGICDRPFLQSIAQAAERRESRDELSEITKHIKSPFRTFRDRVEAVVNAVIVSHKPDHGGAAEDSRETSGALHNDTNYGINKTADRVDGELITRKAIDALTAHDIDKVRDLHLRKCLQMLHSSVGKDTDALTKALAEFGELNGIRRIRILKKQEDYISIRNRKTGEHYRAVIPGENHAMDVIEGADGVWRGIAMTVFDFNNQGRKPNWLVEQPGARFVMRVHKGDMLHLLDKNGAPSVKRVVSIRPSSNLISLAAHHEGGILQKRHDDSDDAFRWDFANIGKLKERNCRPYKVNELGKVP

SEQ ID NO: 7273 - protein, 1136 aa, synthetic construct
  REGION 1..1136: note = Synthetic
MMERTYRFGFDIGIGSIGWAVISGEKDTARIEDFGVRIFDSGEKSDGKSRKSQERRAFRSVRRLTNRRHFRKIRLKRFLVNIGMLTDDLLINLSKNVDVNTMALKVKALDEKLTKIEIAQCLIHTCNHRGYKPFYMIDDEISDSDAEATDESEKMLQTAYSQMMKNYKRSGLRTISEFICQKLPNNGTDFPNYRNKEGSDNFRLIPRKLLEEEIEKILFAQSSYYPELTASNIQTLKEIIFAQRCFEDGPGDPNNKFRRYTGSLGKIGACPFYKGLERGYRSTLIGDIFAVVNTLSQYRFINQTTGEVALPSDAAKLMLSHVIETGKASIRELQKLVSPLNILIKINDNSESKNLSNSIKFINLLKNDVEGSGLSWKDFIAEEQFDCGHPSRIHQIGVVLSKYQTPSKREKALEDFEFLTPELRSRLSNRKTHGAANASDQFMCEAIQAFLKGEIYGNFQYRTTERIASQDMNQSFRKLGAELLKDEEFNDNPVVFRSINETRKIINALVRRYGSPEAVNIEVASDLNRGYLARQEIRKEQAKKEKENELCRMKIAELLKIDCTEVKGSQIDMYKLYNEQNGRSLYSGVNLGGLEAVLRNTHKEYEIDHIIPYSLILDNTLHNKALVFAGENQAKGQRTPLMYLSAEQKEKFLETINQMFSRKENPISAKKYQYCMLKTVYSDESQELLSQWKTRNINDTRYITKYLVGFIKKYLQFSGDAKVYGVKGGYTSQFRKIWLQAIDGEWGSEEKDRTSDLNHALDAVIIANLTPPYLEIASDNNKLQQIFRKNNGAETREYNEYLEDCVRKMKRYYGFQESYTVSLLKNPNRVPAYAPKLDTEVDIRFNITDPAKFNEKVNNFYGDCSDFIVPPHIPLVSYKPERRFQGQIADSNFIKIRKVDGKDRRIVRKSIKEICKKDIADLYTHDQDLLSSLSRILSEREEKYSIEKYMEENSLKEFRTDCGQLVRKVSLLEKNAVSNYRVKQISDTNHSILSSLKYYCVEVYKDVKGKIHCWGIRYVDIVRKGKKLQIKKASIPPDYVSHVHYLMANDYVEITDKNGKVKCAGYYQSVKNINSNLFYFKQMGLSEIIKIGIAQTDEVRKFDMSILGEKGGEIKCSAQSLFLREKESASAIDGLS

SEQ ID NO: 7274 - protein, 1132 aa, synthetic construct
  REGION 1..1132: note = Synthetic
MTNHSPAGSISSTDWVLGVDLGQRSVGLAAVALDPDGTPTEILASNVVRIDGGLLPGSEESPVSRKAAAGMARRVRRLHRRRRARLKALDRRLMDLGFPVDDGPETYESWLDRARLVEGRIANETERKRATSRAVRHIARHRGWRNPWLSWSAFAELSTPSDNHRRNLAAAAERFDRETEGWTVGQLGAAGTDPRITIRPRTAKDSRRIVHGEAALLEHRVLQEDQLAELRQIWTTQEWDPAELPELEKAVFTQAEPFVPPGNVGRDALPGMQTHPRAPRASLEFQRFRIQSVVGNLRVPVTERSRDLRPLTPEERERVTGLLERWHEREGHVPGERPTWRDVAEAVGVSLRNLRGRDTSDYATATPPTMETLDRLKAGIAALKPAAVRRDVAAWFDEAEDDQISAFVSYLADSTDASNEALDEAGLTDIITGWDEAALEKLGDLPLEPGRAAYSLESLNRLTGRMQADAVDLQEARKREFGVDDSWTPPTPSIETPTGMPAVDRNLVAVRRFVMSMVSQFGMPQLVVIEHVRESFLGVTAVEELRRQQRLDRRRRETAAKEVAAAASGKEPRAADVRRYSLIQRQNGQCAYCGTAIGLRNSELDHIVPRAVGGASTRANLLAVCRACNNLKGKQPFAVWAAADTRTDEDGEKLVSVEAALARTRSWMAPRPSIRERNELREIRQRLRQRESDEPIDERSMESTAYAATALVERVQNYLESQTPEGVQTPPVRVYRGSITASARKSSGVDKVIRLRGKSMKHRGDFRHHAIDAAVCALITPSVARTLAIRESLRTAHRFTGDEHDWKSFTGDSPQARAEHTAWTARMQTLAKLLRDAVDADQVPVSIPLRLGRRVGRVHEDKVRPFDSRPLGGTWSAKELERIVDRRLYTALHHVAASATSGVEVTPELCTELGSSMGATVKLYGSPAAQIPVRGGSARLGAIHHARLYAWRGTRGIEFGMMRVFAGELTAMWPSPATDVLTAPVPEWSMSYRRTAPAVMQQLRSDTAVQVGWIAPGDEIVVLPPREGARASSLDSLVSSVGEDRWTVTGFERATTINVAPRLLSAEGISEETPKAVTSVLNRPGRLAASSLLPRIRVIRRDALGRERRRGGGRLPSSFVPFEVAEQRLQGD

SEQ ID NO: 7275 - protein, 1300 aa, synthetic construct
  REGION 1..1300: note = Synthetic
MNPKIPYCLGIDVGVASAGWALRTLQAPYQILDFGVRIVPIDTTQANSFSKGEAVETATALRTAKRTARRNLHRYRLRRHKLSKALTALGMLPDAHLFDLSAEEKTQGLTLSTKLYGLRDRALREKLSLQEIGRILLHLNQKRGYKSSRKAQNPEETDQKNNKQGQETEGTTPQKGRTSTKTAEKGYLEKIADRESGLVASGLTIGQFFYQKFLENPLFTTKNEIYERETYQKECKAIWDFQKQFYPAVLSESNYKAICKEIIYYQRRLKSQKHLVGFCQYEPKHTRTEKGKETKTVEIGYKTAPRSSPLFQEFVVWQTVNNLRVQTRKDKKGQPLTLAQKQFLFGKLNRNEKAKLSDKECLKLLAEFDNYFADKTQGYSLNFEEVLCNATYAQLHKVLGENPDNHHYLQFELSKTDAINKETGEVYEVIAPVVEQQPLYKLWHLLYATEEDKHLKERLDDNNGFFRFEKETIAKLCKIDFTKGGFANVSAKAVRKLLPQMEKGLSVEAACQTVGYKYSDSETKEESIARELLTKLEVLPKGELRNPVVEKIINQIILLVNEIIAKHGNPAEIRIELARELRMNVKKRKKMTENIKQRTKERQKTEAELRKLIDEGKVKLKEGRDKISLGDLTKYELWKEQGGFSPYTGKAIPIGLLFDTQFYDKDHVFPKTRFYDDSTTNLVIVERADNQTKSNKHSSAALYMQSKGEVAYKEFEKFVNDCKGFSRAKKARLLATEIPDNFINRQLADTRYVGKKLREILRAVSPQVTSTTGSVTAWLREQWELDAVYLKDEKGKTKLDQRGQGIKLKEALLKEMRFEQYPHLQKEDEELQAKIEQSTGTDKDIEKYRATQRKNREDHRHHLLDAIVIAFTEQKHILHLNNLNAAYEDSTKAKEGKHYLYAEPPMPNFREVVKEALASTLVSYRGTKKVAGWKVNPKTEKREIAPRNYLHKETLYGSVMRYKTVPLDKKLLADDEQINSMVDTELQTMLQKLKKQYGQEIGALEKYLKKNPPLHQGKPVAKVTLLVREITAKYDLASISAKDIQYVVDKEVGRAIAARLKRHAEIDKEVEALDNKGKKIEDATAKTPEIEAKIKNLKDEKLLPLFLKNGMEVKTVKVFTKNDNSVTPLYDKPTTPYVQQRNNHHIALYKDQKGKIQKCVVTFWEAVIRKKVGLPVVIKDAQAAHQFIAEQKITDRFIVGKEAHLPEKDWKFVEAIVGDEMFIVDLPLADLQKTMQENNYKVLSKHLYRVQKVQSGEYVFRHHLEANLDNDEAVITLTKSSYQRAIKVKISRLGKISLAE

SEQ ID NO: 7276 - protein, 1109 aa, synthetic construct
  REGION 1..1109: note = Synthetic
LGYYKKVENRKALTAPFWSRYLFLSKRRNIMKYGIGLDCGIASVGYCVTELDSNDEPKRIVRLGSRIFDKAENPKDGSSLAKPRREARGLRRRIRRHQHRLQRIRYMLVSDGIVTQEELDTMFQGQLSDIYEIRTRALDEPINNVEFARVLINLAQRRGFKSNRKVDENTKDKETGKLLGAIEKNRENIAKNGYRTVGEMLYKDERYSKYKRNKGEDYLNTVSRDMIADEIKMIFSAQRSFRMPFATEEIEAKYTDIVMSQRPFDLGPGEGNEKSPSPYSGNQIEKMVGRCTFFPDEYRAVKASYSFQLFSLLQGINNITLVDDGGNAFSLSQQERDELKEYCFKTKSVTYASIRKKLKISPDFKFKNITYTEKGVEESEEKTKFQHLNIYHQMKNILGDAMNSLSHDELDEIGRIFTFYKNDTKIIEALEKTGIDKGLYPALLNLPSFSKTGHISVKACKLLIPFLEEGKTYNEACECAGLDFKAHSNAEKQMLLPPKSDELDDIVNPVVRRAVSQTVKVVNAIIREMGVSPTYLNIELARELSKSKKERDEIEKNYLLNRAKNERIKKEIVDNFGFEPKGQDIVKLKLYHEQDGICPYSLKSIEYDRLFEVGYVDIDHIIPYSACFDDSYNNKVLTFSSENRQKRNRVPLEYLPENKKSDYRVWVNSNIRNYRKKQNLLKEHFTEKDKEDFKQRNLNDTKYLSRVLYNYINDNLIFEDFANGKKRHVISVNGAATAHMRKCWGIDKIRENGDLHHAVDAAVISCVTQGMVNKISKYSFDRETMFDVDYRTGEVKERFPLPYPNFRKELEARSEIEDEKRLKSVLLSFSNYSYDDAESAKPAFVSRMPRRKVTGPAHKDTIRSGKVDGCKISKVELTSLKLKNGAIEDYYKPKSDTLLYNALLQRLIEFDGDAKQAFAEEFHKPKADGTPGPIVKKVKLIERSSSSVKARNENKLGIADNGSMVRIDVFYVENDGYYFVPIYVADTIKPTLPNLACVPGGKPWKEMDDKDFVFSLYPNDLIRITAKKDMKFSVANKDSTLPANKYGNELLLYYGGADISTASINGITHDNSYKFKSCGIKSLVNIEKFTVDPLGNVNKVNKEKRMYFN

SEQ ID NO: 7277 - protein, 1079 aa, synthetic construct
  REGION 1..1079: note = Synthetic
MKYGIGLDCGINSVGYCIMELNSDDEPKRIVRLNSRIFTEAENPKDGSSLAAPRREARGLRRRIRRHKHRLERIRALLVRENIVTQAELDNMFSGTLSDIYELRTAALDAPLNNIEFARVLINLAQRRGFKSNRKSEKSSSDKETGKLLSAIKKNKESIEAGGYRTVGEMLFKDERYAKHKRNKGEAYLNTVSRDMIEAEIHAVFASQRNFGMPFANEKIENEYTDIALSQRPFDLGPGEGPENCKSPYAGKQIKNMIGQCTFFPEEKRAVKASYSFQLFSLLQGINNITLVSSDGNTFPLSQEQRKTLKDYCFKTANVTYASIRKVLQIPQEYTFKNITYTDDDIEKSEKKTKFQHLKPYHEMKKVLGSAIQTLTPEELDEIGEIFTFYKDETIIIKQLEETEIDKSLYDLLLQLPTFEKAGHISTKACKMIIPFLEEGKTYDKACECAGLNFKAHTNMQKQMLLPAKSDELNDVVNPVVRRAISQTIKVVNAIIREMGTSPTYINIELARELSKSKKERDEINKKYKLNQAENERLKNEIIDNFKIKPNGQDIIKLKLWHEQDDGICPYTGVRIKYENLFDDGYAEIDHIIPYSLSFDDSFNNKILTTATQNRQKGNRIPLEYLPESEKDGFRVWVNSNIRNHRKRQNLLKEHFTEADKKEFKSRNLNDTRYLNKLLLNYINDNLLFTDFYNGKKKHVTSVNGAVTAYIRKRWGINKNREDGDLHHAVDAAVIACVTQGIINRITAYSARNEAPYDLNTETGEIKERFPLPYPNFKKELDARTTIEDEKRLKRVLMSFSNYSYDDVEKAKPCFVSRTPHRKVTGAAHEETIRSGKVEGFTVSKTELTKLKLTNGEIEGYYEPESDTLLYNALLQRLNEFGGDAKAAFADEFHKPKADGTPGPVVKKVKTIKRSSSNVKARNKNGLGVADNGSMIRIDVFYVENEGYYFVPIYVADTVKEMPNEACPFGKDKKKIMTDDDFLFSLYPNDLIKITAKKDMKFSLANKESGLPKNKYANEVLVYYSAADISNASISVIMHDNAYKFRGCGIKSLVKLEKYTVDPLGNVSKVNREKRMYFK

SEQ ID NO: 7278 - protein, 1077 aa, synthetic construct
  REGION 1..1077: note = Synthetic
MKYGIGLDLGIASVGYCVTQLNANDEPMRIVRLGSRVFDCAETDKGGSLAQPRREARGQRRRTRRHKHRLDRIKYMLLQNGIVTQEELDNMFVGKLSDIYEIRSKALDEPINNIEFARVLINLAQRRGFKSNRKVEEKSKDKEVGMLLGAIEENKKCIVQNGYRTVGEMLYKDERYAKSKRNKGENYLNTVSRDMIEDEIKKIFFAQRNFNMAFASEKLEEEYTDIVMSQRPFDLGPGEGNKNSPSPYAGNQIELRVGKCTLFPNEPRAAKATYSFQLFSLLQGINNISLIDNASNKHMLCDEERKLLKEYCINTNNVTFASIRKKLGISTDYRFANLSYGEKDVDEVEKKAKFQHLKSYHQMKKILGESIKSFTTEQLDKIGTIFSYYKNDERIKEQLKETDIEESMFESLLQLPSFSKMGHISIKACRLLIPYLDEGKSYNEACECAGINFKGHSNSEKSLTLSPVSRELEDITNPVVRRAVSQTIKVLNAIINEMGASPTYVNIELARELSKSKKEREDIAKNHKKNNDKNEKIKAEIIDNFNIIPNGQDIIKLKLYHEQNGICPYSLKCIEYNRLFEIGYVEIDHIVPYSACFDDSYNNKVLVFSNENRQKGNRVPLDYLEDIKKSDYRVWVNGNVKNYKKKQNLLKEHFDKNDEREFKQRNLNDTRYLSRLLYNYINDNLLFEAFSSGKKTHVMSVNGAVTAYIRKRWGIEKIRENGDLHHAVDATVIAHITQGMINEIISYSFSKETEYIIDNNTGEVKERFPLPYPNFRKELEARSEIEDEKRLKDILHSFPNYSYDDVALAKPAFVSRMPKHKVTGAAHDATIRSGKVEGFMISKTDLTSLKLKNGEIENYYNPESDSLLYNALLKRLIEFDGDAKKAFVGEFHKPKSDGSVGPIVKKVKLIKRSSLNIKARNENNFGIAENSNMIRIDVFYVENEGYYFVPIYVADTVKSTLPNIACPFIDGKEKIMEDKDFIFSLYPNDLIKITKKEMKFNLSNKESTLPSVKYANEALVYFKSADISTASINGITHDNSYKFRSCGIKSLINLEKYTVDPLDNVSKIKKEKRMYFN

SEQ ID NO: 7279 - protein, 1101 aa, synthetic construct
  REGION 1..1101: note = Synthetic
MKYGIGLDCGIASVGYCVMELDFNDEPRRIVKLGSRIFDTAEVPKTGASLAAPRREARGMRRRVRRHQHRLDRIKHLLVEKNIISQAELETLYNGQLSDVYELRVKALDEPVGNCEFARILIHLAQRRGFKSNKRNDGKDKEAGKLLKATESNEALLEQKGYRTVGEMFLKDEKFAEHKRNKGEDYSNTVLRSMIEAEIKAIFEAQRSFGMTFASEEIETIYADIALSQRPFDLGPAKGPENSPSPYHDMLGENLVGQCTFYPEEKHAAKATYSFQLFNLLQKINHIYPLTDFGAKYSLSDEERLSIKNLCFRKKAVNYADIRKLLGISYDYKFNCISYSGKEVEKIKQKLENQDQQALIDEIEKKAKFEYLNNYHQMKKALGDVFNALSEDDLDALGRIFTVFTDKDRIKEELELTDIPKSLHESIYEYMPYFKGYGHISVKACKEIIPFLEKGMTYDKACEAAGIDFRAHSNTEKHELLPPAEDALADIPNPVVKRAVTQTRKVINAIIREMGNSPAYINIELARELPKSKKERDEIDQHNNENRAANERIKNEITEHFGIVNPTGLDIVKLKLYHEQNGICPYTQKTFEYDRLLEPGYVDVDHIIPYSKCFDDSYSNKILTFSSENRQKSNRIPMEYIPESKKSDYQVWVANNIRNPRKKQNLLKAKLTPEDTEGFKARNLNDTQYLSRVLYNYINDNLLFDDYKNKTKKVRAVKGAVTAYMRKRWGIAKVREDGDLHHAADAAVIACVTDGMIQKIRSYSDSQEMNNYAVNTDTGEVIDKLPMPYRDFRNELQKRLESENLDELKLYLSKLPNYSKEALDDVKLCFVSRAPKHKATGAAHMGILRSYSGDGYAVSKKKLCDLKLDKNGEIEGCDFWKNDDRLLYNALREVLTKFRDNKEAIPKNFEFHKPKSDGSDGPIVRSVKCREKVSQYVPLNTENDLAQKTGAGNGSMIRIDVFYVENDGYYFVPIYVADTKKKELPNLACVQGKKGWKPMDDKDFVFSLYPNDLIKVEAKKNMVFSVAQKGSSLQPKIERTTMLVYYSTANISTASIFVITHDGAYEKDGLGIKSLKNIEKYTVDPLGNVHKVGKEKRMRFN

SEQ ID NO: 7280 - protein, 1100 aa, synthetic construct
  REGION 1..1100: note = Synthetic
MKYGIGLDCGIASVGYCVMELDFNDEPRRIVKLGSRIFDTAEVPKTGASLAAPRREARGMRRRVRRHQHRLDRIKYMLVEKNIISQAELESLYNGQLSDVYELRVKALDEPVGNCEFARILIHLAQRRGFKSNKRNDGKDKEAGKLLKATESNRALLEQKGYRTVGEMFLKDEKFAQHKRNKGEDYSNTVLRSMIEAEIKAIFEAQRSFGMTFASEEIEARYTYIALSQRPFDLGPAKGPENSPSPYHDMLGESLVGQCTFYPEEKRAAKATYSFQIFNLLQKINHIYLITDFGVKYSLSDEERLTIKNLCFKKKAVNYADIRKSLGISYDYKFNCISYSGKEVEKIKQKLGIQDQQALIDEIEKKAKFEYLNNYHQTKKALSDVFNALSEDDLDALGRIFTVFTDKDRIKKELELTDIPKSLHESIYNNMPYFKGYGHISVRACKEIIPFLEKGMTYDKACEAAGIDFRAHSNTEKHKLLPPAENALADIPNPVVKRAVTQTRKVINAIIREMGNSPAYINIELARELPKSKKERDEIDQHNNENRAANERIKNEITENFGNVNPTGLDIVKLKLYHEQNGICPYTQRHFDYDRLLEPGYVDVDHIIPYSKCFDDSYSNKILTFSSENRQKSNRIPMEYIPESKKSDYQVWVTNSIRNPKKRQNLLKARLTPEDTEGFKARNLNDTQYLSRVLYNYINDSLLFDDYKYKKNVRAVKGAATAYMRKRWGIAKVREDGDLHHAADAAVIACVTDGMIQKIKKYSASQELDNYSVNTDTGEVIDKLPMPYSDFRNELQKRLESENLDELKMYLFKLPNYSKEALDDVKLCFVSRAPKHKATGAAHMGTLRSYNGDGYSVSKKKLCDLKLDKNGEIEGCDFWKNDDKLLYNALREELVKVGGKGKDFPSDFEFHKPKSDGSAGPIVRSVKVREKASQYVPLNTENDLAQKTGAGNGSMIRIDVFYVENDGYYFVPIYVADTKKKELPNLACSQGKNGWKPMDDKDFVFSLYSNDLIKVTAKKNMTFSVAQKGSSLQPEIKRNEILVYYSNADIATASVLVRTHDGAYEKRGLGIKSLNSIEKYTVDPLGNVQKVGKEKRMRFN

SEQ ID NO: 7281 - protein, 1121 aa, synthetic construct
  REGION 1..1121: note = Synthetic
MIYLSCSYNIPRTIRLLQKGRKPKSSNGSFLEPLSFYLKKGKIMKYGIGLDCGIASVGFCITELDLNDEPKRIVRLGSRIFDKAENPKNGDSLAKPRREARGTRRRIRRHKHRLERIRYMLVRNGIVTQDELDAMFCGQLSDIYEIRTKALDEPISNIEFARVLINLAQRRGFKSNRKVDENTKDKETGKLLSAIENNRENIYKNNYRTVGEMLFKDERYLKYKRNKGENYLNTVSRDMIADEIKKIFDSQRNFDVSFASEEIENEYTDIVMSQRPFDLGPGNGNEKSPSPYAGNQIEKMVGKCTFFPNEFRAAKATYSFQLFSLLQGINNITLIDNGGNTFTLSQQERSILKEYCFNTVNVTYASIRKKLGISLDYKFKNITYTQQGIEKSESKTKFQHLNAFHKMKKILGDSINTFSQDELDEIGKIFTFYKNDSKIIEQLENTSIDKSMYDLLLQLPSFSKTGHISTKACKMIIPFLEEGKTYNEACECAGIDFKAHSETSKQMYLPPKSYELDDIVNPVVRRAVSQTIKVVNAIIREMCNSPTYLNIELARELSKSKNERDEIDKKYQLNKAANDKIKAEIVEHFNIEPKGQDIIKLKLYYEQNGRCPYSLDPIEYERLFEIGYVDIDHIIPYSICFDDSYNNKVLTFSSENRQKSNRIPLDYLPESKHSDYRVWVNSTIRNYKKKQNLLKESFTEKDRKEFKSRNLNDTKYLSKVLYNYINDNLLFDDFFDGRKRHVISVNGSITAYMRKRWGIDKIRENGDLHHGIDAAVISCVTQGMINQISKYSFYKETEFDIDRQTGEVIERFPLPYSEFRNELYARSQISDEKYLKSILLKLPNYSYDDVETAKPAFVSRMPRHKVTGPAHEDTIRSGKVEGYTISKVALTSLNLKDIKENYYKPESDTLLYNALLQRLVEFDGNAQKAFAEEFHKPKADGTPGPIVKKVKILKRSSSNVPARNENKLGVADNGSMIRIDVFHIEGDGYYFVPIYVSDTVKSTLPDLACSRSKSGWKKMDDKDFVFSLYQNDLIKITSKTDMKFTLVNKDSTLPTIKYGNKLLLYYEGADISTASINGITHDNSYKFKGCGIKTLVNIEKFTVDTLGNISKVKKEKRMYFK

SEQ ID NO: 7282 - protein, 1086 aa, synthetic construct
  REGION 1..1086: note = Synthetic
MSRRIIMKYGVGLDCGIASVGYCVTELDFNDEPRRIVRLGSRIFDKAENPKDGSSLAQPRREKRGLRRRIRRHQHRLERIRYMLVQENIVSQAELDTMFKGKLSNIYEIRTRALDEPVSNIEFARVLINLAQRRGFKSNRKVDEETSDKETGKLLGAIENNKENIIQNGYRTVGEMLFKDERYSKYKRNKGEDYLNTVSRDMIADEIKAIFASQRSFGMPFANENTEHEYTDIVMSQRPFDLGPGEGNEKSPSPYAGNQIEKMVGRCTFFPKEKRAAKATYSFQLFSLLQGINNITLVDGNSNKYPLSEQERRILKEYCFNTANVTYASIRKKLGISTDYRFNNISYGENGIEESEKKTKFQHLKNYHQMKKILGDSINAFSHDELDEIGRIFTYYKNDSKIIENLKEAGIDESMYPSLLKLPSFSKMGHISVKACKMLIPFLDEGKTYNEACESAGIDFKAHSMATKQMYLPPKSDELEDIVNPVVKRAVSQTIKVINSIIREMGNSPTYINIELARDLSKSKKERDLIDKKYQTNRAANEQIKKEIADNFGFEAKGQDIIKLKLWHEQDGICPYTLKPIEYGKLFNDKGYVDIDHIVPYSACFDDSYNNKILTFSRENRQKSNRLPLEYLDESQKSKYRVWVNNNIKNYRKKQNLLKECLTENDKKEFKSRNLNDTRYLSKVLYNYINDNLLFDEFYDDRKRHVVSVNGAVTAYMRKRWGIDKVRENGDLHHAVDAAVISCVTQGMINQISKYSFDKETEFDVDTRTGEVLEQFPFPYREFRKELEARSEIEDEKRLKNVLLSLPNYSYDDVEVAKPAFVSRMPRHKVTGAAHKDTIRSGKIEGYTISKIPLTDLKLKNGGIDKYYKPESDTLLYNALLQRLEEFNGNAEKAFAEEFHKPKADGTPGPVVKKVKIIEKSSSNVKARNENKLGVADNASMARIDVFYVDGEGYYFVPIYVSDTVKPTLPNRACVPRNKDGKEMDDKDFVFSLYSNDLIRITAKKDMKFSLVNKDSTLPSNKFSNGELVYYINAGISTASITIETHDGAYAIQNCGIKTLTNIEKYIVDPLGNVNKVKKEKRIYFK

SEQ ID NO: 7283 - protein, 1085 aa, synthetic construct
  REGION 1..1085: note = Synthetic
MKYGVGLDCGISSVGYCVMALDSNDEPKRIVRLGSRIFDRAENSKDGSSLAKPRREARGLRRRIRRHKHRLERIRYMLVNDGIVTESELDNMFSGQLTDIYEIRTKALDMPITNIEFARVLINLAQRRGFKSNRKIDEKSADKETGKLLGAIEKNKENIIANGYRTVGEMLFKDERYSKYKRNKGENYLNTVSRDMIADEIKKIFAAQRSFGVPFANDNIEKEYTNIVMSQRPFDLGPGEGNNNSPSLYAGNQIEKMIGKCVFFPEESRAVKASYSFQLFSLLQGINNITLVDDKGYKYTLSAQEREILKDYCFNTANVTYASIRKKLGISSDYKFKNITYSEKGIEESEKKAKFQHLKSYHQMKKVLGSVINSFSKDELDKIGEIFTFYRNDSKINAELENFITDKSLINLLLNLPTFSGTGHISIKACKMIIPYLEEGKTYSEACECAGIDFKAHAGCEKQMYLSSKSAELDDISNPVVRRAVSQTIKVVNSIIREMGNSPTYMNIELARELSKSKKERDEIDKKYNLNRQVNENLKKEILENFFFEPKGQDIIKLKLWHEQDGVCPYSLKKIEYAKLFSNGHTGNDGYTEIDHIIPYSLCFDDSYNNKVLTFSAENRQKKNRIPLEYLPESKKSDYRVWVNNNIRNYKKRQNLLKEKFNENDKKEFKARNLNDTKYLSKVLYNYINDNLIFDDFNSDKKNHVVSVNGAVTSYIRKRWGIDKIRENGDLHHAVDAAVIACVTRGMINKITSYSNYIETGYCVNIDSGEVKEVFPMPYSNFRNEIETRSDVEDEKRLKELLVSFPNYSYDDVEAAKPAFVSRMPRHKVTGEAHEATIRSGKVDGYTISKTDLTSLKLKNGEIENYYNPEDDKLLYNALLQRLIEFNGDAKAAFADEFHKPKADGTPGPVVKKVKIKERSSLNVKARNDNKLGVAKNGTMIRIDVFYVENDGYYFVPIYVADTIKSTLPNMACVQGGKPWKQMDDNDFVFSLYSNDLIRITSKKDMKFEVSNKNSTLPSKKYDNEILVYYRGADISTASISGITHDDAYKFKGCGVKTLIKLEKYTVDVLGNVHKVKKEKRMYFK

SEQ ID NO: 7284 - protein, 716 aa, synthetic construct
  REGION 1..716: note = Synthetic
MKKVLGSAIQTLTPEELDEIGEIFTFYKDETIIIKQLEETEIDKSLYDLLLQLPTFEKAGHISTKACKMIIPFLEEGKTYDKACECAGLNFKAHTNMQKQMLLPAKSDELNDVVNPVVRRAISQTIKVVNAIIREMGTSPTYINIELARELSKSKKERDEINKKHKINQAENEKLKDEISENGKEPNGQNIIKLKLWREQDGICPYTRTPIKYENLFDDGYAEIDHIIPYSLSFDNSFNNKILTTATQNRQKGNRIPLEYLPESEKDGFRVWVNSNIRNYRKRQNLLKEHFTEADKKEFKSRNLNDTRYLNKLLLNYINDNLLFTDFYNGKKKHVTSVNGAVTAYIRKRWSINKNREDGDLHHAVDAAVIACVTQGIINRITAYSARNEAPYDLNTETGEIKERFPLPYPNFKKELDARTTIEDEKRLKSVLMSFSNYSYDDVEKAKPCFVSRTPHRKVTGAAHEETIRSGKVEGFTVSKTELTKLKLTNGEIEGYYKTAHESDTLLYNALLQRLNEFGGDAKAAFADEFHKPKADGTPGPVVKKVKTIKRSSSNVKARNKNGLGVADNGSMIRIDVFYVENEGYYFVPIYVADTVKEMPNEACPFGKDKKKIMTDDDFLFSLYPNDLIKITAKKDMKFSLANKESGLPKNKYANEALVYFIKAGITTASITIETHDGAYSIPSCGIKSLVKLEKYTVDPLGNLSKVNREKRMYFK

SEQ ID NO: 7285 - protein, 1100 aa, synthetic construct
  REGION 1..1100: note = Synthetic
MNWRLGLDLGTNSIGWSVISLDSEKNVNSLIDLGVRIFSDGRNQKTKEPLAVARRIARGARKSIHRRKIRRRKTFKLLQKEGLFPLSKEEAQALKLKNPYELRIDALERKLEPFELGRVLFNLSVRRGFKSNRKDNNQEETKDTVSANKTKYSQTEMCSNLENAVKNSGYRTLGEFLWKMQEENHGIRFAPNRNVFYPTRKLYEQEFSLIKEKQSEFYPNVDWDAIYQEIFYQRPLKAQPRGKCQFMRDKDRTYKALPCSQKIRILQEVRNLKYIDESKKTCPISEEGEAIIIGLLNTKKDVTFDAMRKALKLSSECTFNLEENRESLKGNSTAVIMRSKNRFGEMWDKLTLEEQDQIVETMITADEDFQVFEVLKKYELSDEQKSLIVKTVLPSGTTMLCKEVTQALVKKMESIGSGCDLVTAEKMLGFKHADQSVTKTDLLEYYGKILVGSTVGGDLSAPEDKPENKYGKISNPTVHVALNQTRTVVNALIKQYGKPEQISVELSRDLKASREAKRKTEQKQNQRRKENVLLNDDLIKKWKISYPNRNDRLKYRLWKELDNTGHKCIYCGKEFDENELFTNNIQIEHILPYSRTLLDAESNLTLAHASCNKDKGERSPFEAFGANPKGYNWAEIKYRSEMLKEASKRNKFAVDAMEAFEKDSGFIARQLTDNAYLSKIAYKYLHSICDNVWTVNGGMTKLLRDKWDIDSVLARKFDEDTVVKLGLTSEQIGEYKKNRRDHRHHAMDAVLIALTDRSLVKEISTMNARSMKNRIEVPPFPIYRQDFIDKVKNIVISFKPDHGFQGKLSKETLLGKIKREEKIDIKNLNENDIQFIKTERVKTEISKCYEETKDIKEVRKQFKDIYPQIIVFKEFFVSRKNLANFNSDKDLENIVDAKIKERIRAFVENHSEMKFEQAILEYSKQTGTKKVRCINHGQTPIEINNSAVPRYLDPEDFFAAVVWKIPPKKEGGKETFKAKYIRRDQVGKDNKIKEDVLKSPEPAAKNIAIVYKDDYLEFLFEGKWYKCRIAGYSTTDNKFDIRPIYTATDCYDWLYSTNEAMIENCWNPKKGQNHVSVNVLFGERQAHSITVNPIGRVFRK

SEQ ID NO: 7286 - protein, 764 aa, synthetic construct
  REGION 1..764: note = Synthetic
MRNKNRFGELWDKLTLEDQDEIVETMITADEDSQVFEILKKYELSDEQKDSIVKTVLPSGTTMLCKEVTQALVKKMENIGSGCDLVTAEKMLGFKHADQSVPKTDLLEYYGKILVGSTVGGDLTEPESNPEKRYGKISNPTVHIALNQTRTVVNALIKRYGKPEQIAVELSRDLKASREAKRKTLQKQEKQRKANIQLNADLTNIWKINYPNRTDRLKYRLWKELDHLGHKCIYCGKELYTNELFTNNIQIEHILPYSRTLLDKESNLTLAHASCNKDKGERSPFEAFGANPKGYNWAEIKYRSEMLNEASKRNKFAVDAMEAFEKDSGFIARQLTDNAYLSKIAYKYLHSICDNVWTVNGGMTKLLRDKWDIDSVLARKFDEDTVVKLGLTSEQIGEYKKNRRDHRHHAMDAVLIALTDRSLVKEISTMNARSMKNRIEVPPFPIYRQEFVDKVKNIVISFKPEHGAEGKLSEETPLGKIKREERIDIKNLTCDDIQFIKTERVKTEISKCFEETKDIKAVQKQFKDIYPQIIVFKEIFVVRKNLASLESDKNLKSIVDRKIREKISAFVENHKDMKFNEAILEYSKQTGIKKVRCVNHDQIAIEINNSEVPRYLAPNDYFAAVVWKIPPKKDGGKEKFEAQFIRRHQIDKGNKLKDGVLRPPHPAAQNIGTIFKDDYLEFLFEGKWYKCRVAGYSATANCFDIRPIYAVTDCKDWLYSTNETMIENCWKPQSGHNFISVNVLFGERQAHSITVNPIGRVFRK

SEQ ID NO: 7287 - protein, 578 aa, synthetic construct
  SITE 331: note = misc_feature - Xaa can be any naturally occurring amino acid
  SITE 110: note = misc_feature - Xaa can be any naturally occurring amino acid
  REGION 42..44: note = misc_feature - Xaa can be any naturally occurring amino acid
  SITE 31: note = misc_feature - Xaa can be any naturally occurring amino acid
  SITE 484: note = misc_feature - Xaa can be any naturally occurring amino acid
  SITE 150: note = misc_feature - Xaa can be any naturally occurring amino acid
  SITE 449: note = misc_feature - Xaa can be any naturally occurring amino acid
  SITE 17: note = misc_feature - Xaa can be any naturally occurring amino acid
  SITE 467: note = misc_feature - Xaa can be any naturally occurring amino acid
  SITE 438: note = misc_feature - Xaa can be any naturally occurring amino acid
  REGION 33..35: note = misc_feature - Xaa can be any naturally occurring amino acid
  SITE 122: note = misc_feature - Xaa can be any naturally occurring amino acid
  SITE 46: note = misc_feature - Xaa can be any naturally occurring amino acid
  SITE 541: note = misc_feature - Xaa can be any naturally occurring amino acid
  SITE 451: note = misc_feature - Xaa can be any naturally occurring amino acid
  SITE 96: note = misc_feature - Xaa can be any naturally occurring amino acid
  SITE 26: note = misc_feature - Xaa can be any naturally occurring amino acid
  SITE 28: note = misc_feature - Xaa can be any naturally occurring amino acid
  REGION 22..24: note = misc_feature - Xaa can be any naturally occurring amino acid
  REGION 98..100: note = misc_feature - Xaa can be any naturally occurring amino acid
  SITE 366: note = misc_feature - Xaa can be any naturally occurring amino acid
  REGION 10..12: note = misc_feature - Xaa can be any naturally occurring amino acid
  SITE 470: note = misc_feature - Xaa can be any naturally occurring amino acid
  REGION 57..58: note = misc_feature - Xaa can be any naturally occurring amino acid
  SITE 88: note = misc_feature - Xaa can be any naturally occurring amino acid
  REGION 1..578: note = Synthetic
  SITE 49: note = misc_feature - Xaa can be any naturally occurring amino acid
  SITE 15: note = misc_feature - Xaa can be any naturally occurring amino acid
  SITE 102: note = misc_feature - Xaa can be any naturally occurring amino acid
  SITE 55: note = misc_feature - Xaa can be any naturally occurring amino acid
  SITE 539: note = misc_feature - Xaa can be any naturally occurring amino acid
  SITE 496: note = misc_feature - Xaa can be any naturally occurring amino acid
  SITE 446: note = misc_feature - Xaa can be any naturally occurring amino acid
  SITE 128: note = misc_feature - Xaa can be any naturally occurring amino acid
  SITE 533: note = misc_feature - Xaa can be any naturally occurring amino acid
  SITE 494: note = misc_feature - Xaa can be any naturally occurring amino acid
  SITE 364: note = misc_feature - Xaa can be any naturally occurring amino acid
  SITE 40: note = misc_feature - Xaa can be any naturally occurring amino acid
  SITE 130: note = misc_feature - Xaa can be any naturally occurring amino acid
  SITE 51: note = misc_feature - Xaa can be any naturally occurring amino acid
  SITE 522: note = misc_feature - Xaa can be any naturally occurring amino acid
MRILVFPIRXXXTGXNXGCGKXXXKXPXRGXAXXXERSSXAXXXFXKNXEXEHIXPXXRTLCDAESNLTLAHAACNAFKKERSPFEAXGSSPAGYXWXXXLXRANRLKNXAKRSRFAENAMXQFEKDXGXISRQLTDNAYLSRMALRYLXAVCRDIWAVSGGMTKLLRDKWNIDSILKRKIGDEEIVHFGLKDEDIGKYKKNRSDHRHHALDATVIALIDRSLVKKISDLNQIHQKNRIEVPPMPIPREELAGMTRNVTVSFKPDHGAQGKLSKETLLGKIRRAEQVPISEIKTEEDIACIRNETVRMAFEAKYKECKDIKKAQKVLKDLXPSVWMYKDYFVSRVPVVSLGEKNIDDVVDEKIXSXLKDFAEKHKGEKWETVMQLFSETEWQGKPSAGGKPGKKYRIVKVRCINRVQTPIEITSGSVPRYLCPEDYLXAIVWELPXKKXGXRPTYQATFIRRDEIGXDGXPKNPAKPHPAAKKXCIVYKNDYLXFXDNGRWYKCRVAGYAATSNKFDIRPIXAVTDCKDWLIXTNDTMXEXCWKGQAGQNFISVNVLFGKMYARPITVNPIGKVFRKK

SEQ ID NO: 7288 - protein, 1016 aa, synthetic construct
  REGION 1..1016: note = Synthetic
LSILISHDTISLKLKIERNKMNWRLGLDLGTNSIGWAVIKLDKDEPTDIHDLGVRLFSDGREPAGEGRIGESLAVARRTARGIRKNLRRRKLRKRELLKQLIADNLFPTDREKREILKSLNPYELRTKALDKKLKSEELGRALFHLGVRRGFKSNRKDVTADIDTNTKKEQEGNAAKTNNLSTKMKETGARTLGEFLYNLYIKEKANNDKKNLFGSAAHSKQLIRFTPGNADYYPIRKMYEDEFDAIRKKQESFYPNIHWDKIREIIISQRPLKKQERGRCQFIPDKERAFKALPSLHHFRMLQEINNLVMYDEKNNPVQLTTEEKEILFELLDSKKEVKFDKMRKKLKNNYRFNLESELRKDLKGNETARAMRQEKCFGILWDKINITEQDNIIELLIDAESDEEILPALERYHLSEEQKKNILKCQFSGGTASVCKEFAQKINPEMHTWILYHEAVKKLGFDHSEETVEKSDLLPYYGKVLIGSTIGGGKSDDEKEPEKKFGRIGNPTVHVALNQVKTVVNCLIKQYGKPTQIVVEVSRDLKASREDKNAMYKKQTENAKINERINKNIKDHNPHIPYPNRADRLKYRLWIELGAEQLSRRCIYCGNVIGASEVFSSHIEIEHILPYSRTLMNGEGNLTLAHKNCNAAKGERSPWEAFGSNPKGFNWSDICSRIEVLPKSKQRKFAVDAMQNIEEGFIDRQLTDNAYLSKISRKYLKAVCDNVWVVTGQATKILRDRWCIDEILKRKITDKEIAHFGLDAKMIGQYKKNRFDHRHHALDAVVIGFTDRSMIQEISRKNAMRKKSQIEVPDRPFTHIELIEKVKKIVPSFKPDHGPEGKLSKETALGKIKQEREIPIKELKEGMIRLIKSDKVRSDFETECANSNFKDAVKKLKDIYPSIKIYDEIFVSRTALVSLKKRENVKDIVDEKIQKMIYAYLDKNPDGDFEKLLESFSQETGIKRVRCKTKDQSPIVIEKNTDNNPRTRSVHRTLGADPRHHVYPYRRKPVGISNQRCR

SEQ ID NO: 7289 - protein, 1437 aa, synthetic construct
  REGION 1..1437: note = Synthetic
MKTILGLDLGPSSIGWALINTENEKPEKIIKAGSRIIPMDAKEMSDYESGKLQSAASLRTGFRGMRRLYERASLRRERLLRVLNILGFLPCHYSNQIDFETHPGKFKDNGEPLLPYKRNEDGKSEFVFKSSFLEMLEDLKKNNPGTLADGKLIPYDWTIYYCRKKALYAEISRGELAWILLNANAKRGYYQLDEESDEKVNEKKEYCRTKVINVEKQDEDRKQKGYYFYEITYENGLVQKRKCKMQPWRVGDEVDLIVTTPLDDRGKPKVDEDGNIVRRLSSPKEDDWGLVMKKTQAGIDASGGTVGEYIYGNLVKNPSEKVKGGFVKTIERHYYKDEIRKILESQKRFIPELNDAELYMKCVKELYRNNEAHVNELSHKNIVDFLINDVIYYQRPLKSKKSCIADCPYESYNYVDSETGEVKKRPLKVMPKSHPLFQEFRLWQFIHNLRITENERTVDNHVVLDYDVTMQELGTPEQVCDLYDKLSSVSTIKESAVLKALCLNPKKYKWNFGSTEFPGLKTHHSFVTKIEKLENAKKLSSDEEEKLWHILYSVSDRDELEKALKHFAEKCGYDKDKFYELFKSVPQMRGDYASYSKKAVKRLLSLMRTGRYWSADEIDKVTRARIEKHIAENTVLEDSFGEYGKIEDFQYLRLSDACYVVYGRHSENADNSIWESPEDIDKYIAGEFRKNSMRNPVVEKVVGETLKVVRDIWKTYGKPAEIHVEMARSLKEPNDKREEMTKKIAENRKKNLELRQKLQELKENGKADNVNPNSSMHMLKYKLWEEQNKQSPYTRKSISIAKLFTSEYEIDHIIPQKRYFDDSFTNKVVCESAVNKDKGARLSYEYLLAEGGKEISLGNGEKVTLKTAEEFEAFVENNYSSQEKARKRKNLMRTDVPASFNASQLNNTRYIARKTAEILSHIVREEDDQGSRSKNIIMTNGSITDRLKKDWGLKQTWNDMMRPRFERLNDISQSNDYGEEIDDGKGKHYFQTRVPEANADKFDIKRIDHRHHAMDAIVIACTSLNHINYMNNESGGETKRYDLKKLLCEGKDRQFTKPWETFTQDSRKALDDIVVSFKQNLRIVSRASNYYYHYVDGKKVLTKQTKGDSLSIRKPLHKATYSGLVRLPITKNEKIENTIDNPEQIVDKTIRKELKKILAGYNGSADKKKIKKYFKDRDYKLNGKDVSKVKVRVMPENAEYSSHRTPVASITTQKQLESITDTGIKKILQNHLENYGGNFEEAFSPEGISSLNDNIKLLNGGRDHKPIKCVRVSEKFSTKFPVGQVASKAKSYVEAEKGTNLFFAIYVDENGKRVFETIPLILAVERKKQHLPAVPEYNEKGYKLLFSLSPGDLVYVPEEDEHITLPLNTRRIYKTVSLGRYQCLFIPQSVAAPIVNNTELGSNNKSENSWDNYQIKSRCLKLETDRLGNIVKVIGHD

SEQ ID NO: 7290 - protein, 1442 aa, synthetic construct
  REGION 1..1442: note = Synthetic
MKTILGLDLGPGSIGWALVNVENGKPKSIIKAGSRIIPMDAGEMSDYESGKLQSSASVRTAFRGMRRLYERAALRRERLLRVLNVLGFLPQHYRDQIDFGEHPGKFKNHGEPLLPYRKNEAGKSEFIFQPSFLEMLEDFKKNNPQVLDDGRLIPRDWTLYYCRKKALDREISREELAWILLNANSKRGYYQLDEEKTEKSNAEKEYRRAKVLDVERLEEDRKQKGFYFYKITYDGGLTQTRKCKMQPWRVGDEVDLIITTPLDKNGKPKKDEDGGIRQTLSSPKEDDWGLVMQKTQAGIDHSNCTVGEYIYNSLLENPSEKVRGGIVKTIERHYYMEELRKILESQARFIPELCDHELYMKCVRELYRNNEAHVNELKRGNIVDFLIKDVIYYQRPLKSKKSCIADCPYESYTYVDKETGEIKKRPLKVMPKSHPLFQEFRLWQFIRNIRITENEKIVDGRKYFGYDVTAKYLGTPEDVCRLYEKLSGYENIAESIVLKSLGLNAKMFKWNYGSKKEFPGLKTHHEFATRIAKLEKARELTQKEEYKLWHILYSVSDRDELEKALKHFAEECGFDGQSFYEKFKTVPNMRGDYASYSERAVKRLLQLMRSGKYWNEKEIDEATLKRINAIIEYGYSPYEEFSEFKRVDDFQYLQLSDACYVVYGRHSENADNSVWNSPEEIDEYIGGEFRKNSMRNPVVEKVVAETLKVVRDIWKTYGKPAEIHVEMARSLKDPNDKRKEATERMAANRKETIDVREKLQELKDEHKADNINPNSFIHILKYKLWKEQGGQSPYTGKSISIARLFTDEYQVDHIIPQKRYYDDSFTNKEVCESAVNLDKGARLAYEYILAEGGKEINVTINGKHEKIAILPKEQYEEWVKKHCVRENGIGRKGKNLMMTDVPASFNASQLNNTRYIARKTAEILSHIVREGSDPGARSKNIIMTNGSITDRLKKDWGLKQIWNELMQPRFERLNDKTQSNDYGEDVVDAHGRHYFQTKVPEGLAEKFDIKRIDHRHHAMDAIVIACTSLNHINYMNNLSGGEKERYDLRRVLCEKDSRAFLKPWETFTQDSREAMNNIVVSFKQNLRIVSRASNYYSHYVDGKKIIERQTKGEHFSIRKPLHKATYSGLVRLPYTKMEKIENTIDNPEQIVDKSIRKGLKEILVQYNGAADKKKIKKYFKDRDYKLNGVDVAKVEVRIVPEQAGHSAHRTVLGSITNRKQLDSITDSGIKKILLNHLENYGGNYEEAFSPEGISSLNDNIRQLNGGRDHKPIKCVRVSETFTTKFPVGQTASKTKSYVETEKGTNLFFAIYVDEERKRTFETIPLNVVVERKKQHLLAVPEHNENGDKLLFSLSPGDLVYVPEEGEHIAMPLAPKRIYKMVSSGKGQCFFIPQNIAAPIINNTELGSNNKSENSWDNRQIKSVCLKLETDRLGNIIKITGND

SEQ ID NO: 7291 - protein, 1442 aa, synthetic construct
  REGION 1..1442: note = Synthetic
MKTILGLDLGPGSIGWALVNTENGKPESIIKAGSRIIPMDAGEMSDYESGKLQSSASVRTAFRGMRRLYERAALRRERLLRVLNVLGFLPQHYRDQIDFDEHTGKFKNHGEPLLPYRKNETGKSEFIFQQSFLEMLEDFMKNNPQVLEGGRLIPRDWTLYYCRKKALDREISRGELAWILLNANSKRGYYQLDEEKTEKSNAEKEYRRAKVVSVEKQDEDRKQKGYFFYKITYEGGLTQTRKCKMQPWRVGDYVDLVITTPLDNNGKPKKDEDGEIRKTLSSPKEDDWGLVMQKTQAGIDHGNGTVGEYIYNSLLENPSEKVKGGIVKTIERHYYKDELRKILEAQSRFIPELQDHGLYIKCVKELYHNNESHANELRHRNIIDFLINDVIYYQRPLKSKKSCVADCPYESYTYVDKETGEIKKRPLKVMPKSHPLFQEFRLWQFIRNLRVTENEKIVDERRFFGYDVTAKYIGTPEDVCRLYEKLSGYADISESKVLKALGLNAKMFKWNYGSKKEFPGLKTHHEFASRIAKLENARELTQKEEYKLWHILYSVSDRDELEKALKHFAEECEFNPQNFYEQFKAAPKMRGDYASYSERAVRRLLPLMRTGKYWDEKEIDAATLKRINAIIADGYNPCEDFPEFKRVGDFQNLQLSDACYVVYGRHSENADNSVWTSPEEIDEYLCGEFRKNSMRNPVVEKVVAETLKVVRDVWKTYGKPAEIHVEMARSLKDPNDKRKEATERMAENRRDTIDVREKLQELKDGHKADNVNPNSSIHILKYKLWKEQGGQSPYTGKSISIARLFTDEYQVDHIIPQKRYYDDSFTNKVVCESAVNLDKGARLAYGYILAEGGKEIDVTVNGKREKTAIFPKEQYEEWVKKHCVRENGIGRKGKNLMMTDVPASFNASQLNNTRYIARKTAEILSHIVREGSDPGARSKNIIMTNGSITDRLKKDWGLKQIWSELMQPRFERLNDKTQSNDYGEEITDSNGKRYFQTRVPEVLAEKFDIKRIDHRHHAMDAIVIACTSLSHINYMNNLSGGEKERYDLRRVLCEKDSRAFLKPWETFTQDSREALNSIIVSFRQNLRIVSRASNYYNHYVDGKKVTERQTKGEHFSIRKPLHKATYSGLVRLPETKMEKIENTIDNPEQIVDKSIRKGLKEVLAQYNGTADKKKIKKYFKDRDYKLNGVDVSKVKIRFVPEQARHSAHRTALGSITNKKQLDSITDSGIRKILLNHLENYGGNYEEAFSPEGISSLNDNIRQLNGGRDHKPVKCVRVSEKFSLKFSVGQNCSKIKTYVEAADNTNLFFAIYVDEEGKRAFETIPLNVVVERKRQHLSAVPEHNDKENKLLFSLSPGDLVYVPEEGEHIAMPLDYERIYKMQSTDSNKCFFVPQYVAARIADKIEYGPKNKSERDLNGNQIKKVCLKLEIDRLGNIIKITGND

SEQ ID NO: 7292 - protein, 1179 aa, synthetic construct
  REGION 1..1179: note = Synthetic
MSKKVSRRYEEQAQEICQRLGSRPYSIGLDLGVGSIGVAVAAYDPIKKQPSDLVFVSSRIFIPSTGAAERRQKRGQRNSLRHRANRLKFLWKLLAERNLMLSYSEQDVPDPARLRFEDAVVRANPYELRLKGLNEQLTLSELGYALYHIANHRGSSSVRTFLDEEKSSDDKKLEEQQAMTEQLAKEKGISTFIEVLTAFNTNGLIGYRNSESVKSKGVPVPTRDIISNEIDVLLQTQKQFYQEILSDEYCDRIVSAILFENEKIVPEAGCCPYFPDEKKLPRCHFLNEERRLWEAINNARIKMPMQEGAAKRYQSASFSDEQRHILFHIARSGTDITPKLVQKEFPALKTSIIVLQGKEKAIQKIAGFRFRRLEEKSFWKRLSEEQKDDFFSAWTNTPDDKRLSKYLMKHLLLTENEVVDALKTVSLIGDYGPIGKTATQLLMKHLEDGLTYTEALERGMETGEFQELSVWEQQSLLPYYGQILTGSTQALMGKYWHSAFKEKRDSEGFFKPNTNSDEEKYGRIANPVVHQTLNELRKLMNELITILGAKPQEITVELARELKVGAEKREDIIKQQTKQEKEAVLAYSKYCEPNNLDKRYIERFRLLEDQAFVCPYCLEHISVADIAAGRADVDHIFPRDDTADNSYGNKVVAHRQCNDIKGKRTPYAAFSNTSAWGPIMHYLDETPGMWRKRRKFETNEEEYAKYLQSKGFVSRFESDNSYIAKAAKEYLRCLFNPNNVTAVGSLKGMETSILRKAWNLQGIDDLLGSRHWSKDADTSPTMRKNRDDNRHHGLDAIVALYCSRSLVQMINTMSEQGKRAVEIEAMIPIPGYASEPNLSFEAQRELFRKKILEFMDLHAFVSMKTDNDANGALLKDTVYSILGADTQGEDLVFVVKKKIKDIGVKIGDYEEVASAIRGRITDKQPKWYPMEMKDKIEQLQSKNEAALQKYKESLVQAAAVLEESNRKLIESGKKPIQLSEKTISKKALELVGGYYYLISNNKRTKTFVVKEPSNEVKGFAFDTGSNLCLDFYHDAQGKLCGEIIRKIQAMNPSYKPAYMKQGYSLYVRLYQGDVCELRASDLTEAESNLAKTTHVRLPNAKPGRTFVIIITFTEMGSGYQIYFSNLAKSKKGQDTSFTLTTIKNYDVRKVQLSSAGLVRYVSPLLVDKIEKDEVALCGE

SEQ ID NO: 7293 - protein, 1178 aa, synthetic construct
  REGION 1..1178: note = Synthetic
MAKKLSKRYRQQAEEIRTRLKGRSYSMGLDLGVGSIGLAIAAMEESKNYGYEPTDLVFVTSRIFTPSIGASERREKRGQRNALRHRRNRLIFLWKLLAERKLMLPYSTKSVDDPARLRFKEAMIQADPYKLRLKGLTEALTLSELGYALYHIANHRGASSIRTFLDEVQDADEKKLEEQRSITNKIMAEYNVSTFIEVLTIFNRDTFVGYRNVDKLKGKSVPVPTRDIISAELDRLLLTQAQFHPQTLSEDYIQRIKDAILYENEKIVPEPGNCPYFPDEKKLPRCHFLNEERRLWEAINNARLGEPDESGSFRRYNQVRFSDKERQELFDYLRSGKSVTAATIAKTLFPRYKNHEIILQGRDRKTSKIEGFRFRHLEEKPFWARFTEEQQDEFFAIWTNFADEKRVEEHLVMHLGLSEEEAADAIKTVKLIGDYGPLGKTATLLLMKYIEDGDTYTEAVMKAVEAGEFQETATREVQEFLPYYGKILSESTQALMGKYWHSSFKDRIDRPGFVKPNTDREEEVHGRIANPVVHQTLNEMRKVVNEVIEILGSKPSEIVVELARDLKVGAEKREEISKEQQKNEATAQRIYDTYCKKNGLSKRYIQAFRLYEDQQFICPYCLETISVAEIAGNQTDIDHIFPIEDTSDNSYANKVLAHGSCNKEKGKRTPYAAFGHTEKWGRIMHYLDATPSMKAKRWRFEKTDDEYAEYLQSKGFMSRFATDNSYIATAAFEYLACLFDYSERNSVRTTKGWETSILRKAWNLQGIDDYFGSMHWDKKDSPDSVKGKNRGDHRHHGLDAMVTLYTSRSLIKQINTLSSKGLKAEKIESLIPIPNYYRDDSLLREDQRNLFRKYVQSFFERNAFVSVKTNHAINGPLVKDTVYSILGANPKGDELVFVVNKKVKDIAVKQGTVEEVESAIRGRFSTQGASWYDDELRMKIEAIQRTNEEIIDRYKSNLVQAERTLIEENRKLEEEGKKQRTINEKLISKKALELSGGTYQLLSNNSRVKTFVVKEPTATSKGYGFDTGSSLCIDLYHNEEGKLQGEIIRKVYAMDPDYTPMYKQKGYKLFERIYGRDILEITASSPVPEEKEDAIKKVARVRVPNAMDGRTYVKVDTFTEAGPEIRLFLSNIAKADGGQDASFRIGSMQQYDVRKVQLSPAGLVEYVSPVLKDLEMEG

SEQ ID NO: 7294 - protein, 1175 aa, synthetic construct
  REGION 1..1175: note = Synthetic
MSKKVSRRYEEQAQEIRQRLGDRPYSIGLDLGVGSIGVAVAAYDLELQQPSDLVFVASRIFIPSTGAAERRQKRGQRNSLRHRANRLKFLWKLLAEKGLMLPFSGEDVPDPARLRFAEPLLHANPYALRLKGLKEQLTLSELGYALYHIANHRGSSSVRTFLDEEKSSDDKKLEELQQMTEQLAKDKGLSTFIEVLSAFNAEGLVGYRNTDALKTKGVPVPTRDIISKEIDVLLGTQKQFYPDILSETYCERIVSAMLYENEKIVPEAGYCPYFPDEQKLPRCHFLNEERRLWEAINNARIKRPMQDNLAKRYQTESFSAEQRAVLFHHARGGNDITPKFVQKEFPELKTSVIVLQGKEKANQKIVGFRFKKLEDKPFWARLTTDQKDAFFSAWTNIPDDQRLKTVLVDSLSLKKEEAEDALKTISLIGDYGPIGKTATLLIMKYLEDGLTYTEAIEQGMTTGELQELSAWEEQALLPYYGQILTGSTQALIGKYWHSAFKEKRDGEGFFKPHTNTEEEKYGRIANPVVHQTLNELRKLINELIGILGNKPQEIVVELARELKVGAEKREEIIKKQAQHEREAALVYSKYCEPNNLDKRYIERFKLLEDQNFQCPYCLEHISVADVVSNSVDIDHIFPREDTADNSYGNKVVAHKHCNDFKAKRTPFAAFSNTPIWGSVMHYLDETPGMWAKRKKFEKNEEEYAKYLQSKGFVSRFETDNSYIAKAAKEYLRCLFDPNNLTAVGSLKGQETSTLRKAWNLQGIDSYLGNKHWSKADDASPTERKNRNDNRHHGLDAIIALYCSRSLIKKINTMSAQGKRASEIEAALPIPGFANDSTLTVEECRDLFRKKIQSFLELNAYISFKTDNDTNGPLLKDTVYSILATNPKGDELVFVVKKKVKNIAVKTGGYDEIESAVQGRFTGKMAKWYSDELKLQVSQLQAKNAAMLQTYKESLAKAEELLEENNKTLVEMGRKPLQVNEKAISKKALELVGGSYYLLSNNQRTKTFVVKEPSPQIKGFAFDTGSNLCLDFYHDAQGKLCGEIIRKVNAMNSSYTSEYRKQGFELYVRLYQGDVCELKAAEYSENELSNLEKTTIVRVPNAKFGRTLVVINTFTETASGFQIFFSNLGKSKRGQDASFTLSTIKNYDVRKVQLSSAGLVRYVSPLLADKTLNEEV

SEQ ID NO: 7295 - protein, 1075 aa, synthetic construct
  REGION 1..1075: note = Synthetic
MLMSKPYLLSLDLGTSSIGYTTFALDEDNQPTDVTDLGVRIFSDGRDPKTKEPLAVSRRIARGIRRTRDRGQNRVRRLVKELIDFGLLPANEESRKVVFDKICPYEARHKAVNGKVDKETLARAIFHIGRRRGFKSNRLAGESEESDYKNKIKELRQELGENTLGEYLYAKLKENHKLAKAKRPIEQKVIRFRGGETDFYADRHMYDNEFHKIRAIQGNDHLADEQWDALHETAFWQYPLKPVPKGKCRFYPEETRAHIDLPISHQYRIFGEVNNLKYVSKGIEHELNERQRQALYSELNNKKTLSFKGMLKLKDVHKSPYFPSDATFNLDVKSRSGKLHGNKTMCDLRKPELLGELADELPSNKLNDIVHYLVEPLKKVNGKDVIVETPELKAWLKSKLPQLSDEQIRNLSKYRFKRDTPSVSRKFMEQINPVLEKTGLVYSDAVAQLEDEKGEKFHHSFIKPNTFDELPYYGVAMPESVWGDHSEIDKNKAPDERDEDAYQHGRIANPTVHVALNQLRVVVNDVIKKVGTTPSKIHIELTRDLKNSKEARKRIEQAQSKNKKKNDEIRKFLEEEFDIDNPHREDFQKIKLWEELGKQGARHCVFTGRTISARQLFNGEVEIEHIVPFSRCYDDGMVNKTLAYKNVNHRKGNKTPAEAFGGEEYEAILKRALASFGQGPKFERFKEDAFEHFYGEEKGTMIQRQINDTKYITRKAAQYLSCICTDVITVNGRLTAILRDVWQLNHFKDKETGHYRDDHRHHIVDAFVVGLTSRRLIKQLGTRRSKHEQSERNLYHFVKHRVDDIPHLKEQLMQALDNVYASYKPDHTDQGSMFNDTAYGIEYDDDGNQWCITRKAVGNLSWEEVFRIRGNRQRENLLDYLTDGQGIDFDVQSIRGFTKQLKEHFKNQKEFEKALQNYSEKTGIKKLRINVPNNSVKPIPSAPYKGYGLNGYAYCDVWQIPTKKDPKTGKWLYKYEGAFVPYAEIKKYKKKPKRPVDKQGRSHPAAKRLMRLYKDDNIQLTNLETGEIEVFRVAGYNTSVNCIDIRPNLQAVNTGQKFTSVNTIFQDHKVSRMKQ

SEQ ID NO: 7296 - protein, 1068 aa, synthetic construct
  REGION 1..1068: note = Synthetic
MHTPYLLSLDMGTSSIGYVVFAIDEDGEPTAIEDLGVRIFPDGRDPDSNSNEPLAVARRKARGIRRTRDRGQNRVRRLVKELIECGLLPANDQERKIILQQTCPYEARALAVNQPVEPYTLGRAIFHLGRRRGFKSNRLASGGEESEYKSKIESLRKSLGDQTLGEYLYQKIKQNKVLANKGTPIKQTPVRFRNGETEFYADRAMYQSEFRKIQETQGNTLISDAQWALLAETVFFQYPLKPVLKGKCRFFPEETRAHIDLPISHEFRILQEVNNLKYVSQGVNHDLTERQHNAIIHALNKSKSKTFSSLVKLKDEHKNPFFPSDAQFNLDVASRSSKLIGNETLINLRKTDYLGKLADTLSTDKLNDIIEYLIEPFEQVAGKNVIASDDKVISYLKEQLPSLSDEQINNLSNYRFKRGTASVSRKFMEQINPFLKQGLIYSDAVTQLGNETGIPLHHSHFSMDELMDELPYYGVAMPESVWGEKPESDANKAPHERDEDAYQYGKIANPTVHLALNQLRFVVNQAIAKMGGTPQKIHIELTRDLKNSKQAREELSRNNAKNKKNNDRIKDLLKTEFGIENPRREDIQKVKLWEELDDRTCIFTEQRISARQLFNGEVEIEHIIPFSRCYDDGINNKTLAFKNANNIKGNRTPFEAFGVDQERYSIMMKRALKSFGHSSKYERFKEGAFEKFYGGDRGDMIARQLNDTKYISRKAKQYLSCICEPQSIISVNGQITAILRDVWQLNYYKDKTTDNYRNDHRHHIVDAFVVGMTSRSLIKRINTTTSKDQRHINNLYQFLKDRVSDNLDASLKAQLKHMLGAVNASYKPDHTDQGSMCNGTAYGFTELDGKKYGVTRKPVNKLKHSDIFSIRDSLIKKRILQHLTNNKNTIDQNKLRSTIPKSQLTHKLADFTKTTGIKSVRILVKNQSISPIQSAPYKGYALNSYAYCDIWQTPYKRDKKTGKYTYKYEGAFVPYAEVNQYKSTPKRPVDKEGRSHPAAKKLMRLYKNDCIELVDKRSGEVFSKRVAGYSVSNNKIDLRNNLESQNKERKFISINKIFNENHVSKKKI

SEQ ID NO: 7297 - protein, 1067 aa, synthetic construct
  REGION 1..1067: note = Synthetic
MSVSSPYSISLDMGTNSIGYVVFLLDSSTEAPNRILDLGVRIFNDGRDAKTKTPLAVERREARGVRRNRDRKKNRIQRLIKELTEFGLLPEFKVERDSIFKLCPYECRAKAAVEKVSKNMLARAIVHIANNRGFKSNRLSGEHEDSNFFQKIDALINELEGNTLGQFLYARKLVNDEQLSLGLNKNLKPLKFKPIENQFYPNRQMLEDEFSLLKKINREHLTETQWQAIEETVFWQYPLKLAEKGRCRFFPEETRAYSALPISHEFRILQDINNLKYVSEGQQHQLDKRQRLHLIELFNKQKSISFKSLLRQKDIHQSPIFPADSKFNLDTPVRNGKLFGNETLIELGKSEYLGSLISIIPYTSLNRLVAHLIEPVKIVTDKRGNKIKVVEEVSETKKEIKSLVPELDVDAITNLACKSFSKKTTNLSVKFMELVLPYMRTGIQYHDAVTKVVDEAGIAFHHSQSNIKPTHEALPYYGKILTDSVTGQFNQVDQDKVESDRDNEAFLHGKIANPTVHIALNQLRRVVNQIIKSFGAKPAKINIELTRELKNSLQSRKRIEKNNKDNAKHNERIRQDISELTGISYISRSDIQKYKLWEELGVLGARQCVFSGKTISVSQLFNGAVEVEHIIPFSRSYDDGMNNKTLAFKSVNNIKQNKTPYEAFGNTEEYSQILQRALQAFGQSSKYERFKKGAFEYFYGENGQNNFIERQLNDTKYISKVARTYLSCLIPIQNIIPVNGQITAMLRHIWGLNHFKNKASGNYRDDHRHHIIDAFVVGLTSRSLIQNLNTVNATSNRNEDSLFVLLKNRSKVPDALRAEFLRMLDGVIASHRRDHGLQGSLFNDTAYGLDASKNTYITRKNITSLSVDELFRIRDATIRHDLFTYLVNRPEIENKREFLSVFGDVKTLERKLHQFVCETGHKKLRIDIQNASIKTIKSAPFKAYALNSYSFVDIWQIPTKKDKKTEKWLYKYEGNFVATVEARQRLKHNNEDRPHPAAKFVMRLFKQDSIKLVDTQTGEETFCRVAGFSASNNKLDIQPNLKSGSSQQKFMTINKIFGGNKVEKFRT

SEQ ID NO: 7298 - protein, 1066 aa, synthetic construct
  REGION 1..1066: note = Synthetic
MHIPYLLALDIGTSSIGYVVFTINKKGEPTAVEDLDVRIFSDGRNPETKEPLAVGRRKARGIRRTRDRGQNRVRRLVKELIECGLLPANDQERREILQQTCPYEARALSANQPVEPYTLGRAIFHLGRRRGFKSNRLASGGEESEYKSKIESLREHLGDHTLGEYLYRRIQENKALANKGTPIKQTPVRFRNGETEFYADRAMYKSEFRKIQETQGNTLLSDKQWALLEETVFFQYPLKPVPKGKCRFYSEETRAHIDLPISHEFRILQEVNNLRYVSQGVSHELTERQRNAIIQALHKSKSKTFLSLVKLKDEHKNPFFPSDAQFNLDVASRSSKLIGNETLINLRKADYLGKLADTLDTKKLNDIVEYLIEPFEQANGKRVIASDKKVISYLKKQLPSLSSEQINNLSNYRFKRGTASVSRKFIEQINPILREQGLVYSDAVAQLSDEIGIPLHHSDFAPDELMNELPYYGVAMPESVWGEKPESDANKAPHERDEDAYQYGKIANPTVHVALNQLRFVVNQIISKMGGTPEKIHIELTRDLKNSKQAREEYSRNQKKNKKNNDRIRDLLQTEFGIERPRREDIQKVKLWEELDDHTCIFTEQRIAAKQLFNGEVEIEHIVPFSRCYDDGMNNKTLAFKNANNIKGNRTPFEAFGTDQERYAVMMKRALKSFGQSSKYERFKEGAFEKFYGGDKGDMIARQLNDTKYISRKARQYLSCICEPKNIIPVNGQMTAVLRDVWQLNHYKDKTTGNYRNDHRHHIVDAFVVGMTSRALINRINRTTSKDQRHINNLYELLKDRVGDALAPSLKAQLQHKLGSVTASYKPDHTDHGSMYNGTAYGLIELDGKVYGVTRKPINALSHDEIFSIRDDRLKKKILSYLTDNKSAKDSKELQTIVPKKQLTRKLTGFTEETGIKSSRILVSNKSISVIRSAPYKGYTLNSYAYCDVWKIPHKKDKKTGVYTYKYKGVLVPYAEVNQYKSTPKRPVDKDGRSHPAAKKLMRLYKHDCIDLINKRSGEVTRKRIAGFKNDNRLDLQNSLGSLKSKQKPISVNKIYTENHISKKNT

SEQ ID NO: 7299 - protein, 1069 aa, synthetic construct
  REGION 1..1069: note = Synthetic
MAYRIGLDIGITSVGWATVILLDGQMISIGDLGVRIFDKAENPKDGASLALPRREKRSMRRRLRRHRYRMERIKQLIEKSGVLSIDEIHHMYEDNLQVPDVYKLRSEGLDRLLTSKEWARILIHIAKRRGFKSNRKSETSNKKSDEGKMLTSVLENNKLMNEKGYRSVGEMLCKDEKFSRTKRNKSEEYSHTLSRDLLVQEIEKLFEAQRQFGNAGASEAIQEEYIKIFCSQRSFDQGPGLPSPYAGNQIEKMLGECTFEKGEKRAVKASYTFERFMLLTKINNMRIRTTGTGIRKLTDDERRLLLEEAYNKTDLKYSAVRKLLSLGGNDSFSGISYGRKSEEDVEKSSLVKLTAWHDIRKALDKIHKGYIEKLSKEALDEIGWALTVYKNDIQIKEYLSSAGIENQAVEKLLDLSFRKAGHLSLKALKKIILYMESGLDYDKACTEAGYNIHGLENTKTRKLLPIDDEYITNPVVKRALSQAVKVINAIIDRYGSPDAINIELARDMSRNFRERNEITKQMEENMQRNDNARQRIVSEFGIMSPKGNDIVKLKLFEEQDGYCLYTGEKMDVRRIFDDGYADVDHIIPYSTCFNDSYNNKVLVKSAENRQKGNLLPLEYLHDKPEKMEKFLSLVSTLQLSYPKKQNLLRKSIGEQEAEEFKERNLNDTRYITRCLKEHIRNQLLFADPDRKKPVVCVNGQVTAYVRKRWGLTKVRDEGDKHHALDAVVVACIDDGIIQKVTKYHKYQETRFLNREVLSNAPHFPEPWPKFRKELEARLSDRPQELIKSLRLPFYHNDEEIKNIFVSRAPRRKNRGQGHKDTISSPRIVPEGFVIKKTSITNLKYEKGEIKDYYNADSDRLLYQALCRRLDEFDGDAEKAFAGGFYKPKANGEQGPLVKKVKVIEKSNMGVALNQGKGYAANGDMIRIDIFSKNDKYYFVPVYAADTTKKDLPNKASASGKPYEQWPEMDESAGFLFSLYPKDLIRIEHKSGVDLTFNNGNKKKVTEGFFYYRKAGIATASIAVDNHDNSASIPSMGIATLKKLEKWQVDYLGNLTKVKKEKRMGFSNKG

SEQ ID NO: 7300 - protein, 1085 aa, synthetic construct
  REGION 1..1085: note = Synthetic
MKYRLGLDIGITSIGWAVLEHDDDEEPFRIADLGVRIFKAAENAKDGSALALPRREARSSRRRLRRHRHRLERIKLLLEKIKLISIAELDIVYHDSQKLTDIYELRQAGLDRLLNPEEWARVLIHLAQRRGFKSNRKNVAKDKEAGKLLAAVKENNNLMTEKSYRTIGEMFFLDDKFSHQKRNKAEEYAHTISRDKVFDEIVRLFNAQRKYTNPFTDASFEKKYTEIVLGQRSFDEGPGFPSPYAGNLIEKMVGKCTFEKDLPRASKATYSFELFNLLQKINSLRIEDISGSNRNLNREERQRVVESAHEKSDLKFSDLRKLLNLSPNHRFNSLTYGSADMNEIEKKSKFNYLKAFHDIRKALDKVAKGHINQLTIEQKDSIGETFTLFKNEETVAGKLRQAGLSKYDIEALLHLSFRGFGHLSLKALKNIIPHLQEGLVYSDAATLAGYNFRAHDNENKHMYLPANGEELKDITNPVVRRAVSQSIKVINAVIRQYGSPQLICLELSREMGKNFIDRKKIEKQIKENTDLNDAIRNKVIEYGHSNPTGQDIVKMKLWQEQDGRCAYSGQAIPISTLFEPGVADVDHIIPYSISFDDSYANKVLVKSSENRQKGNLLPCEYLKYNPANLERFMIWVNTSVRNYRKQQRLLKQSITAEDRNKWKERQLNDTKYISRFMLNYIRDYLKFATVDNLGKRQVISVNGSITAYMRKRWGLKKDRLAGDLHHAMDAAVVACISESMIRKITRYSQYCEAKSIRNRFIDYETGEIINPLQKRFGVRFIEPWDKFKVELESRLSADPALRIQTYNLKNYLNPENVKPIFVSRMPQRKNRGPAHKDTIRSGRLAAKGLTVSKVEITKLKLDADGEIKGYYYPGSDLKLYNALKERLHDFGGVALVAFKETFYKPAAAGKPASPVKKVKIIDSCTLNVNVGYGIAANGNMLRIDVFKKTDGYYWVPIYVSDTVKSTLPNKAVLAAKPIKLWVEMHDDDFVFSLYPNDLIRFVHKSGVGATCWDKTKVTLKESFMYYIKASISTASISVESHDSSYTIPSLGVKTLALIEKWNVDVLGNRSLVKNETRQYFPGQTK

SEQ ID NO: 7301 - protein, 1071 aa, synthetic construct
  REGION 1..1071: note = Synthetic
MNKRVLGLDPGITSIGWVLIEENEKGEAVKLIDGGSRIFKPIYEPQFLKLKNKSRTEKRQTRRQRDRRKRRMSKVENFLFKHGLLSKKNDQYHEENKSIQAELGNPYKLRRDALYQLLENDQLSYIILHLFRRRGFYSALKAKSASEKKKDAEAQAIMEKVRESNCATLGEYFWKELRSNPKARVRGGESEFSILGSEKMLRDNLYDELELILNKQIEFGNTSLLIRDDKTNNEIREELLRLFRFQRPLKPQKRKSFCLLETKKAKFKDKKSNKENNKENNKNIIKNIGLKTAHKLTVYSQEFIIRQSINNLIVEEMNHDTGEVFLVDIDLETKEKLFQKAWVQKELSFSAIRKELKVSPESKINLEFGNKKGIAGNQLYTIFKDKELKKWFNSLTYDEKSDLMTDIHMIKGAEYLGLRKVLIKKWKLSDEMIDVLVIELDKALKPEYTSVSKKAIDKLLPELRKGKKYSEAVDSIYQKTNSINQKGEVSPLLEPFNPITNPIVNKSVAEVRKLVNGIIKKHGKITEIRIELARDLGLSAKGLSDLRALQSKQERKNTEAKNYLAERNLKINKENIEKYKLWKELGEKTIFPEKINGHWKYSNISFDDVFGSTAKYEIEHILPKSETGDDSYMNKTLCLSGVNGAKGQRTPYEYYQKVMTKEELETWIKHVYSIFNDKHDSKNKRSKILLTRKEMLSKISNNTSLNDTRYIARVLKDYLEPIVVDKVETTKGGYSAMLRKELDLNKLLGDSNKKSRIDYRHHMIDGLVIALSTKSTIDALNKIRKLPSYEVYGNKKSKRYNDLHSKINSRFKIRQDFEYHFEKTLTSHEVENKPSGGFDEETIYSLMRKKMVKSECGEFEYPILSKVDLSKFEDIKELDSKEYDDCVFVTSKKASSELVGKKISEIINGKYALPKELFEVLIKMPKDKKLEQIPILKSGNVLKKVKEIYSKFKSTNCHFIKNKENEVIGFKKLGSNFCVVGYNTDTPRVISLFEYLNNKGISKENVLFKGTIMKDNVGNYWKVYKFSGKEICLHPINKVKIEDRDVVKHKIPKNNIRKTLKSLKDNNFKSV

SEQ ID NO: 7302 - protein, 1141 aa, synthetic construct
  REGION 1..1141: note = Synthetic
VRTTLDPIPTLPVEGSYVVGIDAGQNSVGLFALALTAEGVPHEILAMQSVIHDGGLDPDKAKSNQTRKASAGFARRARRRLRVEKKRLNKLDKLLDAQGWHGRQEAEFPTQIWEDRYRATSSYIEDDEERAQVLGEVFRHIARHRGWRNPYQPLADLFDDESQSDAFTRLVSNAQRVGARVDDSDTVGAIVWSALQCPHPVGLDPEDEARWANSNQLRIRTLGTESKKRPGLIDGRLFQVDNVHEIQRICATQNIPAELEEQLLGTIFDQNKASAGVMQTVGRCGLQPQLLRCSKAHPEFQRYRIAATLATLKIKEGHSARFLTAEERQKVAAELHNPHTTIATWGDVADLLGIEAPQLTGIASTTPDAELIVAARPPVDTTAIKMATKAKPFLKKWWNDAAPEQQQDFIELQVNYDTDSPDVNNYLLTLTPTELAEIETFSTKELPKGRASFAAETCRILADHLLNSDDSLADAIEMNFHRKPTVAQLTESTGIASVDRSLKIVSRFLQMARNYWGEPQAITVELAREGLMSAKAKADMEFQQRRARKARQTLQEKRGIREDNRRDTLRAEALHRQNNRCLYCGAPIDMHSVEMDHIVPRSGPGATNRVTNLAGSCHRCNQAKGGRTYAEWVKQDHPTYTNRKMVDDFVNHSMNLENQALPKKSMQKEYLRALHTVGKEDALDSRSLAPTATMGTILRGRLEAEFPETKVNVLAGFITAEARHAAGYWGLPTLHIEGDPHDNNKRIDRRHHAIDAAIMSITRPYTAQVLAQRKALRDQEKTLGSSYRSATVSNFYGSWKDFQGTDIAHKTAYQRWLSNSQVLIGLVAEKLLNDDIPVWTPLRLSRTSGRAHEDEIRPLAHRPVKAALTAKEIDASATEAQWCALTRCEDYDENTGLPENPERRIVINGTHLGPNDDLEFFTPKDNKKPDAICDQAALKVRDGWAAAGDFHHLRLYRIPQKKGFAYYFMRVLPFDLPTEGDLFSYELPPQSISIRQAHPKLKAALKKGEAVYLTWLVKNDVLEVDDKALGGIGKTLEEVIPNATRRWRVIGFDNSTTTIKLAPVLTSPEGVMSKQGGSSVDSRFDEATSRKLKQTVLAPNGWRPSAQVLMRGPLRVIRYDALGRERLSARSPLPFTLIIEP

SEQ ID NO: 7303 - protein, 1066 aa, synthetic construct
  REGION 1..1066: note = Synthetic
MSRVCFEMEMDMREDLILGLDLGTNSLGWALLKCDTESKTEIKGIVDAGVRIFEAGMKGDIASGKAESRCASRREARSIRRGLDRRRRRMGKLKNLLQRNDLLPEGEDIASIIESLDKDVREFIRTIPDSEKPEKHILAHTAPYFLRTLAIQQELPKHMLGRAIYHLAQRRGFLSNRKSQVEEKELGQVKEGIADLTAEMAQAGARTLGEYFAYTDPTEKRIRQRWTSRKMYETEFNLIMKRNGHQIPEDQIELIRKAIFFQRKLKSQKSLIGKCTLEKNKRRCSKYRREAQEFRYLQTVNNLRLITHDGELRVLTDEERDELINMLSGESGMLNKHGNLTVPKAKIALGLNRKSKFTIEEGGEKSFKGDRTTSAIVEIIGSKWLDMNHETQEKLIHDLNSFEKTENLQRRLAAAYGISEENAARLSQVNLESDYASLSLTAIQKLLPHMRKGLSYSEAVAEEYPEQFKTTGIEEELLPQLIHFSEDLRNPVVQRCLTELRKVVNAVIREYGKPGLIRLELAREIKNTKKAKERIIKNNREREKERKQALKEIHEVFPGFKESRDDITKILLAKECGWVCPYTGEGINFDTLFENPKFDIEHIIPRSRSMDNSFVNKTLCFHDENRNVKRNRTPYETYHGTAKYDQILNRVSAFKGNLAKKKLELFMMTPEEVTDRYEDFSNRQLNDTRYASKEAAAYLGLLYGGVNQSADGTKRVQVLSGGLTALVRSFHGFNGILNDGGSKDRKDHRHHAVDAIAIGITSPGMVKRLSDNIRIQEQYGSAESIHTSRFNSMECWPGMLEECRAKIKDIIASHHVSRKIRGALHKKTFYSIDHEHEENGNIKKYKHVPVELASMETSAIPKIVDDGIRRIVENKLEELGETEPKKAFREERNLPELISKDGQTRIPVRKVKIRRSQDTVTVGKGPRKRNVVSGSNHHMLIYAELDKNGKEKKWAGEVVSLLEASRRLKNNEPVIQRDVGPGRKFIMSIQCGDIFELATSAGRLFVIVRAVPKTKQLCFAEINDARKKEVIKKNHMWYTKYPNTLRTSNPVKYTIDPLGRLRRAND

SEQ ID NO: 7304 - protein, 1052 aa, synthetic construct
  REGION 1..1052: note = Synthetic
LIWHVNRIAWLLRVFFGVSIMRILGIDGGISSIGWAVVDLESHRIVAAGTRMFDSPEEATKSGPKLKNADRRLFRGQRRTIRRRAKRMADIRKLFHASGLLPSGDRGALAAEAGDKDPWSLRAEGLDRKLTSREWALALGHIARHRGFRSNRKGAESNKASENQKVLASIEATREKSQRWRTVGEMFARDDTFIDRKRNRDGDYTRSILRADQEAEVRKLFAAQRRHGNPHTSDELEATFSELAFSQKPLQGSLGMVSDCPFLPDHKRASVFAPSFERFRLLSRLTNLRLVTADGRRALTPDEITKALSGYARTKSLTFKALRTKLGLVETDRFDGVGPDIEKRDIARRTGAALEGTKTLLDVLIPAIGEIEAFGLLERGTPLDEATAAIAFNEDLGDIETGLQASGLPAEAVSALLEAARQGAFDTFKGTAALSAAAARALCEPMGRGLVYSDACAELGWSHSEQSVMDLSAIGSPVAQKAAREILKQIKAVSQAFGPFDRVHVEMARDVGKSSEERRKIENGINKRTDERHRAAEELADHLGKTASTLRSEDILRYELWKEQNGRCLYSGKAIPLQAVLATDNAVQIDHILPWSRFGDDSFVNKTLCFTKANADKKNRTPYEWKSAEQSDDWERFQAEVESNKALKGLKKRNYLIRNASDREEAFRSRNLNDTRFALKVVLAHLKDAFPNLARETGGERRVFARPGALTAALRRAWGLESLKKGAHGERLEDDRHHALDAIVTALCSESLLQRATALAKAAEIKGEKFELRGLPAPWGTPAEFRNEVAAVVQAVFVSRPESGRIRGKGHDATIRQIREIDGEAKVFERKAIEELKIGDLDRIPVPKPYGKIVDPGKLRDQLLDSLKSWIEAGKPKDALPLSPKGDPVRKIRLMTSNKPGISVRGGTAGREAIVRLDVFCQMTTSGIIQYRFIPIYRFDFKIRKCVPDRYFKRSENFASWPKLSEDMQFKFSVYRNTLMKIIDSEGKAHIGYYKSFDTRDGRISLMPPSGGDNYRIPTTTALKLEKYFVDRIGSQFLVSKEKRTWRGKACI

SEQ ID NO: 7305 - protein, 1059 aa, synthetic construct
  REGION 1..1059: note = Synthetic
LIWHVNRIAWLLRVFFGVSIMRILGIDGGISSIGWAVVDLESQRIVAAGTRMFDSPEEATKSGPKLKNADRRLFRGQRRTIRRRAKRMADIRKLFHASGLLPSGDRGALAAEAGDKDPWSLRAEGLDRKLTSREWALALGHIARHRGFRSNRKGTESNKASENQKVLASIEATREKSQRWRTVGEMFARDDTFIDRKRNRDGDYTRSILRADQEAEVRKLFAAQRRHGNPHTSDELEATFSELAFSQKPLQGSLGMVGDCPFLPGHKRASVFAPSFERFRLLSRLTNLRLVTADGRRALTPDEITKALSGYARTKSLTFKALRTKLGLVEADRFDGVGPDIEKRDIARRTGAALEGTKTLLDVLIPAIGEIEAFGLLERGTPLDEATAAIAFNEDLGDIETGLQASGLPAEAVSALLEAARQGAFDTFKGTAALSAAAARALCEPMGRGLVYSDACAELGWSHSEQSVMDLSAIGSPVAQKAAREILKQIKAVSQAFGPFDRVHVEMARDVGKSSEERRKIENGINKRTDERHRAAEELADHLGKTASTLRSEDILRYELWKEQNGRCLYSGKAIPLQAVLATDNAVQIDHILPWSRFGDDSFVNKTLCFTKANADKKNRTPYEWKSAEQSDDWERFQAEVESNKALKGLKKRNYLIRNASDREEAFRSRNLNDTRFALKVVLAHLKDAFPNLARETGGERRIFARPGALTAALRRAWGLESLKKGAHGERLEDDRHHALDAIVTALCSESLLQRATALAKAAEIKGEKFELRGLPAPWGTPAEFRNEVAAVVQAVFVSRPESGRIRGKGHDATIRQIREIDGEAKVFERKAIEELKIGDLDRIPVPKPYGKIVDPGKLRDQLLDSLKSWIEAGKPKDALPLSPKGDPVRKVKLLSRAKKAVAVRGGSADRSEMIRVDVFAKANTQGKTQYFLVPIYRNDFFRSKGGGMDGPPNSAVQANTPESSWPIMDQSYEFCFSILQNSLLTVVRPTGEVVEGYFKGLDRSTGAISLAHHTAPQQIERGIGARTLLRIEKYHVDRLGQKHAVGKEIRTWRGRACI

SEQ ID NO: 7306 - protein, 1103 aa, synthetic construct
  REGION 1..1103: note = Synthetic
MAYRLGLDVGTASCGLVAWHLDETGHPVSLPYYSLDIWQEPLLPAKSGGVGEPKKAARRAARMMRRGICRRARRLRRIAYLAERLGLDRHQIASDSGQQIHALRARAAEERIELSQLIPVLLHLAKNRGPSGDWVYSEPERKSTKEKKRDADDETRPTEGPDEKAIEMGKIVGGVRHLEALMAEAALELGKDSITLGQYLNLRRQKKISTTLGPAGLYPSRRMVEQEFARIWDTQSAFYAVMRDADTCEQFRAAIFDQRPLKSPAPMVGRCPLEPTLPRSPAAQMAAQAFRIEKQIADLRWGMGRRAEQLNSQQRETVRTLLHNPEMLTAKGELSFKKLLDELRARGFPGPGTRGLNMDRASRDSLKGNTTLVAFHRLGLLSAWQALDDKTQVQIINFLADLGSPEALDGRNWHLNFKTTSGEKRKFSEALVTFINCMRDKSNFDRLSKMGFESGRMSYSIKALGKLNALMQEGWDERTAIDQAYPEYHKPRAASLELPLPPETGNTVVDVAMRQVYRAVRKAMEALGGPPTEVIVELSRDMALGVGKRNEIESKIDKNRKARLQAKNALETQGQESTERNIQRYLLWESQGHYCPYCADRISIGDALSAATEREHILPRSLTRVGGKRNQLVLAHRACNQQKENRTPWQAFGADENRWQRVKLCAEMLTKSKQWGKAKLLLKEDWEEEVLDDEAIQGFSDRQFHESSWIAKLTAQWLGRVCPPTERNGQPVMVSRGELTAHLRRIWKLNTVIPEVRFETGLPVLDEEGKAITRVEFDRHRLWWDGQERHAGAIPADRRPDKRIDHRHHIVDALVISLTSRSLFVRMAQNYKLEREREKRGERARMSLHEAPPIPLIRDLALEIVRNVEIRHKRDHHPDGALFDQTAYGRSRKPDEGGSHLLTSSKRLASLIDPANAGKTRGRLETIESEKTREIVLSAFEQRLRAGKSLKQIFDEPVVHPQYGTHISRVRLLRESEHTAAVVRHKNRHGQMLEKRYTHSGNAYLEIMIEDGKLVGAPRLVNIQEAMLEKSSRPPHGVRRFWKGDTIQDARDGKSFVIRQIKSEGGGALIGALNSEAREVRDLTAASGYRMFKGKSLAKLTVI

SEQ ID NO: 7307 - protein, 1101 aa, synthetic construct
  REGION 1..1101: note = Synthetic
MDYRLAVDAGTASCGLVAWELDANGVPVRLAHYSLDIWSEPLLPAKSGGVGEPKKAARRVARMMRRGICRRARRLRKISHMAKLLGLDKSAAPSDFGQGIHSLRAKAAEECIELAQLMPVLLHLAKNRGPSGDWVEAEPDMSGKESRRRTKEPRSDSTAAKDKAPADEKKDIVGGVRKLKDLMHEAAAALNKDSLTLGQYLAWRRNKGEPVVLGRADVGLYPSRRMIEEEFDRIWDTQSQHHPVMLDSDIRQRFFNAVFFQRPLKSPAPMVGHCPLEPTLPRAPAAQMAAQVFRIEKQIADLRWGIGRRSIPMTEDEKAILRKLLNDAEQLTEKGELSFKKILKALEASGCPPPQGRGLNMERSSRETLKGNTTLASFRRLGMEDDWNALDESTQLQVINFLADLGSPDALDSSEWHLNFKTSKGKQRNFNNEFVDFINNLRAHPKFGRLSAMGFDGGRVGYSIKALRKLAALMQEGWDERAAVDDAYPGHHKAKAVSRELPLPAETGNTVVDVALRQIYRAVDRAMEALAGPPVEVIVELSRDMALGIGKRGEIENRIKRNQNARSDAAKALADQGQRVTDRKIDRYLLWESQLYYCPYCDHRITLGEALGAETDREHILPRTLTRVGGKRSQLILAHRTCNQQKGNRTPWQAFGQDEDRWRIIEDRARQLQANKQWGKARLLLLQDWEDEVLDDEAVSGFSDRQFHESSWIAKLIAQWLRAVCTNVAVSRGELTAHLRRIWKLDTVIPEVRLESGLPVLDREGERISTEEFHKHRSWWEGHDERAGGIPTDRKPDKRIDHRHHLVDALVISLTSRQLYAEMARHYKTERERERRGERARLSLRIAPPVEAIRDLSLDAVRKVGIRHKPDRHPDGPLFEQTAYGISRKPDERSGEHLLTISKPLTMLIDKGGNKEKTRKALEGIESVATRDAVLQAFDRRVEAGIPVKQVFNDVVLHPQFGTPIRRVRLLGNSIATAALIVHRNREGKVLHKRYAHDGNAFLEVLVVENKLVKKPRLVNVQEAMREKGSRPPHGVRRFWKGDTVEDARDGKHFVIRQIKAEDGGALIGTLVTEAREVRDLAAASGLRKFKGRGIASLRVL

SEQ ID NO: 7308 - protein, 1098 aa, synthetic construct
  REGION 1..1098: note = Synthetic
MNSWRLGLDIGSNSIGWAVIELSQPDDNSAFTPAGLVDMGVRIFPDGREPAATDKKTGMPRIGESLAVTRRMARGMRRNRDRRLQRIRAFADKLVEFGLVEQHGVAGRHEYKVGIIDLGIDPYEARSNAATTQVSKEQLARALFHLCKRRGFLSNRKADGEDKESSERKSAMNGLAEILQKRELTLGQYLKKRIDAGLHVRFRGEEFDDSENSAIYPKRSMYADEFAAIRKVQGNRFFPDEQWDELFDIFAFQRPLLPKEPGACSFEHGRDGREKHPRASRHLPITNSFRILQEVNNLRYQSTDGEMELDADQRQVLCEALEHQKEMKFSKIRTLLKLKKTSKFNLESDRRKGLKGNATACDMRSLFVAHDMVWDDLDTDIQNDVVQTILDADDLTDFIVANRKNEWLLPPELVRELSQKYYPSSHGHISRRCMEKLLPLMESGMQYWEAAREIYGDHTDYSQFATGEVLEELPYYGEVLRGTTTPVRVTPTTPEDEKTYGKIANPTVHVALNQLRKLINALVKRYGSPYEIHLELARELKTAGKSYQELLKGLADNTKKNEMRRKMFEECFPGQTPSGLDMVKMRLWEELAEDDGDGGSPAMARMDVYTGRTIGFRQLFSDEIEVEHILPYGRTYDNSIANRTVTFREVNRRKGGDKLPYDFANVDTEIDAEDMLARAQRLPRAKRWRFQPDAAEIYERILTKNMTASERKQYDADSSGAFIDRQLVDTQYISRIAARYLVPVVGAPSRVIPVNGHVTNLIRNKWHINAVKAKGKENERQDHRHHAEDALIVALADRGLIKRIADETRIQQKGRKDYRAKLRFPERPAWVTDERIKEVADRINVSFRQDHSREAKLYQETAYGLLPEGDRWWKKGYNAVMRRSITSLKESEINQIRDDAVRKAVVDFLYRPEVQSIKKWEDRLALLARTKLQIGSAVKKVQIRRVRIVIKNQSVRQIPSAPYKGYVPDSIAFCDIWHAPKYNKKGKANGKWGYVGAFVNYADAIRFEGEEDSLHEKYKPHPAAKKIMRLFKNDMVMLSDSLGVESPFRVAGYATTANKIDIQLHTESAGKQNFKAIPVLMEKMFMRKVHVDVDGRFS

SEQ ID NO: 7309 - protein, 1288 aa, synthetic construct
  REGION 1..1288: note = Synthetic
MISLGLDIGSNSVGSAWADTDKREVHLAVSVFPAGVDEQESKRGAPKNQARREKRSQRRSLARRSARKRRVRQVLTQAGLLPQDVEELQRLFDTNPWELRRAGLTRTLTPHEFGRVLVHLNQRRGALGIETNPEDPEEGKVKEGIDRLNAEMLARKAETVGQLFADLMDERRAAGKCASNTAVSRRVQQIRRKREGRGEATEFQFHGPVRNRQYRMDERQQLYADRRRVREEFLLLWERQKSFGGPLAELLTDDLKRQLDDPTGNDVWRHQGALFGQRRTFWDTGALGRCVLEPTERCVPLADRHASYFRVVETVNNIRIIQGGHSPRPLTVEERERVMRVLRGPLFRKSKGKLIPKSTASVTDIKQALGINPRDKLVRLNIEADEEREINTDWFHREIVHGAFTEERWNQLDERQKESVNRAVLRFDPDDEQDQKTLREKAGRWWGLEAEAVERFIEAWKTRPKLEKRLNLSRKAILNLLPYMERFDEEHQRWPTQQEARKAYARTLREKYEQTGVDADRIAADRYDTGALGLTARDRYFMKLDKHRIAEGVPELPPAPMLSNPVVRKAIHEVRRHLMAYLRKFHKTPDQIVIELARITKQSERQRNTALARNRNREKIRKAIIAGTENEPGVLVCAFGAEGARRLSLNQQRAAVDRVILAIQQRETCPYCGRNGLTPVVAAKGDDLEVDHIVPYSRCGDDSLNNKVLVHRTCNRGKANLTPREWWGTEFETRIQVAEKLFNGVKPAKGDYFEARDYKRKWENFTREVREADEWKNSQLTDTAYAARQVAAYLADALFNGRGLPERGDGGNEQKIFFTMGRFTAMLRRDWQLFETLKPPQREGRHGELTADEEARIAEKDRGDHRQHAIDAAVIALTDPKIKHHLANWAAYAAEYKEKRGEWPRREPIEPPWGDVPSFRREILSQVYARFDSSEFESGRQDEAGASDLLVVSHRPVKRRLVGAFHEETAYGPVISPLPPHRREKPETLFTNRIQVAGLTPNHLRVPEGWDELSARLEDPALTEGEKKAVRRQLAALTDPPPGKSGIVRDRALRDWIRKCLRANGLNPDGFSKAQMRDFAASGKLVMRSGVPIKSVILLRTNTDPVIISRKRWDPAANRMIVDEDPRSARVYIGGNNHHIEIRERQVTRQGATVTEWTGRVVTTFEAARRVRLEGRPAVDRSDNEDGRFVMSLAEGEMVFMRHPKTGTPGYFVVFKLDKPNTIHFIHHWDARPSMPRKDENGNEIPGSAREDIAVVASKLRFLGVEDGQPPYKVRVAPLRRPKPVMGD

SEQ ID NO: 7310 - protein, 1234 aa, synthetic construct
  REGION 1..1234: note = Synthetic
MIVLGLDIGSNSVGSAWVDTENKVVRLAASVFPAGVDEQEDKRGAPKNQARRMTRSQRRNIHRRAMRKRRIVNFLMDQGLLPRETAALSGLYDSDPWAVRRKALKEPLTVHEFGRVVVHLSQRRGAVGVTTDPDDPDEGKVKEGMDRLNKLMQERDAETIGQLMADLIDERRRSHVGVSWNEPVRNRQYRIAEADQLFAGRELIRKEFHTIVERQRSFKGSELAAMLTDTLFRELDDPRQTDAWRHRGLLFGQRRTYWDTGTLGRCDLEPTERCAPIADRHASYYRVVETVNNIIIRTLGQSDRPLSEQQREDVKKLLRGPLGERKSKGKLIPKTSVSASDIRQALGLGKRKGKSDPVQLSIEADEDRDINTDWFHREIVHGGIGEVVWNSWDESRREGVNRAILKFDPDEPDDASRLRKGAMEWWELDAAAADRLVEAWKNRPRLEKRLNLSRRAIRNLLPFMEAFDNATNRWPTQQEARKAFAKTLTDKHARRRYETAAPGLTARDRYYMRQKKHQITEGTPALPPAPTLSNPVVRKAIHEVRRHVIAYLRQYGRKPDRVVIEMARVTKQSERQRNDALARNRARDKIRKNIIDEVLPTAFGTAVSRLSLNQQRSAVERVILARQQTQICPYCGKAGLTEKIAAKGDDLEIDHIVPYSRCGDNSLNNKVLVHRECNRGKANHTPREWWRAEFDERIQFAEKLFKDAEPEKGDYFRKRDFDRKWQNFTREIREGEEWKNSQLSDTAYAARQVAAYLADALYDGRGLPERGDGADRQRIFFTMGRFTSMLRRDWQLFETLKPDSGGMSADEELLLAEKNRGDHRQHALDAVAIALTEPDIKNRLSSWAASAAEYHEKFGKWPRRDAIIPPWADIPTFRRQILALVYDRFDGISSESAVEHKRLTVAHRPVKRRLVGAFHEATLYGPVVEPLPPHRTENAETLYTNRISADRLKPNHLRVPEGWDQQSVLLDNKSLPLNENRRIRRQLASMPDPPPGKSGIVRDRALRDRLRKCLRADGLDPDDFTANQLKPLIKEGRLTMASGVPIKGVVLLRTNTDPIIMPRKRWDAATNRMVIDEDPRTKRVYIGGNNHHIEIREDDRGRWTGAIVTTYDAARRVRIHKRDAVDRSDNADGRFVMSLAEGEMVHMKHPQKGYMDYFVVFKLDKPRTVQFIHHWDARPSGERKDLDGKPIPGSAREEIPIVVGKLKDLGPEPGKPPLKVRVGPLGDVTVLEKD

SEQ ID NO: 7311 - protein, 1657 aa, synthetic construct
  REGION 1..1657: note = Synthetic
LDCTGRPARSTSRADRTWSTTSSPTSHSPGRASSANRRRLPWCPCRPSPRASIATAGRPVSGPPSAGRRTSRARTPSQAPWRRLRPSRPCAGAKPPSRRCRSRGTESRASPRGSSTSPWPVLPGHWHRPRSPQKSARRAWNLSWASPYRLLRSSPTHPTRCRPPTPAAKQKRRRSFLRAAAVAAGRCLRIYSPQGGVALLRITAGRDRLHLKSRYRPANLMSSTRQLRFLGGPRMPAYLGLDIGSNSVGSAWVDTDGQDVHLAASVFPAGVDEQEDKRGAPKNQARRQTRSQRRTISRRACRKRKLARFLIERHLLPADPAELQKLFDLNPWHLRRKALSEPLSRFEFGRVVMHLAQRRGAVGVITDPDDPDEGKVKEGMDRLAKELEQAGPQTTVGQFIADRMDQSRQPIQRTPDKECSRGTRRRRKRQAKRWAERGEKPPEPHYLAPIRNRQYRMPEDQYLFAGRESIREDFHRIVEVQRSFQHSELSAILTDELVRQLDDPTQTDTWRHQGLLFGQRRTYWDTGTLGRCVLEPTDRCVPIADRHASYFRVIETVNNIRIQKRGHDERPLTAAEREQVIRLLRGPLFKKRKGNLEPKSSASVTDVKEALGIKARDKGVRLNIEADEERKPNTDWFHCEIVHGAIGLDIWSRWEEAERREADLPKPQRSPEAQRPEAVNRAILKFDPDEPADEKRLHELATLRCGLDSAAAERLIAAWKQRPKLEERLNLSRRAILNLLPDMEQFDDQNKRWPTQQAARKAYAKVLQERFEQTGNQADRIAAQRYDTAAPGLTARARYYMCLEKHQIKQNGEVVRDGEGRPLALPPPAPKLSNPVVRKAIHEVRRHILAYLRKFRRTPDRVVIEMARTTKQSRVVRDEQLALIRGREAEKKKIIAEHSLSGKSLNQQREAVARVLLSKQQREICPYCGKAGLTPRLAAEGEGLQLDHIIPKSRGGEDGLSNRLLVHAHCNQGKLKKTPKEWLGDRFESDLVPRLEDFKKAFRTVQAAKSRPKKPNAQKRKRKPPLGPDGYFTLREYARKWQNFTRTVRPEDEFRNSQLTDTAYAARQVAAYLADALFDGRGLPERGDGQAKQRIFFTVGKFTLMLRKDWQLFETLKPPRRDGRHGELTAEDESKLAEKNRGDHREHAIDAVAIALTATDIKQRLASEAAEAAEFYDEHRHWPQSKDKEHCRKCLDYRAKNGRWPGKGHIPIDPEWGTVPRFRAQVLRMVYPRFDSSEHASGRRDQPGGPDLIIVSHRPVKRRLVGHLHKQTLYGPVFDQNGNRIENRTSIRQPIYESPQSHLTPKHVRLPCPETREQAVKRITDELRKDGMKARDAKQRALEIVAGPTFKLRAVDPPPGKSGIVRDLALRMVLRKSLEDRGLKPDDFAPKELKAVLDRDGPLCQPSGVPIKSVVLLWANNDPVVFYRRNRKAPDGQTEEDEDPRRREREVRIYDSQNNHHVEIRENARGEWTGKVIPAHQAASRLRARLRALGALEKPFRHLRRKLPKRLGLGLSEEARRELRSNKSRANLAEWKRKMRDLKPERARVIAEHPIVDRSGNDQGRFLLSLAEGEMIYARRKDRPDEPAEYYVVCKLDKSGNSSRIHFAPHWDARKASEQDRWDVTPGDLKDCGPEPGKPPQKVRVGPLGNVVVLQND

SEQ ID NO: 7312 - protein, 1282 aa, synthetic construct
  REGION 1..1282: note = Synthetic
MAVYLGIDIGSNSVGSAWVDTDTQRVHAAASVFPAGVDEQEDKRGAPKNQARRQTRSQRRTIRRRARRKRVLVRFLVHRRLLPADPAELNRVLNLNPWHLRRKALAEPLSPFEFGRIVLHLAQRRGAVGVTTDPVDPEEGRVKEGMDRLAKAMAETQAQTVGQFIADRMDESSQPIQRVPDHQCARRTLQRRRRQAQRWAQHGQKPPAPRCQAPIRNRQYRLPESELLFAGRDLIRREFHRIVEVQQSFRESQLSDLLTDELVRQLDDPTPTRTWRHRGLLFGQRRTYWDTGTLGRCVLEPTDRCVPIADRHASYFRVVETVNNIRVQRRGEEERPLTPTERHEVLRLLRRPLFKKRKGALVAKSAPTVSDIKQALQINPRDKTVRLNIEADEEREINTDWFHREIVHGALTEARWDAMSEVDRESVNRAILKFDPDQPEDAERLRAGAVAWWRLDDAAADRLLAAWKQRPKLEKRLNLSRRAILNLLPYMEQFDELHQRWPTQQEARKAHAKALELQALTTGNAALRLAAQRYRTGAPGLTARDRYYMRLSKHQIKQDGDIVRDAEGRPLAVLPPAPTLSNPVVRKAIHEVRRHLLAYLRKFRCKPDRVVVELARVTKQSERQRNAMLARNRHREKIRKQIIDEVLPAPDAFGKQGAESLSLHQQRSAVDRVILARQQKQICPYCGQAGLTDFVAARGDDLETDHIVPYSRCGDDGLNNRVLVHRRCNQGKANQTPREWWGPAFDQRIRFAEQLFKDAPPDKFDYFTKRDYDRKWQNFTREVREEDEWKNSQLTDTAYAARQVAAYLADALFDGRGLPERGDGQDQQRIFFTVGKITLMLRKDWQLFETLKPEQTGLPEPLAAKEELQLAEKNRGDHRQHALDAVAIALTDPAIKHALATWAARAAEYRDRCGKWPKRAPFPPPWGSVASFRRQILAQVYQNLVVAHRPVKRRLVGALHEETHYGPVIPPLPRHRAEHPDSLFTNRIPAVRLTPNHLRMPDQWDEWSRRLEDPNLPSHERRAILKRLAAMEDPSPGKSGIVRDRALRDRLRKCLQTNGVDPDDFNPPQIKKLVADGKLAMPSGVPIKSVVLLRTIADPVIVPRKKLDPITGTLVPDMDPADPTKPNPRTRRVYIGGNNHHLEIRQRQRQRQGQLVEEWVGHVVSAFEAARRVRLEKRDAVDRADNEHGLFVMSLAEGEMIFARRKDRPEEPPDYYVVCKLDKAGNSSRIHFAPHWDARKASEQDRWDVTPSDLKLCGPEPGKPPQKVRVNPLGEVVVLDKD

SEQ ID NO: 7313 - protein, 1054 aa, synthetic construct
  REGION 1..1054: note = Synthetic
LKKILGLDMGVASIGWSLIEYNQDDEGNIIDSGVRIFDQNLQRDNEAQKGESKNQQRTLHRGMRRQRDRKRRRKRGLYYSLKGVRMCPVKSENEEWNKWIDLNPYELRTKGLDEQLSLMEFGRVLYHLNQRRGFKSNRKVGKDSEDGAVATEISKIRAEMKKKGMRTLGEYLFSLQENHFDPPVSPNHDDYEFKRRIRNKYTHRNMYEEEFELLWEKQTQFYPQTLTEKFKAKLSDDTIFFQRPLKSQKHLIGKCSLEPDKKKIPKGHLLFQKFRIEKTLNNLELMGEYGQSLDMTDEHKKIIREKLERSDHVSFSQLKKDLGFNSNAKFNLETSDDSKLKGDTTSKKLSSKNAFGKEWYGLDEEFKNHVVDVLIHVEKPDVVEDLALNKWGRTKEQANHLKMLQLEKGYGNFSYKVIRKIMPLIKEGKRENSAIKEVYGEVKKTPKEDVFQLPLLDPKDYRNPVVFGAMVELRKVVNAVLRKHGLPDIIRVELARDLKNSKKLRDEITKKNNKLEKRNNEAIKALKQSPFNYQNPSRTDIIKYNLWIECNKTCPYTGRVINGEALDRGEFEIEHILPFSRTLDDSYANKTLCESDFNRRKGNRTPYECVEAGLLSKEELEQRIKNNLPWRKRRKFTQKTIDTDEFIARQLNDTRYMSREASKYLKQLGSEEWPVVIQVTKGQTTSLLRHLWGLNSILSIENDEIKNRDDHRHHAVDAIVIALTSRSILKKLSDENKLIETENWMDEEESSVDRNRQIKDRASKRITNTPPWDTFWQDSQESVNQIIVSHKVSRKISGAFHEETYYGSTEESSSKKDHIKYLVVRKRVEALSEKELGWNSKTQTFDKEGKVFIRDEHIKKIVRDKIWKKYKETGDIKKAIAALETDPPKLFHKNGKDFNLIHKVRLLMEKDLSKMNEFEDEPKTPTRYALYGNNHHIAIYEYTDKNGNKKQTGEVIPTMEAARRVLDKESIIMREHPEYDRFLFSLSTNEMVQDAEGNVYRVQKLTSTGEITFRSHNIALKGPFDPGVIRKMGTTVDFKKIRIDPIGQIFPAND

SEQ ID NO: 7314 - protein, 1039 aa, synthetic construct
  REGION 1..1039: note = Synthetic
MNTILGLDLGVASIGWSLVEKSEDDGKIIKSGVRIFQSNEQRAEAAPGESSNADRRKKRSVRRQRDRRSRRKAKLYHCLKRNGLAPSKTKWDDWVSINPYTIRASALDKKVSLHEFGRALYHLNQRRGYKSNRKAGNDKKGPVKEGISKVREQINKYDARTIGEYFYEIYDNHLKEEVNHDDFNWRIRDKYTHRKMFKEEFEKLWESQIKYHEVLTDELKNEIKEIIYHQRKMKSQAHLIGKCPLEPDKKRIAKAHLLFQEFRVLKNLNNLTLADENGVYIPFEDEQKNIVKELLDRKDKATWSQLKNSLLKNDAIANKNAIFNLERGGRKRIEGNSTNKALSHSKAFGDDWYEFEDEFKNHVVDVLTHVTKPEKVKELALNRWGRKKEQAEYLSKLTLEKGYANFSEKAIKKLLPYLKEGFEESTAVKKAGYDLFEQKPGKLNQLPMPSQEIKNPVVYHALIELRKVVNGIIREYGMPDVIRVELARDLKAGYEHRQKMNRKMRKLQKKNDKAREALNKAPFNVSHPGYNDIIWYNLWEECDKICPYTGKSIPAEAFNSGEFQIEHIIPFSKSLDNSYANKTLCEADFNRQKGNRTPWECVEAGLIDEDDLLQRIRNLPWNKRNKFTQKEINTSKFINRQLNDTRYISREASSYLKHLTCENIEVVKGQTTALLRHLWGLNSVLNKEDEEMKNRDDHRHHAIDASVVALTNRSTLKRLSDENKRISPAEWMDEDEGSQFTYQEMKRRVGDRIDLSDPWSSFRKDVENSINEITVSHRVDRKISGALHEETYYGPTDEDAPKNKEKMVVRKPVHELTNKEKMVVRKPVHELTKKELGLIRDDGIRKIVNEEIQQRMDEGKSRNAAVKSLEGDPPYIISTKAKVPIKKVRLLMEKDPEKMHHFENEEGEVYRHALYGNNHHIAIYETTDDKGQKKQVGIVVPMMEAARRVKDGEPIVMKDYRPDHSFLFSLAINNSVMNKEDGEIYRVQKIASGGQITFRSNAVALKGQSDPGVLRKNPSALSMNKIKISPVGEIFPAND

SEQ ID NO: 7315 - protein, 1024 aa, synthetic construct
  REGION 1..1024: note = Synthetic
MKKILGLDLGVASIGWGLVETDEKTTGQIIGTGVRIFQSNQQRAESAPGESSNADRRTKRSVRRQRDRRTRRKKKLYNHLKRNELAPEKKGWDQWVSINPYEIRAKALDKNVSLEEFGRALYHINQRRGYKSNRKAGSDKEGAVSEGISKVREHMDNYNARTIGEYCFKIYDNHLENDVEHDDFDWRIRDKYTHRSMFEEEFDLLWDNQAKFHNGELSEKLRDETKEIIFHQRELKVQSHLIGNCPLESDKKRIAKAHLLFQEFRIIKNLNNLTISDENGLSIPLTVEDKRAIKEVLDKKDKATFNSLKNVLKKRGTIDNNNALFNLERGDRKYLEGNRTNHALSREKAFGDDWFDLDEEFKNHVVDVLIHVDKPEVVKNLALDKWDRTNEQAEYLSDLTLEKGYAGYSEKAIKQLLPHLKEGLEESTAIDKAGYTLFKQKTGTKKQLPMPPEIKNPVVYHALIELRKVVNGIIRKYGMPDVIRVELARDLKAGYEHRQKMNKRMRDLEKKNDKARNALQKAPFNVQYPGYNDIIWYNLWEECDKRCPYTGKSIPAEAFNSGEFQIEHIIPFSRSLDNSYANKTLCEADFNRKKGNRTPWECVEAGLLNEGKLLQQIRKIPWRKRNKFTQKEVDEDKFLNRQLNDTRYISREASSFLKHLACESVEVVKGQTTSLLRHLWGLNTILTLEDDEMKNREDHRHHAIDAMVVALTSRGTLKRLSDENKVISMPSWQDEEESSKDRYDEMKNRLSGRIRLKDPWEDFRNHVEYAVNGIVVSHKVNRKISGALHEETYYGPTEEEAPKNKEMMVVRKPVHQLSKKDLKEIRDDRVRQIVNNEVIKRMEAGNSLDIAIKSLESEPPYIISSKAEIPIKKVRLLRKQDPSIMHHFDNENGEVYRSAVYGNNHHIAIYEINDNNGRKELIEEVITMMEAARRVLDGEPVVMRNHPEYNEFIFSLSQNEIVKNLDDDKLYRVQIIESDKRLTLREISVAPANASHGKIRKRPKNLNLRKVTVDPIGRVLDAND

SEQ ID NO: 7316 - protein, 1222 aa, synthetic construct
  REGION 1..1222: note = Synthetic
METNKKKRILGLDTGTNSIGWAVVDRLGDQCALVDSGVHIFTEGVKEEKGNEVSKAAERTSHRAMRRGFYRRKLRKIRLLRILSELGWCPYLSPELLSQWRLKKVYPATPEFMQWLGTDDDNAITPYRYRVICLHEKLDLTQEAQRYILGRALYHMAQRRGFRSNRKDQSNDDEKGKVKEAISDLSHKMKEEGCEYLAEYFEKLYNKGKRIRNQYTSRDNHYVEEFHAICRRQELDEDTIKRLEHVLFDQRPLKSQKHTVGHCLFEPSKSRCQMSHPDFEEMRMLQTINQIRMKTPDDDMLRPLWEDERELIVPLFLRKSKSNFDFEDIAKELAKPYIKRYGKKCYGYYKTDGDKDILFNYPMDMGIAGSPFTAGMVAALGSDWEAVIDAQYVKGDDKGLDDKVNDVWHTLSFFDNDDKLEAWLETNLGLDADTAKKVAGIKMVSAYASLSHKVIRKILPFMRGGMLYSYAVMLANIDAVLPAYVRDNDYMRQAAVDMAVGCLNEYDKKTCECTMYQWLKNFLAEKYHIGHKTLNRLYHPSDLETYPHVRPDDQGRMHLGSPRISAIRNPMAMRSLHRIRHVVNALLDKGLIDHDTEVHIELGRELNDANMRAAIRQQNKHNESERAKAKVVLKDYGVNNVSDDDIAKYILWEEQGKKCLYTGKQIGFECIFGPDPKYDIEHTIPRSRGGDSTMENLTLCDSRFNREVKKTKLPSELANADEVMQRVAFMKEKADDLQKQIRRCRTNASMDKSQKDRIIQKRHSLELQQVYWRNKYRRFEMTEVPEDFSRRQGATAGIVARYARLFLKSLFDDVSIVKGAATADFRKAWKLQSVDEKKSRDNHTHHQVDAVVIACIGRGDYQRLAASYHLNGYADRERPSVPEPWEGFVDDMRRIQAETLVSYDFTDNAPKQVRRRIRFTGSHHIKGHKPSHISESDTARLSLHMDTNYGAIEHDGEVKYVIRKPITELTSQSDIERIVDPIVREKVQAATRGLDKAPEIKTALANPIWMNEAKGIQIKKVRCFTPDVTRPLNVRKNRDISRHEYKRTGHFKNDGNYCIAIYEQVLPQGSTAKAKRSFRIINNLAAASHFKVGNRANRAELYPPVDENGYRLKAALHQGDSVLLYENSPEEVYNASAAELCRRLYVVSGISSMVITNNKYGVLQLRHSQKAGKYEKGKNGAYVVGENLRSTITMLHTQFKALIQNQDFTIDVLGKIKFLKHD

SEQ ID NO: 7317 - protein, 1217 aa, synthetic construct
  REGION 1..1217: note = Synthetic
MESNEKKRILGLDTGTNSIGWAVIDRLGDQCSLVDSGVHIFTEGVKEEQGKEVSKAAERTSYRAMRRGFYRRKLRKIRLLRILSELGWCPALSPELLSQWRLKKVYPATPEFMQWLGTDDDNAITPYRYRVICLHEKLDLTQETQRYILGRALYHIAQRRGFRSNRKDQSNDDEKGKVKEAISGLSQKIKDEGCEYLAEYFEKLYKEGKRIRNQYTSRDNHYVEEFHAICRRQELDEDTVNRLEHVLFDQRPLKSQKHTVGHCLFEPAKSRCQASHPDFEEMRMLQTLNQIRMKTPDDDMLRPLWDEEREAIIPLFQRKSKSNFDFEDIAKELAKPYIKRYGKKCYGYYKTDGNKDILFNYPMDMGISGSPFTAGMVAALGPDWKAVIDAQYAKGEGKKLDDKVNDVWHALSFFDNDDKLEVWLETNLGIEADTAKKVAGIKMVSAYASLSHKVIRKILPYMRGGMIYSYAVMLANIDAVLPAYVRVNDDMRKAAVDMAVECLNEYNKKTCECTMYQWLKNFLAEKYHIDHKTLNRLYHPSDLETYPHVRPDEQDRMRLGSPRISSIRNPMAMRSLHRIRHVVNALLGKGMIDRDTEVHIELGRELNDANMRAAIRRQNKLNESERAKAKAELEKYGINNASETDIDKYILWDEQHKKCLYTGKQIGIEDIFGPDSKYDIEHTIPRSRGGDSTMENLTLCDSRFNRDVKKTRLPSELANADEVMQRVAFMKEKADDLQKQIRRCRTNASMDKSQKDRIIQKRHSLELQQTYWRNKYHRFEMTEVPEDFSRRQGATAGIVARYARLFLKSLFDDVSIVKGAATADFRKAWKLQSTDEKKSRDNHTHHQVDAVVIACIGRGDYQRLAASYHLNGYADRERPSVPEPWEGFVDDMRRIQAETLISYDFTDNVPKQVRRRIRFTGSHHIKGPKPSHISESDTARLRLHMDTNYGAIEHDGEVKYVVRNSIGSLKQKDIKDIVDSVVRQKVQEAYDAKGDVAFSEPIWMNEAKGIQIKKVRCYAPNVTRPLNIRKHRDISRHEYKRTGHFINDGNYCIAIYEQVLPEGSTAKAKRSFRIVNNLAAASHFKLGNRTNRTELYPLVDENGYRLKAVLHQGDSVLLYEKSPEEIYNASAAELCRRLYVVAGISSMVFTKSRSYGVLQLRHSQNASKSEKGKNGAYIVGENLRPTITMLHTQLNALIQNQDFTIDVIGKIKFLKHD

SEQ ID NO: 7318 - protein, 1181 aa, synthetic construct
  REGION 1..1181: note = Synthetic
METKRILGLDTGTNSLGWALIDRTGDNCRLIARGVHIFPEGVKIEKGVESSKASERTGHRALRRAYYRRKLRKLRLLRILSDNGLCPTLSQPLLSAWRLRKIYPATDDFMSWQATDDIAGKNPYADRCDCLHRKLNLDTESDRYKLGRALYHIAQRRGFRSNRKSEGKDNEDGKVKSGIDELSKAIEREGCTYLAEYFLKLYQRGERIRTHYTSRDSHYLEEFKAICRKQELNPELTEKLEKAIFSQRPLKSQKTSVGKCPFEPSKTRCHVTHPDFEEFRMLQFINNIRIRTDFDSQPRPLSANERKAIIPLFMRKSKKTFDFGDIAKALIKKSGHAQFNYPSDLSVSGCPVTAALASIFGSDWQRGIAEVYVDAKDKSISQITDDIWHVLHFFENADKLRQFAIDKLQLNEKDATSFSKITMPEAYGSLSRKAISKMLPLLRKGLIYPHAALLANLGSVMPPYEWNIEPMREAAIDKIVHHLEAYDPKTTPGTLEKWLKDFLKETYLVTDEALKKLYHPSQIETYPKARPDNEGLVLLGSPRVSAIRNPMAMRSLHQIRHLVNALLRKGLVDETTEIHIEFARELNDSNTRQAIYRENRENEKERAKHAIAIAEHLGIDASDVSERDLLKYRLWTEQKGICLYTGNQIGIADLFGSNPKYDIEHTIPRSAGGDSTQENLTLCDARFNRETKKTRLPSELPNYAEIIERVKFMKEKADELTKRIRRLRTDPSMDKAKKDGTIQKRRSLELERRYWLGKYHRFEMESVPEGFSRRQGAGIGLISRYARLFLQSVFKRVDTVKGAATADFRQAWGIQEEHTPKSRVNHTHHLIDAIVIACIDVADYQKLATAYRRDGYHDREKVFLPLPWSTFKEDIQQIQLSTLVSSDTPDNMHKRGRRRIGDKIHTCDAARASLHRDTFYGAIKCNGTIEYTISKLLSKLKKEDIEKIIDPVVREKVRDAVTRLGFKEAMASTIWMNEEKRIPIKKVRCYAKHVKHPIFIRKLRDISSKDYRRHHHVEPGENSKYALAIYAGKDAKGKEKRTFTIINNLEAATHYAAKGRGMDNTAFIPQTSPQGLPLLCILKKGTKVLLYEDSPEELWQASPNELQRRLYIVTGFSSEGKTTLVHNQEARPADELQITYGRFAEDSEFRSKMSLRHSQLKALVEGQHFTLDILGNISFIK

SEQ ID NO: 7319 - protein, 1093 aa, synthetic construct
  REGION 1..1093: note = Synthetic
MPRVAKVAAMNRGSPKADDNCATVFGQACLTVNCAPMDNYLTCFVSFFAQGHFPTKQAPQAPCRPLFCRNSTGTARRAGASLRYGFVVFCIKLTLSLDLTLGEAMVNPQGGHSVLGLDIGIGSCGWCLIDTKYQRIIASGVRLWDTPQEPKTKVSTASTRRIARSSRRNTKRTADRKKHCLRLLKQNGLVPSKESAQWLQSRKKDKPVIKLRAAGLDRPLNNREWAQVLYSLCDRRGYIPHGEGGDSDNESKKVLSAIEHNKELLSQAGFRTVGEMMYHSGRSRNTGGDYSLCIDTNALIEEIELLFAAQNRLGNTKASEAFREAFREVFSWQKDVTANDLRIYNQVGHCTYFPEEKRAAKSCLSSELCEAYERVGHTTWIDSKGLEHKLPADIRQKIIRTLFSIEPIKGNKYCKVTYSKVRQWMSLDSDSPFKGIDADKEKTLELYKPKAWRLLRDTLSSEFMHQLAADRELADDFCSAITFASSKKSLTKEMENRGFSEDEIEHASALPYNAKLFSGYGNRSLKALNLLVDAFEEDAEDIVTLSDAEQASGLLQKRNSPEATYTQLPPYTLFDPTCKNPVVLRVMGQVRKVVNAVIREYGMPDEVHIELARELKQSKREKQLVSDRNRITKNRRDGIIAKLREETGDEPRMKLIRKVELFEEQGGRCIYCDGVIEYERLIKEGHYAEIDHALPFSRTCDDSQSNKVLSCKKCNQDKKNRTPYEWFCQDDLNWEEFELRVSRNKKLGQIKRQKLLNTNLEEKQENDFIERNLNDTRYASRAAKDFIERYLRFPDNGKKQHVFAVAGGATALLRQSWGIRKDREEDCLHHAADAAVIAACSPSTVIKIAKASEKKALTKKENRAALFADTQPWEGFAAEVMRQKEGIIPTHMIDHKVSGRAFEDTIYSYKGIREDGQKGQLATKKKGLKVSSNYVRRDDGSAIVVDGLAYINLWLDAEGRKGKGQYLLEPIYYADIPFVDSQGYMHRFLPAQSDKKPRESWDTVPERLLATKPLTIFPHDAILVKGKVRRFKTIGIAACSWSLYDPTGKLSDGEATKGLAFASLTKDDQLELIHEDVLGRCYIDLISNSGSKE

SEQ ID NO: 7320 - protein, 1024 aa, synthetic construct
  REGION 1..1024: note = Synthetic
VNQKWTILVISPHVKRYPKRALMPTLGDAMVTSIPPLTILGLDIGIGSCGWSLLDMTNKRIIASGVRLWETPQEPKTKASTAATRRAARSARRNTKRNADRKKHCLTLLKKHKLVPADAQAQWLQSVKKDKPVIKLRAEGLERGLTDRQWAQVLYSLCDRRGYIPHGDSTSSGDEGKVLKAVKQNAEKLQAAGMRTVGEMLSQEPRSRNRGGDYSLCVTHNDLIVEVNALFEAQREHGNPRATSQFEEEYLDIFSWQKDVSENDRRIYDQVGWCTYFKNEKRAPKSSLSSQMCEAFERVSHAVWIDEKGTEHKLPPEIKQRIVEVLFSPVPLKGNKSCKVTYKRIREWMELDSDFTFKGVESEKEKTEEIYIPKAWKVMRENLPNDLTVELRDNRELADIVAGCLTYASSEKNLVAVLKENCIDDKDISSLCSLPFTAQVFTGYGSRSLRALDLLISSFEDYENVTTLAQAEEASGLKDMRLEPGERRDTSLPPYKLYDPTCKNPVVLRVMGQVRKVVNAIIKEYGMPNEIHIELARELKQSKHEKQVISERNRATRDAREARVAKITEELGVVPKKSLIKKVEAWEEQGGRCVYCGNPISYERLIAEDHFAEIDHALPFSRTCDDSQSNKVLSCKACNQNKKNRTPYEWAQDGGINWEDFSLRVTRNKKIGQKKRAKLLCTDLSAAKEGEFISRNLNDTRYASRAAKSFIENYLAFPEDGHKQHVFAVAGGATALLRSAWGIRKNREEDQVHHAVDAAVIAACTRQQVIDIARANERKLYTPKSERKDLFKATEPWKGFSEEVAKWKTTIIPTHMVDHKIGGRVFEDTVYAYCGLRKDGKVGLLGSGPKGKLGTKASSNYIVREDGSALIVDELAFINLWLDPEAKKGKGQLLLEPIYRADIPFESKPGYVRKYIPPQSDKKPREFWDPVPERALALKPLTLFPQDVILVKGEIRRFKTINIATCSWQLSDPRGELTDTEATKGLAFLTLDKENLPVHIEEDVLGLVFKRLSIKQHQKKESEE

SEQ ID NO: 7321 - protein, 1068 aa, synthetic construct
  REGION 1..1068: note = Synthetic
MSDSNFYSPYVLGLDLGSNSIGWALIKLDNDDNPCGIEKVGVRVFEAGMEGQYESGKEESRNKKRRDARLVRRQIERRARRYRRLANVLQQIKLLPEGNLNDSLERKNIIDNLDVELRKMYIKEDLPEYEKNRLNQIFLYYLRSLAVGQKLEPYALGRVLYHLGQRRGFLSNRRGQKKDDEEKGKVKEGIAEIRKEMACLGARTLGEYFAKIDPIAEQKRIRGRWTARDMYEQEFYTIWDQQAQFYPDILNDENKKLVFKTIFYQRPLKSQKEKIGFCQFECIARGGQRNRRRAPWVILKAQRFRLLQKVNDLEIKEDKFNKRPLTGEERKVVIDYLEKNGDTTFAQLRKILSLPKTVKFNLEEGGEKKIPGNKTASAIRNVIGERWDNMNAEERDKLVEDIYSIVNNKALERRLIKHWKFSEEEALQISEMIIEDSYCNLSRQAIDKFLPGLEEGRRYGELVKEIYGMDNVRDEFKVDLLPPLEEAPIGEIRNPTVTRTLAEMRKIVNELVKRYGKPRFIRIESAKDLRNTKKEREKIWKNNRDLEENRNKIRQELINRGIPNPTRSDIEKYMLAEECGWKCPYTGRPINGFNALFGSEPQFDIEHIIPLSRCLDDSFKNKTLCYHEENRTRKHNKTPYEVYAFDESRWEAILGRVEKFNSHCAAEKLRRFKLHGKALEDFIDKFSSSQLNDTRYASREACMYCGLLYGSEYRKHIFAVSGSATSVIRRMWDLNKILGSPEKNREDHRQHAIDAIVIAITSPSMVKRISEQAENIPIKERKNKNWWRFIEPPWATLSKEAEEKVLSIIVSHRPERKVSGRLHEETNYSPPKIDENGETVVHVRKSLSNISKGEIDDIVDPIVRKAVQDKLIELGGDPKKAFADPMNYPLMPNKKGLQIPIKSVRVKKKVPVFPVGEKERVRYVTSDENHHIEIFETKDKKGRTVWDANVVSMFEAMQRKKRGEEIIQRKLIRDGKEVEDAKFLFSLCKGDIVFMKDIKDESKYEYFKLIKMDINCVLMFLPIYMARIPEKNGKKDFTGLTRRLSSLLSSEAKKHSVNILGESQIAHD

SEQ ID NO: 7322 - protein, 1075 aa, synthetic construct
  REGION 1..1075: note = Synthetic
MTQKKEVKKMSKTDSISSYTLGIDLGSNSIGWAIVKLDENDNPCGIEKVGVRVFEAGMKGQYEEGKEESRNKKRREARLVRRQIERRARRYRKLANLLQQIKLLPQGDLNDSGERQRILDELDKVLRTKYINNHLSPEEKNRLHQIFIYYLRSLSVEQKLEPNALGRVLYHLGQRRGFLSNRRGQKKDNEEQGKVKKGIAEIRVEMSRLGTETLGKYFAQIDTMDINQKRIRGRWVARDMYEQEFYTIWDFQSQFYPELLTEEKKKQVFFAIFFQRPLKSQKDKIGFCQFECIARGKKRNRRRAPWVILKAQRFRLLQKVNDLLIVADKNTKNPLTDDERKLVIEHLEKNGDTTFTQLRSLLRLPEEVKFNLEVAGEEKIPGNRTASEIRKVIGEHWDGMNSEEKDKLVEDIYSIVSDRALKKRLMRHWKFTEEEAQKLSEIPIEDGYCNLSRQAIDKFLPGLQQGRRYGELVKEIYGMDAIREGFKVDLLPPIEEAPIGEIRNPTVQKTLSEMRKIVNEIVKLYGKPRYIRIETGKDLRNTKKERERLWKNSRDMEKERKKIKDNLMKNGIANPTRDDIERYMLAKECRWICPYTGRSIKFKSLFEESQYDIEHIIPLSRCLDDSFKNKTLCYHEENRNRKHNKTPYETYSQDETRWNEILERVSKFNSAHAKEKLKRFNLHGKTLEEFIDKFSSSQLNDTRYAAREAVIFCGLLYGSEYRKHVFAVAGPTTAVIRRMWKLNKLLGSPEKNREDHRQHAIDAIVIAITSPAMIKNISEQAEKIPKSERKHDRWWRFIQPPWDTLYNEAKEKILSIIVSHKPERKVSGRLHEETNYSPPKQGDNKDETVVHVRKAIASLSKGEVEEIVDPVVRETVKKKLEELGKENPKKAFTDLKNYPLMPNRKGLQIPIKSVRIRKKLSVFPVGSKHRVRYVATDENHHIEIFETKDKKGRIIWDANVVSMFEAMQRKRRGEEIIQRKLIRDGKVVEDAKFLFSLCKGDMVYMKDSEGEYQYYKLVIVSEYASGAKVMFFLPHHVAKIPKSWVGLTKTSSALQKSEAKKCSINVLGETHIAHD

SEQ ID NO: 7323 - protein, 1168 aa, synthetic construct
  REGION 1..1168: note = Synthetic
MRTRGIAVPLAGATDQVSEIRGMATRGQANAVIPGCRRNIFPGLLGGSIHAMARAIGVDAGVCKYAGHMGATIVTDISRSAFAFDIGTKSIGSAVLRLDDRGEPIGIINAAVRIYADGREPKSGTSLAEGRRLARGMSRRRDRYKRRRRTLLNTLTEFGLMPPTDEARKALLAETNDRRFGAVAGNVYALRARALDEKLPLHHLGRALFHLNQRRGFKSNRKTDKRDNDQGKIASGISRLGQKLDEAGARTLGEFLHRQHSAGKWVRVRPSRVPSKDDKEEDGYGFYPERSFLEREFAAIWKAQAAFYPELLTEERGDHLHRVMFFQRPLKRPKVGKCSFYPDEDRLPKAHPLFQEFRLVKELNELEVVHRGDRREKLTLEQRDTLFNQLRTQRSSAFTALRKTLKAPTGTRFNKESDARDKLKGDEVAAEMSHKDRFGQAWIGMPLAERWAVIEMLLDTEDPLEVKAWLEEHYGFAADRIDAIAAAKLPPGYGRLGETALRDMLDELKNGTVKDDSGRDVVLTERQAMDNIWKDNPALQRVVADARELPPYQEVLGRRIPPGTGKPEDPYDVQKGRLTNPTVHIGLNQLKRVVNALVRRHGRPDQIALELARELKLNEEQKAEKDREIARNTKAAQARSEKLRQLDIDDNGYNRVLLKLWEDLNLRQPENRECIYCGKAIGIGTLFSNQVDIDHILPWSKTLDDSQANRIVCHVECNRQKGNHAPAEVPQWHDRYDDILARAERLPRNKAWRFGREAMKKFKDDESFLARQLTDTQYLSRMAHEYVAALYPDEEPDEWGVFTRRNHVRVIPGRMTEMLRRQWGLNAIISDHDQKNRNDHRHHAIDAIVVGVTTRRLLQRIATAAGGREALALEETIGKIEPPWPGFYDDVKEAIDRIVVSHKPDHGSLPKPGEPARTAGQLHNDTAYGFTGEERKGVPIMVHRVPFATLTEKDIPSIRDRQLAEALYGAIAGISGKAELAAALARFSASGPYKGIRHVRVVEPVSVIAIKDRDGTPYKGYKGDANYRYDVWELPNGKWTHEVVSMFDAHRPDWQSEIRNKNPAARKVLSLHQNDMVAYEHPQDGYTIGRVVKFGSGGQMALAGNREGGALKSRDADPEDRFRYFYKSGGAMRDARLRQVRVDETGRVFDPGPQDRESRNARKQSAAG

SEQ ID NO: 7324 - protein, 1120 aa, synthetic construct
  REGION 1..1120: note = Synthetic
VAPVSDYKNTVFAFDIGTNSLGWCVLSGERDADGLLIPNRIIDIGVRIFSDGRDPQSGASLAVAQREARGARRMRDRYLKRRQQLLERLTEYGLMPADEAGRKVLLRETSDRGQNTGSNDTEKTDPYNLRARALSEKLPLHHLGRALFHLNQRRGFKSNRKTDRRDNDKGKIAMGVEELQAQLHLSKTPTLGTWLAQRYNQGKVVRIRQDSEAFTGEKQENYLFYPERSMLEDEFAAIWQAQAEFYPEELTESRKKQLFDAIFYQRQLKEPKIGKCAFNPEEERLPKAHPLFQEFRLYKEVNELTIEAAGKASGQKLSKEQRDTLIDILRPQKKMAFSAIRKSLKLHGTTFKKEKNAREGLAGDEIYAEMKDKSRFGNQWADFAREKQWDIIQKLRDEENPEKLNKWLTEQFPNLSAEQRDKIANAKLPEGYGRLGRTALSHMLEEMKTDVIPEAEAARRCGYDHALLGRDREELDTLPKYQQVPNVARSIPPGEGGKAVAENDPDYDRIMGRITNPTVHIALNQLRRVVNALIKKHGKPREMAVELARDLQLSDEEKKKVNKSIADNTKEAIARSDKLVEIGIEDNGYNRQLLKLWEELNENPQDRCCPYSGKPISLTTLLSSDVDIDHILPFSRTLDDSNANKIVCLKEYNRQKGNLSPAEAANRLDGWDYEAMLARAQNLPKNKRWRFAKDAMERFEQEDNWLARQLTDTQYLSRLAREYLSALYPGEEADEQGELRMRYHIRTIPGKLTELFRRNWGLNDILHDRTAANDTAKPKNRQDHRHHAIDAAVIGITTRSQLKRISTASGQMEAQDLENFVKSSVRDTPPWPDLRRDLQIAVDGIIVSHKADHGTLPKAKDNKAGKGKTAAKLMKETAYGLPIDDKGERLKDAKGNELVVWRVPLRSLKAKNLENIRDSHLANALKEHIYTEARELKDGKNFEQALLSFAQTHKDYKGIRHIRLIGAHNTIPIRNAAGKAYKGYWNDGNYRYDVWQTLDGKWKQEVISMYDAHQPSYQSPFHQANPTAKKVLSLQQNDMVAYNNPETGKRIIARVVKFGTNGQIVFAPHNEANVDQRDRDKTNPFKYFIKMAGALKEWKLRQIRIDEIGQIFDPQQQTGA

SEQ ID NO: 7325 - protein, 1117 aa, synthetic construct
  REGION 1..1117: note = Synthetic
MRKKLFSFDMGTNSIGWCVFNLGPSNEPIAIVDAGVRIFSDGREPKSGNSLAEGRRMVRGMARRRDRYKRRRKAVLRTLTEYGLMPSDPGARAALVAETNDARRDRPANDVYALRARGLDERLPLHHLGRALFHLQQRRGFKSNRKADRRSNDNEKGAIAIGEDRLRTAMHEAGARTLGEFLAGRRGTDPLGRGGVRVRIDAAASSEGEGRREKPGYDFYPVRAMLEDEFDQIWARQAEFWPEVLTDDRRRHLFRVMFYQRPLKPPVVGKCSFNPSEMRLAKAHPLFQTFRLYKEVNELELVMPDQSQRKLTKDERDALVIHLRGVRSAGFPALRKTLKLSERGTRFNKEHEGREKLLGDEIHAAMSDKALFGNRWAAMPMDRQWETVERLREENDPLALHRWLVEQAGLSDEAAEKAADAKLPEGYGRLGRTALATMLEELKADVITEAEAARRAGYDHALARHGEAVERLPKYQEILERRIPPGTGDLDDEYDIQKGRITNPTVHIALNQLQVVTNRLIARHGRPERIHIELARELNQSEDQKREATARNARNRRDAERRSAILTEFGQPDNGFNRQLLKQWEELNPGDPLDRRCIYSGTVITPTMLFSGAVDIDHILPWSRTLDDGATNRILCTREANREKRNFAPAEVPAWGDHYDDILERAQRLPPNKRWRFALDAMERFEKDRDFLDRQLTDTQYLARLAHDYLGALFPDEEADGDGVVKKRNHVVVVTGRMTEMLRRKWGLNGILPDHNFADPTKTKNRKDHRHHAIDAAVIGVTSRSLLKRVADAARDGETQGAEDAIRTLSPPWLSFRDDLKVVVDRIVVSHKPDHGTLPKPGETGRSAGQLHNDTAYGLTGEVDARGNPIVVRRKPFLSLQPKDLHAVRDLRLRAALENATHGFGGRDFTAALIKFRQAAGHHYRGIRRVRVVEGLSVISIRDKDGRAYKGYKGDANFRYDVWELPDGRWIADVITMFDAHRPDIDWQKRRPHPAARKVLSLKQNDMVAYDDPRGGPTIGIVVKFGQNGQITLVAHKEAGELKNRDALPNSAEEALARGAEPDQDGRVAFDPFKYYSPTAGGLRKIGLRQVRVDEAGRIFDPGPRDKNKKSPRNEPR

SEQ ID NO: 7326 - protein, 1116 aa, synthetic construct
  REGION 1..1116: note = Synthetic
MTEKYKPLLFAFDLGTNSIGYWVYALNSKGEPESSKGGGVRIFSDGRDPKSKASLAVARREARAMSRRRDRYIRRRKALLRTLSEYGLMPRDAKMRRALVQETGDIAQKSGGGSDGPYELRARALDEKLPLEYIGRAVFHLNQRRGFKSNRKTDRKDNDLGKIGAGVRDLEAQIMASDARTYGEWLAKRRRAGQTVRLRAGSDLLTAEGYAFYPSRALLEAEFKAIWAAQAQYYPDILTSEREKHVFDIIFYQRPLKPPQVGKCAFNPKETRLAKAHPVFQAFRLYKEVNELEIVLDDLSHQKLNRAQRDKLIWLLRQKKKLSFAKLRTELKLPRTTTFNKESETRKDLVGDEVYVLMADAKRFGGQWADFTLEEQWAILTKLKEEEDPERLLDWLQAHYKLDDDQAIAIIDAPLPQGYGRLGLTALSAMLDALKEDVIPEAEAAKRCGYNHSRLGFESEAGEDCLPPYQEVMERHIPPGSGDEDVVELELKDSLRDGLKEGPIPIGYDLYKGRITNPTVHIGLNQLRRLVNDLLVKHGKPQSMVLELARDLQMSEKQKTEYNKAQAKNRREAEARGSLLQEMGQRNNGSNRVLLKLWEELNPKDPEGRVCIYSGQAISASMLFSGEVDIDHILPWSRTLDDSKANLILCISAANRQKRNRAPAEVTEWQSHYDEILARAQILPKNKRWRFAADAMARFEGEEDFVARQLTDTQYLSRLAKEYLECLYPFEEADEHGELKKRNHVWVTPGRLTEMLRRNWGLNSLLGDQDHAEVAQPKNRQDHRHHAIDAAVIGVTTRALLKHISGLARTVDSQNFDYAIKKIIADNPPWPSFREDLKAALQPIVVSHKPDHGRVSQAGYKLGKGQTAGQLHNDTAYGPTQETDAKGNPIVVRRKAFNSLVAKDIPNVRDERLQAELYSAIEGLQKDKDIAEALAVFQKTHKQFKNIRRVRVAETLSTIPIRDSDGKVFKGFKGDSNYRYDVWETLDGKWHCEVVTMFDVHQRDWTSPFHKDHPTARRVLRLQQNDMVAYNHPDKGYCIARVVKFGGNGQIFFAPHNEANTDNRNRDKDDPFKFFSKTASGLKAIQCRQIRISPSGQIFDPGPQDQESKAQKRQIA

SEQ ID NO: 7327 - protein, 1113 aa, synthetic construct
  REGION 1..1113: note = Synthetic
MNIHEFPYANNLRSMSAAPLLLAFDLGTSSVGWAAFDIDTAGTPIRLLDAGVRLFGDGREPKSRLPLAVGRRIARGMSRRRDRYKRRRKALLRTLIEFGLMPEHRPAQLALIAETRDSALPSDVYALRARALDEALSLYQIGRIFFHLNQRRGFKSNRRTDSRDNEQGMIAQGIARLHQELLAHDARTLGELLFKRRGTDPKNRGTVRVRAQTINVEGKDEQGYGFYPERSFLQHEFNAIWDAQAKFYPDLLTEERRAHLHTVIFYQRPLKPAKPGKCSFFPDEDRLPKAHPLFQEFRLFKEVNELKLKPDFGDAYPLTLEQRDLLITVLRPAHSSKYTALRKKLLKASQGIKFNKESESRLSMKGDEVYATMSDKSRFGALWSGFSVKEQTQLVEKLYQEDDPLALDTWLANRYPLLEASQRDAISGANLPEGFGRLGVSALETLLVELKADVITEYEAIQRAGLKNAEVHDGHALLPPYQEVLAKRIPAGTGDDDDPYDIRMGRITNPTVHIALNQLRRVVNLLIQRFGKPEKIAIELARDLKLSEEQKKQVNHTIAKNTRANELRSDKLRDLERKGTYFNIDNGYNRYLLKLWEELDPAQPLNRRCIYSGKPISIEMLFNGEVDVDHILPYSQTLDDSQANKLLCLRDANRIKKNRPPSEVAEWVHEYDGILDRASRLPASKRWRFAPGAMKRFREEEGFLARQLTDTQYLSRLAHEYLAALYPDEEPDQWGVFVKKNHVRINPGRMTQMLRHHWGLNELIGKADAKNRNDHRHHAIDAAVIGAITPAMLNRVSRAAASREAQQLEKSIGDIDLPFPTFREELERIVSRIVVSHKPDHGTLPSTESASSTAGRLHNDTAYGLTGETDAKGVPIVVRRKSFLNLQRKDIATIRDEELQAAILKATDSVSDKDFPAALDHFRKQGPKQFRGIRRVRVIETLNVIPIRDEHGRAYKAYKGDANYRYDVWELPSGKWVEELVSMFEAHKLGWQSEIHKNNPAARRVLSLHKDDMVAYRNHDNEYTVGRVVKFSKGSICFASNREGGALKARDADKTDPFKYFIKSASSLKDAQARQIRVDETGRVFDPGPQDRQSRAIRKQNGNINNKTEISFS

SEQ ID NO: 7328 - protein, 1107 aa, synthetic construct
  REGION 1..1107: note = Synthetic
LPLYVDATSPGPASSPALREMLLGESVMKTSFAFDIGTNSIGWCVLALDNANLPYRILDAGVRIFSDGREPKSGTSLAEGRRLARGMSRRRDRYKRRRKAVIRTLIEYGLMPDDPAARRALVAETNDKAPGKIASDVYALRARALDDKLPLHHIGRALFHINQRRGFKSNRKTDKRDNDQGKIASGISRLRDKLASEGMRTLGEYLNHRHQAGNWVRVRPSRVPGKDDKEEDGYGFYPERALLQDEFNAIWTAQAAHYPDVLTEERRTHLETIIFFQRPLKPVQVGKCSFNPGEERLPRAHPLFQEFRLYKEVNELELVDRNQDHHKLSLDQRDALIAQLKTQREAAYSALRKTARAPLGTRFNKETESRTKMKGDEVAAELSAKTRFGQAWISMPLEERWIIVDTLRRVEDPLELTAWLEQHYGLDGEHIDAILAARLPEGYGRLGETALTEILVELKAAVISEAEAARRAGYDHALLQRGAGLEALPKYQEVIARRIPPGTGNPDDPYDVEKGRITNPTVHIGLNQLQKVLNALIRRYGKPEQIAIELARELKLNDEQKREKNIEIARNTRAAEQRSAKLVELGVPDTGYNRVLLKLWEELNLRAPENRVCIYCGEPINIETLFSSAVDIDHILPWSKTLDDSQANRLVCHVACNRQKANYAPAEVPQWQGRYDDILARANTLPLNKRWRFGRDAMKKFADEETFLARQLTDTQYLSRLAHAYMAALYPDEEPDAQGVLARKNHVRVITGRMTEMLRRQWGLNSLLADHNQKNRNDHRHHAIDAAVVGVTTRALLQRIATVAGGREAQALEETIGKIEPPWPGFRDELQAVIKRIVVSHKPDHGTLPKPGQGGQTAGQLHNDTAYGLTGETDSRGTPIVVRRKPFTSLTEKDLPSIRDRQLAQALGSAIAGRSGKELQAALEQFRDRDDYKSIRHVRVVEPLNVIPIRDGTGRAYKAYKGDANYRYDVWELPNGKWMHEVVSMFDAHDRSWTSAVHIHHPAARRVLSLKQNDMVAYDHPQDGPTIGRVVKFSQSGQMTFAPHKEAGALKARDADPEDRFRYFYKSGSAMKDIGLRQVRVDEIGRVFDPGPRDKEARNARKKKSTD

SEQ ID NO: 7329 - protein, 1098 aa, synthetic construct
  REGION 1..1098: note = Synthetic
MTAENYSNVRFAFDIGTNSIGWAVFQLNDKQEATSILNAGARIFSDGRDPKTFEPLAVRRRNVRSASRMRDRYLRRRKRTLDKLIGYGLLPEDKAERDKILLETNDKPSGSTDKKTDPYSLRARALEEKLPLAYVARALFHIGQRRGFKSNRKADRKSNEKGKIAAGIEELSGLMHQSHAPTLGAYLAKRREEGHVVRLRASSEALTNKAYAFYPERAMLEDEFHKIWQAQAEYYPDVLTKEREEELFHVMFFQRPLKEQKVGLCTLVEGELRLPKSDPLFQQFRLYKEINELAIILPDLSQRKLTMEERDTLITLMRPAKTKTFAALRKALKIPAGGRFNKETENRKQLTGDEVYSVFSKPELFGGDWAKFSIEQQREIIDQLNNEENPDKLEEWLKNKFPKLSDEQRSEIINANLPDGYGRFGITATSKILEQLKKDVISEAEAAHRCGFDHSLANRNWKGLDELPRYQEVLERHIVPGTGDKNDIYDIYKGRLTNPTVHIGLNQVRRLTNRLIKAYGKPWQIVVELARDLPMSSEERKEHNKTLNDNIKAGFERTQKLERLGQKDNANNRLLLKLWEELGKDPDDRKSIYSGTRITEPMLFSGEVEIDHILPFSLTYDDSYANKILCLREENRIKRNRAPADVTEWKDRYDEIIGRSKKLPENKQKRFRPDAMKKFEDNRQFLARQLTDTQYLAKLAREYFDSLYPGEEADSVGEFKKIQHVWVTPGRLTELLRSKWNLNFILALDPGLSSFEKFKTHYKKNRKDHRHHAIDAIVIGVTTRSLLKSIATAAGKFEKEDFDAFVEKVVSDALPWPNFYDDVKNIIDKIIVSHKQDHGTINRAGYAQGKGKTAGQLHNETAYGLTGEMDDKGNKVVVTRENFLSLESEDIPTIRDENLQAELYSATQGLDKKEYQEALLRFARDHKLYKGIRHVRVLLPRNVIEIKDKNGEPYKGYMGNSNYRYDVWETLKGKWISEVVSMFDAHQPKWSSEFHKNNPTARKVLSLQQNDMVAYNDPERGRVIARIVKFGQNGLIFFAPHNEADVSARDSNKNDPFKLTVKTATGLKKMQFRQIRVDEMGRVFDPGAQDRESKQARS

SEQ ID NO: 7330 - protein, 1097 aa, synthetic construct
  REGION 1..1097: note = Synthetic
MGKGDILFSFDIGTNSIGWCVFALSDNGDPCRILDANARIFADGREPKSGNSLAEGRRAARAMARRRDRYKRRRKAVLRTLTEYGLMPADPKARQALVAKTGDRGPKSEEALADVYSLRARALMEKLPLHHIGRALFHLNQRRGFKSNRKTDRKSNEKGAIETGVNRLLEEMRDTGAPTLGAYLAKRRSDGRPVRVRAGASEQEAEDGKPAKTAYDFYPVRRLLEEEFDAIWEKQYSYHPEVLTEERRGHLFRVMFHQRPLKPAIVGRCSFNSAETRLAKAHPLFQEFRLYKEVNELEVVMPDQSHRKLTLPERDRLVLKLRGQRKATYAALRKELRLRDLRFNKETENRTDMMGDEVTAALADKAVFGNRWSGFSTDEKWRIVERLREEEDPFALHEWLVSEHGLSDAEAEQAAKVHLPDGYGRLGPTAVSTMLEELKADVITEADAARLAGYDHSLARADEDGLDRLPKYQEVLERRIPPGTNDPDDPYDIAKGRITNPTVHIALNQFRHVVNALARRFGKPDQIAIELARELKLNDRQKDEVNRVIGRNTRAAALRSQKLRDIGQKDNGYNRALLKLWEELNPDKPEDRVCVYTGRPICISMLFSGEVDVDHILPWSRTMDDSQANRILCVVEANRVKANRAPAEVAEWGGRYDEILERAARLPRNKRWRFARDAMEKYKENEGFLARQLTDTQYLSRLAREYAEALYPTEEPDRLGELRRRNHVRVIPGRLTEMLRRGWGLNALLPDHNFGAGQAKNRKDHRHHAIDAAVVGVTTRGLLQRISTEAGLREKLALEETIADIPMPWPGFREELKAAIDRAVVSHKPDHGTLPKPGEHGRTAGQLHNDTAYGITGETDARGNPIVVRRKPFLSLTDKDIPSIRDTELRGRVYSATSGLSGRELSAALDYFRKTDKQFRGIRHVRVTESLSVIPIRDRDGNIYKGYKGDANFRYDVWELPDGKWKADVVTMFDAHRPDRAAEERRPHPAARKVLSLKQNDMVACEHPKDGYTIGRVVKFNTAGQIYFAAHNEGGSLKARDADRADPFKYFSKSASGLKEIAARQVRIDATGQVLDPGPQDRESRLARNKRLERERA

SEQ ID NO: 7331 - protein, 1097 aa, synthetic construct
  REGION 1..1097: note = Synthetic
MLTLGIDIGSTSLGWCLIETQGEPLENDFGKIVAIGIRIFSDGREPQTKASLAVQRRAARAMRRRRDRYVARRGALLKALTDYGLMPANEDARKKLLKETGDGEGGDLSGSIYGLRSRALGEKLHPYQIGRVLFALDQRRGFKSNRKTDKGDNEAGKIAIGVSRLQQKMAEAGAKSYGDFLYKRRLDGKSVRTRLRPESGEDAKGDGYDFYPSRQALEDEFDDVCAEQAGHHPELLTQERIKHLRDITFYQRPLKPPVVGKCSYNPAEERLAKAHPLFQEFRLYKELNELELIDEQQKRRKLTLDERDKLYSQLRGAKTGTFISLRKTLGLGKEIRFNKESETRDKLLGDEVYSALSDKKGFGNRWSTFGLERQWQIVQKLRNTEDEFELHAWLTAECGLNDDQTEAVAKVHLPEGYGRIGETAAKMLVDALKTETDAEGKVIPESEAAKRCGYNHSDKSDLNFPGHKELPHYQEVLDRHIPPGTGNPDDVYDVFKGRITNPSVHIALNQLRRTVNALIKRHGKPDRIAIELGRELKLSDKQKDEIDRTIRKNTREAEARSEELKALGRADTGYNRLRLKLWQELNKDQPLNRVCIYSGEPITAAMVFSPEVDIDHILPYSKTLDDSEGNKILCKTHANRQKRNRAPAGVSGWADRYEDILARASTLPRNKRWRFAADAMEKFADQEGFLARQLTDTQYMSRLSLTYLASLYPTEEAGADGVLRRHSRIRALPGRMTEMLRRKWDLNDLLPDRNIGGSDTVKEKNRKDHRHHAVDAFVIACTSRSLIQRIATASAKLEAEGAERVIEKIADPWPGFREQLREALRNTVVSHRPDHGTVSREAYASGRGQTAGKLHNDTAYSPTGEVDEKGSPRVVRRRQLSDFKSEKDLAAIRDTQLREALWAATRGLSGKEFEAALIAFSRAETLDGRKNPFRNLRHIRVLETETIIPIKDKDGKVYKGYLGGGNYRFDVWQLPDGRWDADVISMFEAHQPGYVSKIRQDHHNPKKVMSLQIGDMVAYEHPESGERVIARVRKFDQRNKQIYLDPHNEGGRLDDRHKDEADPFRSFSKRPNALKAIKARQVRVDEIGRVWDPGPRV

SEQ ID NO: 7332 - protein, 1097 aa, synthetic construct
  REGION 1..1097: note = Synthetic
MTERAFAFDIGTNSLGGCVFKLDTDGRPIALEHMLVRIFSDGREPKSGNSLAEGRRVARGMARRRDRYKRRRKAVLRTLTEYGLMPADQQARKELLAETSDRSPREAVEQALADVYNLRARALSEKLPLHHIGRALFHLNQRRGFKSNRKADRKSNEKGAIEIGANRLHEKMQEAGARTLGQFLAMRRAKGEWVRVRSGALGEEGADDGRNSKTTYDFYPVRKLLEEEFNAIWEMQQPYYPEVLTEDRRSHLFRVMFYQRPLKAAIVGKCSFNPAETRLPKAHPLFQQFRLYKEVNELEIVLPDQSHRKLTLDERDTLVRQLKGIRKTTYKTLRKTLKLSGSEFRFNKETDNRVDMIGDEVNAALSDKKAFGNRWATFSTDEQWTVIDQLREQEDPLSLHEWLVVTYGVPDDAAEVVASIHLPDGYGRLGLTAISSMLEELKADVIPEAEAAKRAGYDHALAPTDGDLDRLPKYQEILERRIPPGTGEPDDPYDVAKGRITNPTVHIALNQMQQVVNGLIRQYGKPEQIAIELARDLKLNEKEKAEVNRKIGENTRAAAKRSEKLRELGQKDNGHNRNLLKLWEELNPDNPEDRVCIYTGRPIGIRMLFSGAVDVDHILPWSRTLDDSQANRILCVVEANRVKRDRAPAEVAEWASDYDAILERANRLPRNKRWRFARDAMEKYQDEEDFLARQLTDTQYLSRLAHEYLVALYPAEEADGDGVLKRRRHVRVIPGRLTEMLRRNWGLNSILPDHNFAGTAQAKNRKDHRHHAIDAAVVGVTTRSLLQKISTQAALRETIALEETVADIPEPWPTFRDDLKAMVERIVVSHKPDHGTLPKPGENGRTAGQLHNDTAYGITGECDARGNTIVVRRKPFLSLTDKDIPNIRDDELRRRLYSATSGLTGREFAAALDYFRKTDQKFHRIRHVRLTESLSVIPIRDKEGRAYKGYKGDANFRYDVWELPDGKWVADVVTMFDAHRPDRDPQAARPHPAARKVLSLKQNDMVAYEHPKDGLTIGRVVKFSTAGQIYLAGHNEAGALKARDADKDDPFKYFSKAASGLREIGARQLRVDGTGRVFDPGPQDRETRLERKARLGD

SEQ ID NO: 7333 - protein, 1096 aa, synthetic construct
  REGION 1..1096: note = Synthetic
MQPKLFSFDIGSTSIGWCVFGLNAKGEPDKILDMGTRIFSDGREPKSEASLAEGRRLARAASRMRDRYKRRRKTTLRTLIEFGLMPADKQAQEALLRETGDRKKDSGEDSANPYALRAQALDRQLPPAYIGRALFHLGQRRGFKSNRKTDRRDNDQGKIAIGIAELIATMDRDGARTYGEWLARRRQNGQVVRLRMDSEIFNDTNYSFYPERSLLEKEFHAIWDAQSAYYPDLMSEDRRDFLFNVIFYQRPLKKPLVGKCAFNPAETRIAKAHPLFQEFRLYKEVNELELVQPDLSHKKLTLDQRNALIRHLRSKREVSFSSLRRTLKLPPNIHFNKESESRKKLKGDEIYAAMTDKKHFGTKWANMTQDEQWQIVQKLKDEQDPLALYDWLDKTHNLQGEQAEAIATHPLPDGYGRLGETALSSMLDELKSTVIPEAEAAKNCGYDHALAGAGSDEGEETLPPYQEILERHIPPGSGNPEDLYDIYKGRITNPTVHIGLNQLRRLANRLIRHHGKPRFMAVELARELQLSDKQKDTIRKTITQNTRAAEKRSQKIQDLREGNSHFKALVDNGYNRLLLKLWEELNPDNPEDRCCIYTGKPISPSMLFSGAVDIDHILPWSKTLDDSQANKIVCIRHANSEKRNQAPADVVQWQDHYDQILARVARLPKNKQWRFATNAMEKVEQSDGIPARHLGDTQYLSRMAREYMECLYPIEEPDEHGELKKRQHIRTSPGRLTEMLRRNWGLNGLLPDSNLGGMAQEKNRKDHRHHAIDAAVVGVTTPRLLKRISDAAGRMEAQQLENLVAKIVSETLPWDGFRDDLQKAVNAIIVSHKPDHGTVSRSGVAQGRGQTAGKLHNETAYGPGTSSDGKPIAVHRKPFMSIQSKDIPSIRDELLRERLFSVLDGKTDKKAREQALLDFRQNDPQFKGIRRVRIAETLSLIPVRDKNGKIYKGFKGNSNYRYDVWETLDNKWHCEVISMFDIHQQGWQSEFHKKHPTARRVLSLKKDDMVAYEHPIDGYVIGRVVKFVADGRIYFANHKESGSLKSRDTDKNDPFKYLERRASGLQKIKCRQVRIDETGRISDPGPRDRLSRQKQG

SEQ ID NO: 7334 - protein, 1092 aa, synthetic construct
  REGION 1..1092: note = Synthetic
MTAENYSNVRFSFDIGTNSIGWAVFQLNDKQEATSILNAGARIFSDGRDPQSGDPLAVRRRTVRSASRMRDRYLRRRKRTLDKLIGYGLLPEDKGERDKILLETNDKPSGSTDKKTDPYSLRARALEEKLPLAYVARALFHIGQRRGFKSNRKADRKSNEKGKIAVGIEELSGLMHQSHAPTLGAYLAKRREEGHVVRLRANSEALTDQAYAFYPERAMLEDEFRKIWQAQAEYYPDVLTKEREEELFHVMFFQRPLKEQKVGFCTLVEGETRLAKSDPLFQQFRLYKEINELAIVLPDLSQRKLTMEERDTLITLMRPAKTKTFAALRKALKIPAGGRFNKETENRKQLTGDEVYSVFSKPELFGGDWGKFLIEQQREIIDQLENEENPDKLEEWLKGKFPKLSDEQRSEIINANLPDGYGRFGITATSRILEQLKKDVISEAEAAHRCGFDHSLANRNWKGLDELPRYQEVLERHIVPGTGDKNDIYDIYKGRLTNPTVHIGLNQVRRLTNRLIKAYGKPQQIVVELARDLPLSQEQKRKYNKTNKDNTDAAKRRSEKLGEIGKRDNGYNRQLLKLWEELGDDPNDRKSIYSGTRITEPMLFSGEVEIDHILPFSRTLDDSNANKILCLREENRVKRNRAPDEVSEWQGRYDELIERAKKLPKNKQWRFTRGAMKKAEENRDFLARQLTDTQYLAKLAREYFDSLYPGEEANADGEFKKVQHVWAIPGKLTELLRRNWGLNSLLAAEGDESANHPKNRKDHRHHAIDAMVIGVTTRSLLKRIATAAGRFEGEDFENFVKKAVSEILPWENFRKDAKDVVDKIIISHKQDHGTISRAGYAQGKGKTAGQLHNETAYGLTGGTDEKGNKVVVTRENFLSLESKDIPTIRDPNLQAELYSATQGLDKKEYQEALVRFARDHQLYKGIRHVRVLLPRNVIEIKDKNGEPYKGYMGNSNYRYDVWETLEGKWNSEVVSMFDAHQPKWRSEFHKNNPTARKVLSLQQNDMVAYNDPEKGRVIARIVKFGQNGQIFFAPHNEADVSARDSNKNDPFKLTVKTATGLKKMQFRQIRVDEMGRVFDPGAQDRESKQARS

SEQ ID NO: 7335 - protein, 1091 aa, synthetic construct
  REGION 1..1091: note = Synthetic
MDIETLFAFDIGTNSIGFCVFALDENGEPYRIIDIGTRIYADGRDPQSKASLAVARREARAMSRRRDRYVNRRKAVLRTLTEYGLMPAEASARQALIAETSDRNGAAGEASANPYALRAMALDEKLPLYWIGRVLFHLNQRRGFKSNRKTDRKDNEKGVIALGIGELRAAMHKTKARTYGEWLAARREDGHVTRLRAGSDAFEGDGYAFYPERSLLEAEFREIWARQSSFYPDVLTEARGDHLFQVMFYQRPLKKPRVGKCAFNPLEERLAKAHPLFQEFRLYKEVNELELVLPDHSHKKLDIEQRNALVILLRANREVTFKKLRTALKLAPDIVFNKESESREKLRGDEVHSVLADKKRFGPQWGALSRERQWQIIQTLKDEENPEKLFGWLKEEFGFEGEKADAIANAPLPEGYGRLGETALSSMLDEMKAAVIPEAEAAKNCGYDHSKLGEDREEGEAFLPPYQEILSRQIPPGTNDPADIYDIRMGRFTNPTVHIGLNQLRRVVNALIARHGKPQFVSLELARDLQLSEKQKAEANRAIAKNTREAAARSKKLGEMGQLDTGYNRLLLKLWEELNPSKPEDRVCIYSGKPIGIDMLFSAEVDVDHILPWSKTLDDSQANKLLCLKSANRQKRNRAPADVPEWRDRYEEILARAARLAPNKRRRFAPNAMAEFEAEGGFLARQLTDTQYLSRMAREYLSCLFPSAEIDRRGERKKKIRVIVSPGRLTEMLRRNWGLNNILPDHNLGEMTQAKNRKDHRHHAIDAAVVGVTTRSLLQRIATAAGRLDEADFENLVRKMVSENPPWPTFREELQAAVNGIVVSHKPDHGTVSRKGYAEGKGRTAGRLHNDTAYGFGTDASGNPVAVRRKLFTSLEAKDIPMIRDPELQAELYAAIDGLDDRRALQDALLSFRRTHPKFKGIRRVRMAETLSFIPIRDSQGNVYKGYKGDANYRYDVWETLDGKWHADVVTMFNAHQPDWRSPVHQEHPTARRVLRLQQNDMVAYEHPNDGYTIARVVKFNTAGIVYFASHRESGSLKARDADKQDPFKYFSKSAAGLKDIQCRQIRIDAAGRVFDPGPQDRASKSTRKTN

SEQ ID NO: 7336 - protein, 1091 aa, synthetic construct
  REGION 1..1091: note = Synthetic
MSCQLPLYSNHLFSFDIGTNSIGWCVLELDKVGVPASIKDIGVRIFSDGREPAADGKRGASLAVARREARSMRRMRDRYQWRRKKTLSVLVEYGLQPADEAERKKLVAETGDQKPDSTAPKIDPYNLRRRALTEKLPPYYIGRALFQLGQRRGFKSNRKTDRKSNEKGQIAVAVEELSARIQMAGVSTLGAYLAMQREKGHVIRIRAGSEAFSEKNDYAFYPERSMLEDEFHKIWDAQAEFYPDILTKARKEDLFKIIFYQRPLKKPIVGKCSFNPAEERLPKAHPLFQEFRLYKEVNELGVRMPDMYVRKLTVEERDKLIWQLRQKKKPSFAALRKTLKLSNGLTFNKESKNRTDMMGDEVYTVMADKKRFGNRWSEFSHAEQWQIIKELRDEENPAILKNWLQETFGLTDEEQLAAIMDAPLPDGYGRLGQTAMAAMLEKLKEDVIPEAEAARRCGYNHTLYDREHEGHDELPKYQEILEQHILPGTGNPDDSYDIEKGRITNPTVHIGLNQLRRLVNRLLHKHGKPAKMVVELARDLQLSDKQKKEVNKTIGENTRAAEKRSEKLKEQGERDNGYNQLLLKLWEELNEKPEDRVCIYSGKPINIEMLFSGAVDIDHILPWSKTLDDSQANKILCLKEANRQKRNRAPAEVTEWNEKYDDILARAARLPKNKQWRFARDAMKRAEGENDFLARQLTDTQYLSRMAVKYLDSLYPAEEPDEHGELKHRKHVWVIPGRLTEMLRRNWGLNDILADAQITDTNKPKNRHDHRHHAIDAAVIGVTSRALLQRIVTAAAKMEQDDLENLVTKIVKDNQPWQGFSDDLAQAIAGIIVSHKPDHGTVSRASYAQGKGQTAGRFHEETAYGLTGQRDNRGKTIVVWRVPFLSLKEKDIINIRDDKLRSEVEIAVYGKDGKDFEKALRDFQQKHLRYKGIRRVRITGTRNVLQIKDADGKAYKGYRGGTNYRYDVWLTLDGKWHSEVISTFGIHQPGWVSAFHAQNPTAKKVLSLQQNDMVAYEHPEDGYTIARVVEFYQDGKIAFSPHNEANVARRNKNKGDPFKYFVKMANPLKAIQCRQVRIDEIGQVYDAGFQG

SEQ ID NO: 7337 - protein, 1091 aa, synthetic construct
  REGION 1..1091: note = Synthetic
MYSNLLFSFDIGTNSIGWCVFALDEAGEPYRIVDLGARIYADGRDPQSKTSLAVARREARAMSRRRDRYLRRRKATLRTMIEYGLMPGDKAGQEAVLRETGDREGGDESFNPYALRARALSEKLPPAYIGRVLFHLGQRRGFKSNRKTDRKDNDKGKIALGIDELTAAMHRSGSPTLGAWLAMRRAEGHSVRLRAGSEVFDAEGYAFYPERSLLEDEFRQIWDAQAVHHPDILTPERRAHLFRVMFYQRPLKKPLVGRCSFNPAEFRLSRAHPLFQEFRLYKEINDLEVVLPDQSHRKLTLDERNALVAKLKTSRKASFSALRKTLKLTPDLVFNKESEARKELLGDEIYSVLADAKMFGARWGGFSRARQWEIITRLKEEEDPASLSSWLKSEFGLDDERVTAIANASLPDGYGRLGETALASMLEELKTAVIPESEAARLCGYDHSNLAKEQDEGLDTLPEYQEILERHIPPGTGDPDDIYDLRKGRITNPTVHIGLNQLRRVVNALIHRFGRPQRIVVELARDLQLSEKQKDDVNRRIAKNTREAEGRSQKLIEMGQLDTGYNRLLLKLWEELNLDKPEDRVCIYSGKPIGIAMLFSGEVDVDHILPWSKTLDDSQANKLLCLKSANRQKRNRTPSDVPEWRDRYDEVLARAARLPRNKRWRFAADAMQQFEAEGGFLARQLTDTQYLSRMALEYLSALYPSEEADKSGELRQRKRVHVVPGRLTELLRRNWGLNTLLPDHNLGEMAQEKNRRDHRHHAIDAAVIGTTSRSLLQRMSGAAARLDDVAFDDLVRTVVKDNPPWPGFREELLAAIGRVTVSHKPDHGTVSRAAYAQGKGQTAGKLHNDTAYGLTGLVDAKGSPLVVRRKPFMALEVKDIASIRDTELQSALYGAIGSLTEKKALQEALIRFRDTHPQFKGIRRVRVLETLSVIPIVDRDGKAYKGYKGDANYRYEVWETLDGKWHTEVVSMFDAHQPGWQSPFHKQNPAARRVLKLQQNDMVAYEHPADGYTIARVVKFSNDKRIYFASHRESGSLKARDADKGDPFSYFAKANNGLRDIKCRQVRIDAAGRIFDPGPQDRETRQANKGV

SEQ ID NO: 7338 - protein, 1090 aa, synthetic construct
  REGION 1..1090: note = Synthetic
LQSNLFSFDIGTNSIGWCVLGLDERNVPNRIIDMGARIFSDGRDPKSKESLAVARREARAMSRRRDRYLRRRKAILRTLIEYGLMPTDKMAQEALLRETGDRENEASANPYALRAKALSEPLPPAYIGRALFHLGQRRGFKSNRKTDRKDNDKGKIALGIDELKAQMHKAKAPTFGAWMAARREDGHVVRLRADSEVFAGDAYAYYPERSFLEDEFRQIWQAQAQFYPDILTPERGEHLFQVMFYQRPLKKPRVGKCSFNPAEERLAKAHPLFQEYRVYKEINELEIVAPDLSQQKLTLDQRNALIKLLRDKREVTFSTMRKTLKLMPDMRFNKQTESREKLKGDEVYSALGDKKRFGPQWASFGRDRQWQIIKTLKDEENPAELFAWLKDDFGIDGERAEEIANTPLPDGYGRLGETALASMLDEMQAEVIPEAEAAKRCGYNHANLGDDRDEGLPYLPPYQEILEHQIPPGSNDPEDIYDIRKGRITNPTVHIGLNQLRRVVNALIARHGKPKLMAVELARELQLSDEQKRDVNRTIAKNTRDAEARSKKLIEHKQADTGYNRVLLKLWEELNQQHPEDRVCIYSGQPINIERLFSADVEVDHILPWSRTLDDSHANKILCLKSANRQKGNRAPAEVPEWQDRYDEILARAARLPFNKRKRFAPDAMQKVETSERDFLARQLTDTQYLSRMAHDYLQCLYPGEEPDQHGVLKKRNHIIVSPGRLTEMLRRNWGLNNLLPDHNLGGLTQEKNRKDHRHHAIDAAVVGVTTRSLLQRISSAAGRMEGVDLDNLVKKMVKENPPWPGFREDLQKAVNAIIVSHKPDHGTVSTVAGSAKAQTAGRLHNDTAYGLGTNRHGAPVAVRRKPFLSLEPKDLPGVRDDELRSALEGVIGHLRDKKAMQNALALFRQHSLHFKGIRRVRMQENLSLIEIRDQQGKAYKGYKGDANYRYDVWETLDGKWHSEVVSMFEAHQPNWQSRIHTENPTARRVLSLQQNDMVAYEHLEEGYTIARTVKFSGSGSIFFAPHKESGSLKARDADKDDPFKYLQKSANSLKDIGCRQIRIDATGRVFDPGPQDRQSRLARKNKSTT

SEQ ID NO: 7339 - protein, 1086 aa, synthetic construct
  REGION 1..1086: note = Synthetic
MPFRQPVSYAFDMGTNSIGWCVFRLSAAGHPVAIADAGVRIYSDGRDPQSKTSLAVARREAKAAARRRDRTKRRQKATLRTLAEYGLMPGGKDERERLLRETADSADRNAPANDPLNLRARALTEKLPLHHIGRALFHLGQRRGFKSNRKTDRRDNDKGKIAIGIDRLRDAIREAKAETLGVFLASRRAQGLHVRLRAGSSVILDDGYDFYPVRSLLEEEFRHIWDAQAVHYPDVLTEARGEHLFKVIFHQRPLKKPRIGSCTFNPLEQRLAKAHPLFQAFRLYKEVNELEVVAPDLSQRKLTLDERDALVLKLRGAKTAKYKTLRKDLKLTPDMRFNKESENRVDMAGDEVTAALSAKGLFGPRWNTLSMDSQWKVIERIQEEENPFVLHQWLVETHGLSDDAAEAVAACHLPEGYGRLGHTALSTMLEELRADVIPEAKAAERAGYNHSYFGTGEIFDELPKYQEVVARSIPPGTGDLEDEYDVRKGRITNPTVHIGLNQLQRLVNGLIRRFGKPAEIAVELARDLKTSEKKKVEINRRIGENTRAARQRSEKIAELRKDTPALVDNGYNRLLLKLWEELNPAKPEDRCCIYTGKPISISMLFSGAVDVDHILPYSRTLDDGQGNKLLCLKEANRVKRNRAPSEVTEWANHYDEILERANRLPKPKRWRFARDAMADFDADSGFLDRQLTDTQYLSRLAREYLCSLYPEKHEQWRVRVIPGRMTEMLRRHWGLNTLLPDHNYSDAKNRNDHRHHAIDAAVVGVTTRSMLQRISTEAARREEQELEDVVKGIPVPWEHFRDDLQQALDNIVVSHKPDHGTVGLDDKGKWQTAGKLHNDTAYGLTGEVDARGNTIVVRRKMLLSLTDKDIPAIRDDELRARLYSAAGGLSGKELQQALLDFARNDPKYRGIRRVRVTETLAVIPIRDKDGNVYKGYKGDANYRYDVWEMKDGKWQAEVISMFDAHQKGWESPVRKANPTARKVLSLQQNDMVAYEHPSDGYTIARVVKFASSGQIVFARNNEGGSLKARDANRDDPFKYFSKTANGLREIKARQIRIDETGRVYDPGPRDRESRMTSNQKLKTIAI

SEQ ID NO: 7340 - protein, 1068 aa, synthetic construct
  REGION 1..1068: note = Synthetic
MAYRLGIDLGTNSLGWCALDLGADGAPEGLRDGGVRIYSDGREAKTGASLAVDRRNARAMRRRRDRYLRRRAVLLAELIRFGLMPADEAHRKALERLDPYHIRAVALDQAVPVHFLGRAVFHLNQRRGFKSNRKANPAADDAELGVVATGSENLDAAMQAAGARTYGEYLMRRHALDPGDYSASARRTRIRRRDGDEDYAFFPARRHLEEEFAALWQAQEPHHPDILTPEARARLHAIIFYQRPLKSPPVGRCAYTDEPRMAKAHPLFQRLRLVKAINELTIEEVGEAPRPLTHAQREQILRAWRSPTETKRSMTWGALRKAAGLPRSSRFRGEDRRGKGLSGDEVEAELVRLYGPGWRDLSPDEQWRIIERLNEEEDEAALIDFLQAEIGLDETSAHAVTRARLPEGHARIGRNAAARILTELEADVIPETEAVARCGWRHSDDRTGEVWASLPYYGQILDRQIPPGSQDPEDRPEECYGRIANPTVHIGFGQLRRVINAVIARHGLPHDIVIRLSRDLKLSEDQQAEIKRATRRNTDAAIRRGAMLEQLGIANTGRNRVILQLWEELHPDPQARVCIYTGQPISIEMLFSGDTCIDHILPIRVTLDDSNGNKLVCMAAANRCKGNRAPFEAFGTSADWDAILARAQNLPPNKRWRFAPDALTRFGEESDFIARQLTDTQYLSRLAKEYLCALYPADRGEGSQKVRVIPGRHSEMLRRTWGLNSLLHDHNYAQTAKPKNRLDHRHHLIDALVTALTDQRLMQKIATVAGRNDELGMAHIFKDMPEPWPGFREELKALLDRTVVSHKPDHGSIASPADRAKGQDRTAGRLHNDTAYGLTGETDDKGNDIVVHRVPLLSLDNDQKIAAVRDDHLRGELLQALARKSGKDREAALRRFATEHPVYRDIHHVRVTEPLNALKIHDKQGRVYKGYKGDANYRYDVWRMPNGKWTGNVVTMFEAHQAAAGEGQEWRPHPAAKRVIRLHRNDMVALEHPDDGYGIYRVVKMRVDGQLTLAKHNEAGDLKRRHGASNDEDPFKYLAKAAGTLQKMKMRQIRIDETGRVWDPGPRQ

SEQ ID NO: 7341 - protein, 1101 aa, synthetic construct
  REGION 1..1101: note = Synthetic
MPSATFGGGRCVQSKTSFAFDIGTNSIGWCVFELDRLNDPVGILASGARIFSDGREPKSGTSLAEGRRLARGMARRRDRYKRRRKAVIRTLIEYGLMPDDPAARRALVAETNDKRSGQVASDVYALRARALDEKLPLHHIGRALFHLNQRRGFKSNRKTDKRDNDQGKIAEGISRLKAEIGNAGARTFGEYLHRRRLAGRWVRVRPSRMPGKDDKPEDGYGFYPERSLLRDEFDAIWMAQAVHYPDMLTQERRQHLETVIFYQRPLKPVQVGHCSFNPAEKRLPRAHPLFQEFRLYKEVNELAIVDRAQHAEKLTIEQRDALVTQLKAQREASFSALRKTARAPTGTRFNKETESRSKMKGDEVAAELSAKTRFGQPWFSLPLDERWAIVDMLRTIEDPLELTAWLEQNYTLLPERIDAILAARLPEGYGRLGETALTEMLAELKADVIPEAEAAKRVGYDHALLTRGGGHDELPKYQEVIARRIPPGTEAPDDPYDVRKGRITNPTVHIGLNQLRRVLNALICRYGKPEQIAIELARELKLNEEQKREKNIEIARNTRAAEQRSAKLVDLGVPDTGYNRVLLKLWEELDLRAPENRVCIYCGEAIGIGTLFSSAVDIDHILPWSKTLDDSQANRIVCHVACNRQKANHAPADVPQWQTRYDDILERASRLPLNKRWRFGRDATKKFADEETFLARQLTDTQYLSRLAHEYMAALYPDEEPDAWGELTRKNHVRVITGRMTEMLRRQWGLNSILADHNQKNRNDHRHHAIDAAVVGVTTRALLQRIATAAGSREALALEETIGRIDPPWSTFREDLGAAIDRIVVSHKPDHGTLPRPGKMGQTVGQLHNDTAYGLTDEIDERGNPIVVRRKPFLSLTDKDIPNIRDVELRTRLRAATSGNKDFATALLTFKQNDLKFSGIRHVRVTEGLKVIPIRDAAGHAYKGYKGDANYRYDVWEMPDGKWIAKVVTLFDAHQSGFDWSSLRPHPAARRVLFLQQGDMVAYDHPRDGETIGIVVKFGQNGQITLVPHTASGDLKRRDALPNTEEEAIARNIRDRNGDPVFDPFKYFAPTAGGLKKINLRKLHVDEIGIVRHLKRRGGEG

SEQ ID NO: 7342 - protein, 723 aa, synthetic construct
  REGION 1..723: note = Synthetic
MVRVYGPAWRDLSCDNQWALVRRLKDEEDESALREFLVKEKGFEPDVADALVNARLPEGHGRIGPTATAAILERLSNEVDADGAVIAESQAVSLCGWHHSDRRTGEVLGELPYYGEILAHNIPPGSQDPDDDDAERYGRITNPTVHIGLGQLRRVLNALIKRYGRPHDIVVELARDLKLSEDQKRQVNAANRRNRDEAERRGTRLDEIGVRNSGANRALLKTWEELHPDPKARVCIYTGAPIGVRMLFDASTDIDHILPVRETLDDSQANRLVCMAAANRRKGNRSPFDAFGSTPEWEAILDRAQSLPPNKRWRFAPDAMTRFGSEQGFLARQLTDTQYLSRLARSYLEALYPEKGAGSQRVRVIPGRLTEMMRRNWGLNQLLSDHNYADVTKQKNRLDHRHHMIDAFVIALTDQSLLQRVAIAAAQADEEGRDNIFRDLPEPWPGFRGDLETVLNRVTISHKPDHGSRASEGQRARGDDTTSGQLHNDTAYGLTGETDSKGNAIVVRRVPLLSLTSDAKIAAVRDDHLRNELEKAVDDTSGKAREEALRRFAKEHPIYRGIRHVRVLEGLKTVKITDKDGRAYKGYKGDANYRYDVWRLPDGKWQHDVLTMFEAHQPDFDPEARRPHPAAKRILKLHQNDLVALDHPQLGECICRVVKFTRNGQLTLARHTEAGNLKKRDADPDDPFKYYAPSAGGLKKANARQVRIDELGKVWDPGPLERG

SEQ ID NO: 7343 - protein, 1086 aa, synthetic construct
  REGION 1..1086: note = Synthetic
IGTNSIGWAVLALDGNGDPVRIADAGVRIFSDGRDPKSKASLAEARRMARAMSRRRDRTLRRKRATLRTLAEIGLMPDTSSARQALLRETSDPKSSSGLLSRNPYALRALALEEKLPLFHIGRALYHLGQRRGFKSNRKTDRKDNDKGKIALGIEELHAAMRQDGAQTYGQWLARRHALGQTVRLRSGALDLEGEGYAFYPERQLLEDEFHRIWEAQARHYPDILTPERRDHLFTVMFFQRPLKKPKVGKCSFNNHEERLSKAHPLFQEFRLYKEVNELEIVEPDLSHKKLTLDQRNALVKKLQVSREASFAALRKVLKLRPDQRLNKESESRTKLKGNEVYAVLSDQTRFGPRWGTFSQVEQWAIIERLKEEEDPVRLFAWLRSAFGIEGEQAAAIANVHLPEGHGRLGKTALEAMLEELKAEVITEAEAAKRCSYDHARLGGGSDEGEDELPPYQEILQHRIPPGTNNPDDPYDIEKGRFTNPTVHIALNQLRHVMNALIRRYGKPAQIAVELARDLKLSERQKEEVNRTIARNTRDAERRGKTLEENGIPNTGYNRTLLRLWEDLNPAKVEDRCCIYTGKPISISMLFSGEVDIDHILPWSRTLDDSHGNKLLCLREANRVKRNRAPADVTEWRDRYDEILSRAARLPRNKQERFAPDAMERFEKAGGFLARQLTDTQYLSRMALEYLACLFPAEEAGEAGELKRRNHIRISPGRLTEMLRRNWGLNSILADSQLGETAQEKNRKDHRHHAIDAIVIGVTSRSLLNRISNAAGRLEAQQLETLVKAAAATNKPWDGFREDVAKVVGGIIVSHKPDHGTAGRKAKDPARQQTAGRLHNDTAYGLTGETDARGNTIVVRRKPFLSLTSKDIPSIRDEALRAVLEQALRGIPDGKAFQAALDAFRKQKGFHHYHGIRHVRLTEPLSVIGIKDRDGRVYKGYKGDANQRYDVWETLDGKWHAEVVSMFDAHQPGWQSRFHAENPTARRVLRLQQDDMVAFEHPRDGYTIARVVKFGLSGQITLAAHAESGDLKRRDALADDPFKYYSPTAGGLLKVQCRQIRVDAAGKVSDPGPQDRASRLQRQSKR

SEQ ID NO: 7344 - protein, 1053 aa, synthetic construct
  REGION 1..1053: note = Synthetic
MRRRRDRYLSRRAALLRVLTDYGLMPADEDARRQLVMETNDGKSKDGGPKAPGKPGDISTSVHGLRARALTERLMPHQIGRLLFSLNQRRGFKSNRKTDRRDNDQARSRPASTDSPTRCGWLAPRPSASSCMAGGWKANPSAPGCVRKTGENAKGDGYDFYPSRAELEHEFDLVCEAQAVHHPELLDDERVAHLRSIIFYQRPLKPVIAGRCSYNQHEARLPKAHPLFQTFRLYKEVNELALVGEDQQARKLSVDQRDALIRKLRSAKTATFLSLRRTLKLGSEFRFNKESETRTGLLGDEIHVSMSDPKCFGSRWLQFSVDRQWEILSRLREEEDSLELHKWLTEGCGLSDDQAKAAARVQLPDGFGRLGATALEVLTDALERETCDDGTVITEAEAARRCGYNHSDKSDPNFPGHDLLPNYQEVLEWHIPPGTGNPDDVYDVFRGRITNPSVHIAMNQLRRVVNALIRRYGKPDRIAIELGRELKLSDKQKGEIDRTIRKNTQDAAKRSAKIEELRASEPRLSMLSDNGYNRLRLKLWEELNKDQAENRVCIYCGKPIATRLIFDQTQVDIDHILPYSKTLDDGEGNKILCHTHCNRQKRNRAPVDVGEWSGRYDDILARAGMLPKNKRWRFARDAMEKFADEEGFLARQLTDMQYGARMALTYLASLYPTEEADAEGVLRRHSRVRALPGRMTEMLRRRWGLNELLPDHDIAGSDTVKEKNRKDHRHHAIDACVIACTSRSLIQKIATASAALEREGAERVVAALSDPWPGFREELRAKVNAAVVSHRPDHGTVSRAGYDMGKGQTAGKLHNDTAYGLTGERDDRGNDLVVSRRPLSAFRAAKDFVGIRDRQLREALQEATYGLAGRDFEQAVHKMARQERLGGKDNPFRNLRRIRVVEPLKTIPIRDKTGKAYKGYKGDSNHRYDVWRLPDGKWVAEVVTTFDAHQSSWQSAIRQRYPTAKKILSLNQDDAVAADGDDGRIIYRVVKFNASGQIYFAPHNEAGALKARDTDPNDPFKYVSKAASGLRAINARQVRIDEIGQVFDPGPRS

SEQ ID NO: 7345 - protein, 1083 aa, synthetic construct
  REGION 1..1083: note = Synthetic
MLDRTHFSFDMGTNSIGWAVFGLDADGNPNRIIDSGVRIFSDGREPKSGTSLAEGRRVARGMARRRDRYKRRRKAVLRVLAEYGLMPDTPEARRRLVAETNDRKSGVPQDVYALRARALDEKLPLFHVGRALFHLNQRRGFKSNRKTDSRDNESGKIATGIAELDKQLAGRTLGQYLFEKRGTDRQDHGRVRVRPEPRVNEKGKEVEVYGFYPQRAMLEKEFNAIWAAQALHYPDVLTEERREHLFRVMFYQRPLKPALVGKCSFNPAEPRIAKAHPLFQTFRLYKEVNELRIVTQTNSQGIPLTLEQRDLLVTLLRTVKESSYKALLGKIVKGQPDARFNKASDARDKMKGDEVAAEMSHKTRFGQQWFALDETGQWAVIEKLRETDDPLELNAWLEAEFGFEPERRDAVASARLPEGYGRLGETALRSMLDELKADVISEAEAAKRAGYDHALARLGKGLECLPNYQEVLERRIPPGTGEPDDPYDIRMGRITNPTVHIALNQLRRVVNALIRKYGKPGQIAIELARDLKLSEEQKREVNARIAKNTRDAQRRAEKLLETGVENNGYNRALLRFWEELGEQPVNRVCVYCGGAIGIETLFSGVVDIDHILPWSRTLDDSRANRILVHNTCNRLKRNFAPFDVPEWKATYPEILERAAKLHHSKRWRFAPDAWERFDGEESFLARQLTDTQYLARLAHEYLASLYSDEESDEWGVFSRRNHVRVVPGRLTEMLRRAWGLNSVLADHNQKNRNDHRHHAIDAIVVGVTTRAMLQRISHEAARGADVGSEDALRRFDPPWEDFREDVQAAVGRITVSHRPDHGTLPSKDKPGSTAGQLHNDTAYGLTGEDRNGVPIVVRRKPFLSLEPRDLPSIRDDQLRDYLEHETYGLTGKDFTEALQRIKDRDPKYKGIRRVRVTEVLNVIPITDSSGKPYKAYKGDANFRYDVWELPNGRWVHEVVSMYEAHRSDWTSKIHAENPAARRVLSLKQNDLVAYEHPETGLTYGRVVKFGQSGQMTFAAHNEAGPLKARDADRDDPFKYFYKSAGAMKDIGLRQIRVDEIGQVFDPGPQDRASRKARAQGPLR

SEQ ID NO: 7346 - protein, 1076 aa, synthetic construct
  REGION 1..1076: note = Synthetic
MRYRLALDIGTNSIGWWIYELNAENEPVRSVDGGVRIFPDGRDPQSRKSLAEDRRLARGARRRRDRFVRRRNALMRALMEYGLMPADESARKELEKLDPFELRARALNEPLPPHHLGRALFHLNQRRGFKSNRKTDSRDNEAGAIRTGIARLEHKMMEEGARTFGEFLHKRRQRGESVRARLRPETQGKGNGYDFYPDRKLLEAEFDAIWQAQAKYHPEVLTEEARDHIRRIIFYQRPLKPPRVGKCTFNEHEERLPKAHPLFQQLRLYQEVNHLEVQQPDGSFRKLTRDERDKLILYLNTRKDAPFKTLRERVLKLPEFTRFNKETENRRKLPGNEVNAALANKKAFGPQWTAKSWQEQWAIIERILNEEDPDALIDWLIEEQGLSEEQAEHVAFKVSLPKGHGRLGLTASLHILEALKEDVITYGEAVGCVYGHGAHSEFATGEVFEELPYYGHILSRHIPPGTGDANDPEELRVGRITNPTVHIGLGQLRRLVNTLIRRYGKPAEIVVELARELKMNDEQIREYNRRLKKNTEEAEHRRQLMREAEEITHQKIEPTPRNHLLLRLWLELEECGKRARRCVYTGQNISLSMLFSGAVDIDHILPYAKTLDDSVANKIVCLREANQEKRDRPPYEAWGHTEKWEGIAERAKGLPANKRWRFAPDALERFRGNHEDFLARQLNETQYLARMARLYLAALYPVKLAQAPVWVTPGRLTALLRRRWGLNSILRGDNLPEEQQAKARDDHRHHALDAAVIGLTSRGLLNRISREAGRLEAQGLEDYVWQSIPAEPWPGFREEVARIVRRMIVSHRPRHKTIDFSLRRVGRDQTAGQLHEETAYGLTGERTQRGDPIVVYRVPLTSLKPKDIELVRDPDLRDALWNHTRDLSGKEYEKALAEFPTLDKVDGKDNPWKGIRRVRITRALNVIPIRDRRTGQPYKAYKGGSNYRYDLWELPNGKWEAEVISMFDAHQPGWKSELKRKYPTARKLMRIFQNDMCAWEQDGKTVYGRVVKFTKNGQITLAPHNEANVDARNRDASDPFKFISPAPAGLKNMKFRLVKVDETGRVFDPGPWYDRR

SEQ ID NO: 7347 - protein, 1080 aa, synthetic construct
  REGION 1..1080: note = Synthetic
MAKSFAFDMGTNSIGWAVLGLDSAGDPDSIEGAGVRIFSDGREPKSGASLAEGRRIARGMSRRRERYKARRKALIRTLGDYGLMPLERAARRALVAETNDRSFGLVAQDVYALRARALVEKLPPYHLGRALFHLNQRRGFKSNRKTDGRDNELGMIATGIAALDAQLNGRTLGQYLHEMRGADPRQRGQVRVRPHLEINDKGREIAAYGFYPQRAMLEREFNAIWAAQAPHHPELLSEERRAHLFQVIFYQRPLKQPDPGRCSFNPAEPRLAKAHPLFQRFRLVKEINELRIVTGSNSQGVPLTLEQRDILLTLLRDKKASSFKTLLAKIIKGQPEARFNKASDSRDKMKGDELAATMSDKTRFGQAWFAMPEAEQWRIIAKLRDIDDPLELNAWLESEYGLAPERRDAVANALLPQGYGRLGETALRTMLDYLEAAVISEAEAAAQAGYDHALARRGAGLDQLPKYQEVLGRRIPPGSGEPNDPYDIRMGRISNPTVHIALNQLRRVVNALIRKYGKPAEIAIELARDLKLSEEQKREVNATIAKNTRDAERRAVRLADEGIDNTGHNRALLRFWEELAADPLDRVCVYCGGGIGAASLFNGSVDIDHILPWSRTLDDSRANRILVHNSCNRLKRNFAPFEVPEWREIYQDILVRAAKLPANKSWRFAPDAMDRFEGEKDFLARQLTDTQYLARMAHEYLAALYPDEEPDEWGVFARGNHVRVVPGRLTEMLRRAWGLNAILSDDNRKNRNDHRHHAIDAVVVGVTTRDMLNKISQAAGRGADMGAADALRRFDPPWPSFHQAVRAAVERILVSHRADHGTLPGTDGQGSTAGQLHNDTAYGLTGETRKGLAVVVRRKPYLSLEPRDIETIRDPQLRDHLATETYGLAGAEFTAALKRLQQTDKFYAGIRRVRVTEALSVIPIRDATGHAYKAYKGDANFRYDVWELPNGKWVPEVISMFDAHDRGWVSQVHAANPAARRVLSLRQNDMVAYQHPEQGLVYGRVVKFGQSGQMTFAAHHEGGSLKSRDADRDDPFKYFYKSAGTMKDIGLRQIRVDEIGRVQDPGPQDRDSKRVRKSDR

SEQ ID NO: 7348 - protein, 1095 aa, synthetic construct
  REGION 1..1095: note = Synthetic
LTKYLFSFDLGTNSNGWCIFRLDGDGAPVAIIDAGVRIFSDGREPKSGNSLAEGRRVARGMARRRDRYKRRRKAVLRTLSEYGLMPADPKARAALVAETQDAKEGEQANDVYALRARALDEKLPLHHIGRALFHLQQRRGFKSNRKTDRKDNDKGAIALGADRLVLEMREDNARTLGEFLAKRRGHDPSARGNVRVRIDIDTNDEPAKDGKPTKPGYNFYPQRAMLEHEFECIWNAQAAYWPDVLTDERKAHLFRVMFYQRPLKAPIVGRCSFNPSEQRLAKAHPLFQAFRLYKEVNELGLVMPDESERKLTLDERNALITKLRGVRSASFGALRKTLKLSERGARFNKEGEARDKLLGDEIYSVLSDKAIFGNRWAKLSMERQWEIIEKLREEPDPFALHTWLVENAGLSEEQAREAADVSLPEGYGRLGPTALAAMLEELKAEVITEAEAAKRAGYDHALARVGEAVDLLPRYQDILERRIPPGTNDPDDDYDIRKGRITNPTVHIALNQLRAVTNRLIARYGKPERIHIELARELNQSEEQKREATSRNAKNRREAERRSAILKEFGQPDNGFNRQLLKQWEELNPENPLERRCIYSGTVITPTMLFSGAVDIDHILPWSRTLDDSQANRLLCTREANREKRNHAPAEVPQWTDRYDDILARAQRLPLNKRWRFGHDAMARLEKDRDFLDRQLTDTQYLARLAHDYLGSLYPDEEPDGDGVVGRRNHVVVVTGRMTEMLRRRWGLNGILPDHNFADPTKAKNRKDHRHHAVDAAVIGTISRSLLKRIADAAREGENQGAEDVIRTIQPPWPSFREDLKAVVDRIIVSHKPDHGTLPKPGERGHTAGQLHNDTAYGLAKDDDGNPIAVHRKPFLALEPKDLPFIRDPQLRGWLEANTAKLSGKDFTARLMKLRKLDGHPFKRIRRVRMVERLALIPIYDATGRAYKGYKGDANFRYDVWEMPDGKWRHDVVTMFDAHRPDMDWQARRPHPAARKVLSLKQNDMVAYEQPSVGFVIGRVVKFNTAGQIYFASHLEAGALKARDADPDDPFKYFSKSANGLRDVKARQVRVDEAGRVFDPGPRDRSSHGQKAQPG

SEQ ID NO: 7349 - protein, 1107 aa, synthetic construct
  REGION 1..1107: note = Synthetic
LFSFDLGTNSIGWWVYELDPTGEPSASKDGGVRIFSDGREPKSGNSLAEGRRVARGMARRRDRYKRRRKAVLRTLSEYGLMPADPKARAALVAETGDAKEGQQASDVYTLRARALDTRLPLHHIGRALFHLQQRRGFKSNRKADRKANDNDKGAIALGADRLIFEMREDGARTLGEFLAKRRGHDPSARGNVRVRIDIDSGDQTTDDGKPAKPGYNFYPQRAMLEHEFNCIWDAQAAHWPDVLTDARKAHLFRVMFYQRPLKAPIVGRCSFNPSEQRLAKAHPLFQAFRLYKEVNELEIVMPDQSHRKLTLDERNALIAKLRSVKSAGFPALHRTLKLSERGARFNKEGEARDKLLGDEIYSALADKTIFGGRWAKLSVERQWEIVEKLREEADPFALHQWLVEHAGLSDDEAVKAADVKLPEGYGRLGPTALKAMLEELKAEVITEAEAAKRAGYDHVLARVGDAVDVLPRYQDILERRIPPGTNDPDDDYDIRKGRITNPTVHIALNQLRAVTNRLIARYGKPERIHIELARELNQSEEQKRKATSENAKNRREAERRSAILKEFGQPDNGHNRQLLKQWEELNPENPLDRRCIYSGTVITPAMLFSGAVDIDHILPWSRTLDDSQANRLLCTREANREKRNYAPAEVPQWTDRYDDILARAQRLPPNKRWRFAHDAMARFAKDRDFLDRQLTDTQYLARLAHDYLGALYPDEEPDGDGVVKRRNHVVVVTGRMTEMLRRKWGLNGILPDHNFADPTKAKNRKDHRHHAVDAAVIGTISRSLLKRIADAAREGEAQGAEDAIRAIQPPWPSFRDDLKAVVDRIIVSHKPDHGTLPKPGDRGRTAGRLHNDTAYGLAKDDDGNPIAVHRKPFLSLEPKDLPSIRDPQLREWLEANTKGLSGKDFTARLMKLRKDGDNRRARRKKPGRYSGSPFQRIRRVRVVERLALIPIHDATGRAYKGYKGDANFRYDVWEMPDGKWQADVVTMFDAHRPDIDWQARRPHPAARKVLSLKQNDMVAYEQPGVGFAIGRVVKFNTAGQIYFAGHLEAGALKARDADPDDPFKYFSKSANGLRDVKARQIRVDEAGRMSDPGPRDRSSRGRKAPPG

SEQ ID NO: 7350 - protein, 1065 aa, synthetic construct
  REGION 1..1065: note = Synthetic
MTYRLGIDLGTNSLGWCALDLASDGTPAGVRDGGVRIFSDGREAKTGASLAADRRNARAVRRRRDRYLRRRTVLLEEMTRHGLMPTDEADRKALELIDPYHIRAIALDQMVPVHFLGRALFHLNQRRGFKSNRKATRAADDADLGVVAKGNENLDAAMQAACARTYGEYLARRHALDPGDHSAAARRTRIRRDEGDQDYAFYPARRHLEDEFTALWRAQQPHHPNILTEEARARLYAIIFYQRPLKSPPVSRCTYTDERRMAKAHPLFQRLRLVKEVNELTINEIGEAPRPLTLEQRDKILRAWRTPTETKRSMTWGALRKAAGLPRSSRFEGEDRRGKGLVGDEVEAELVKLYGPGWRALSPDGQWRIIERLKEEPDEAALLAFLRTYVGLDDARARAVARVRLPDGYGRIGATAAARILAELEAAVIPESEAAARCGWHHNDHRTGRVWEALPYYGQILDRQIPPGTQDPDDSPEDCYGRITSPTVHVGLGQLRRVINVILTRHGPPHEIVMELARDLKLSGDEKAEINRAIRRNTAAAIRRGTMLEELGISNTGGNRVILQFWEDLHPDPKARVCIYTGLPISIEMLFTGETDIDHILPIGLTLDDSNANKLLCIAAAKRGKANRAPFDAFGTGAEWEAILTRAQNLPHNKRWRFAPDALTRFGDGSGLIARQLTDTQYLSRMAKEYLSALYPDSQEGSQHVRVIPGRLTEMLRRNWGLNSLLHDHNYTQTAKRKNRLDHRHHLIDAFVTALTDQSLMQKVACAAGRNDELGMVHIFKDMPEPWPGFREELKALLDRTVVSHKPDHGSIASAADRAKGRDRTAGQLHNDTAYGLTGESDEKGNAIVVRRVPLLSLDNDEKIAAVRDDHLRGELMQALAGKSGQEREAALRRFAKEHPVYRDTRRVRVTEPLKTVNIRDHDGRAYKGYKGDANYRYDVWRMPDGKWSAKVVTMFEAHQTSAGQGLEWRPHPAAKRVMRLHQHDMVAIDHPQHGECICRVVKFTEKGQITFARHNEAGALKRRDSDPDDPFKYFSPTTGGLKKARARQIRIDETGRVWDPGPHD

SEQ ID NO: 7351 - protein, 1100 aa, synthetic construct
  REGION 1..1100: note = Synthetic
MVQTIRTLGIDLGTNSLGWCFVETIGEPGQTPEGRIVGIGVRIFSQAEMAGRDPQSKTSLAVARREARAMRRRRDRYLSRRSALLRTLTEFGLMPADEVARQKLLASTGDGQYGALDNSVHGLRARALDAPLYAHQIGRVLFQLNQRRGFKSNRKTDRKDNEAGKIAIGVSRLGRAMSETDSRTYGEFLFKRRKDGNSVRTRLRPETGDDSNGEGYDYYPSRAALEAEFDAICEKQAEFHPALLTPERIGLLRDIMFFQRPLKAPKPGKCSYNPAEERMPKAHPLFQSFRLYKEVNELEVIGEDQTSRKLKPDQRDALAMELRSKKSATFSVLRKRLRLPQGTRFNKESENRTKLVGDEVHASLADQSAFGNRWVEFPIERQWEILSRLRNEEDRDVLVNWLVDHCGLHADEARFVADINLPEGYGRLGESALMALLDALKNETDDSGFVITEAEAAIRVYGRTNSEDDPNRGGLDFLPNYQEVLERHIPPGSGDPDDPYDDFKGRITNPTVHIALNQLRRVVNAIIRRHGRPDRIAIELGRELKLNEKQREAINRDIGKNTREAQARSDKLKELGQPDTGYNRMRLKLWEELNPKEPLNRVCVYSGEPISIGMLFSDEVDVDHILPYSRTLDDGQSNRILCKAHANRQKRNRAPADVPEWSSRYDAILTRAGNLPRNKQWRFAVNAMEKFSDEEGFMARQLTDTQYVSRMALSYLAALYPAEEADIQGVLRRHNHVRALPGRMTELLRRKWELNQLLPDHNYSDPVKQKNRLDHRHHAIDAAVIACTSRALIQKLATASAAEEERGTERVIADVEMPWPSFRDELREAIASTVVSHKPDHGTVSRSGLATGKGQTAGKLHNDTAYGLTGEKDNKGNDLVVRRKPIGGFKKPSDLHAIRDRQLRETLWEETRGLSGKEFEQALLRFSRQPKLNGKPNPFRNLRHVRIVEPLQTIHVRDKSGRAYKGYKGDSNHRYDVWRLLDGKWLAEVVSTFDAHQPGWSSNVRLQHPTARKILSLHQNDIIAIDRDGARQLMRVVKFGANGQVTLAALHEAGTLKTRDADESDPFKYNSPTAGGLKKLKARQVRVDELGTVFDPGPRD

SEQ ID NO: 7352 - protein, 1076 aa, synthetic construct
  REGION 1..1076: note = Synthetic
LYSSCIVLQYAYLAIPLFFISPPYRNSLKYRLGLDLGTNSIGWCMLRLNSDNEPTAVIKSGVRIFHDGRNEKTKEPLAVVRRNARSIRRNLDRKISRRNHLLNTLIKYSILPSDENERKALAVLNPYELRSRAANEKIELFELGRSLMHLSKRRGFKSNRKVDKEESSGKIKPAIERLKNKMQETDKKTAGEYLYFLLQNGQSVRARLGKIDGKEGYEIYLDRSIIEEEYNIIMNEQKKYHKELTDDILNEIFNIIFYQRQLKPQKVGKCSLVPEETKLRKAHVLAQSFILLQKVQDLRVFDNNMLEFRPLNNDEKEILKRELKVKKEISYENIRKLLKKYYENGKYGMFSHETTDGKLQGNKTNAIMSSKDIIGDIWNRLSPEVQYDIIEELYSDKDNDELSKLYSEKFKLNESQIQGLLNKAVYKLDSGYIRYGKTAVEKLNSIMDKDNLDLHYAREKAGFGKENIPAASEFLEYYGKVLPNSVIDPQIENPKNDEEIYGKIANPTAHAALNQLRKLVNELIKLYGKPEQIVIELARDLKNSRKAKDLIKKKIAENKKLNEEVDKIIQEYSETHHTQIVKNKLNRDKVKLWLELSKDVLERKCIYTGEQISISKLFSDDVQIEHIIPYSKTLDDSMNNKTLSMKKANYYKGNKTPYEAFKDSKDGYNYDDILARAKLLNNNSKFKRFTKDAMDIYNKDGKDFIARQLADTQYLSKLALSYLQSLYAEDKYSSLWTIPGQLTALIRNYLGLNTLISEDDSKNRSDHRHHAVDAFVVAITSRSLLQKISYAASLQEDLDNRNLSSYRNKLLEKMPEPFPNYRKSLQLSINNIKTSHKADRSISGKLHEDTAYGIVEDNDKYNVVTRWTLDKFKEKKHFEMIRDNELKEIACSDNELFKKIIETRKIKSIRKLASENPVITIKDKSGRDYKAFAGGNNICVEIYEADGVRKSEVIQLFDAAQKDFKPAWMNKYPNGKLLMRLFKGDVIGFIDKEKGRNKVYYVVQQIRQKANDLGLILLNSTGYVKENGKEKEIKKCIYIGFNKLFNKYNAKQFNISITGIVSKKKTADINFWKNRK

SEQ ID NO: 7353 - protein, 1044 aa, synthetic construct
  REGION 1..1044: note = Synthetic
MAEKKFKYRLGLDLGTNSIGWCMLRLNKDNEPAAVIKSGVRIFHDGRNEKTKEPLAVVRRNARSIRRNLDRKISRRNHLLNTLVKYFLLPSNEIERKALAVLNPYELRSRAVNERLELFELGRLLMHLSKRRGFKSNRKVDKEDSSGKIKPAIERLKNKMQETNKKTAGEYLYSLMQNGKPVRARLGRIDGSNGYEIYLDRALIEEEYNLIMNEQKKHHKELTDDIINEIFNIIFYQRPLKKQIIGKCSLTGEDTKLKKAHVLAQDFILLQKVQDLRVFDDNQLEFRPLSNDEKDIIKRELRKKKEVSYENIRKLLKKYYENVKYGMFSHETLYKKLQGNKTNALMSDKEIIGDSWYSLSPEVQYDIIEELYSDKDNDELSKLYSEKFNLNESQINGLLNKAIYRLDSGYIRYGKTAVTNLNSIMDKDNLNLHDAREEAGYEKENKQDASEYLEYYGKVLPDSVVDPQIENPKNDEERYGKIANPTVHAALNQLRKLVNELIKLYGKPEQIVIELARDLKNSRKAKDVINKKIAENRKLNEEVDKTLQEYSEKYNTHIVKNKLNRDKVKLWRELGKDPLERKCIYTGEQINIAKLFSDEVQIEHIVPYSKTLDDSFNNKTLSMKQANYYKGNKTPYEAFKDSKDGYNYDDIIARAKLLNNDNKFKRFTKDAMDIYNRDGKDFIARQLSDTQYLSTRALIYLQSLYEKAHHSSIWTIPGQLTALIRNYLGLNTLISNDKNKNRNDHRHHAVDAFVVAVTSRSLLQKISYAASLQEDLDNRNVSSYRNKLLEKMPEPFPNYRKSLELAIDNIKTSHKADRSISGKLHEDTAYGIVENDDKYNVVTRWTVDKFKEQKHFETIRDNELKEIACSDKELFAKIVETRKIKSIRKLAKENPVIKIKDKSGRDYKAFAGGNNICVEIYEVDGVRKSEVIQLFDAAQKGFMPEWMKKYPNGKLLMRLFKGDVIGFIENRKYNYYTIKGISIADQNLKLLAINKAEGIFKKGLNILFDSNNKNSLNAKQFNISVTGIVTKKKTADVNFWKNRK

SEQ ID NO: 7354 - protein, 1467 aa, synthetic construct
  REGION 1..1467: note = Synthetic
MGQILGLDLGTNSIGWSIRNTDLSENEIEKFGVVTFEKGVGNGKTGEFSFAAERTKHRAGRRLNQARKYRLWATLEVLIKFGYCPMTIEQLDKWRKYDKETKRAYPHIEIFEQWIRLDFNNDGKPDYFSPYQLRAELVETKLDLTIESNRFKIGRAFYHIAQRRGFKSSRKDAQATDTSEGKEAKSELKKNDEFEKELQKQFEKSLSDFKTIGCALHFIETQKQRVRLNWIQHTFRKQYKEEITTIFEFQNIGIESDFYKNLVENKKNRFNGAIFFQRPLRSQKGLVGICSLENSFFIDKKTGKAIQTGKPRCPINHPEFEEFRALSLLNNIQYKQDGVWYLLTTELKQEIYDTLFFRKSKTNFHFEDIRKKMEKSLNLKLDYKAKTINYNDKTNVSACPISASLKEIFGENWKEYKKETTTTRITINKKAETKIHSISYNVHDIWHVLFSFEDDEIVKEFAIEKLNLDLELTDKFVATWKRLQDGYAMLSLNAIEKINVFLRQGFIYSEAVMLANMPSILGKDLWMENSKLLTTSMKTLIEQNQYEKRVRNIVNILISKYKALPDNEQFAFRNTDYKLDESDKKEILQTIIGSIGEKTWEKADETYKSMVLDEVTYFYQSFFQNSKREFYILPRVSDTIALFIKQKFPEISNKKLQTLYHPSMIEIYPSAKRNEDGKIYLQSPKTGSFKNPMAMRTLHELRKLINYLIKTGQIDEETRIVVETARELNDANKRWAIEAYQKQREAENNEFKAALKELFNNGTNTNPENSEDIDKVRLWYEQLENNNPVQKGKGEYAQQKWENNTTELIQESYAKKTDIEKYRLWKEQQCVCMYTGKMISLTDLFDENKVDFEHTIPRSISFDNSLANLTVCYAQYNRQIKGNMIPTQLPNYEQEWSGYQAIKPRLKAWEGKVQQLKTNIEFWKGKSKSASDKNYKDDAIRQRHLWQMELDYWQNKLNRFTMIEVTSGFKNSQLIDTQLISKYALHYLKTAFNRVDVQKGNITADFRKILGIQEMYVKKSRDKHSHHAIDATVLTMIPTAAKRDEILQIFYEYLENKQLQKNDIASQIKERLSYKLKQLNLPNIEYILNKIEETILINNSAKDQTLTPGKKIVRRRGKVVYLRDKQGDLIKDVNGNLIPKIAQGDCIRGELHKDTNLGAIKLPYKDANGDYLIKDGKFVINDEIIYVVREPFVFKKDAQSPGFKTLEEIENCIVNKDLFENIIKKQIEGKSFKDAMNDGIFMLNKYGEKVNQIRRIRIFVRDKAPLKIKKQTYLSQKENINLSNKEYKQYVYAANGENYAYALYQGIINGKIVRGFRLFNLFDIAGMLSISENHKLDVVSEIDYNKKGDKLNLYATLKIGQKVLFYKRKEYIQELDLNELSKRLYIINGFEKDGRIRFSFHLDSRTDKQLKELESTYGKGIWQGFSFVNYENPWPKLKLSIGNIDCLFENYDFKINPDGEITFIQQL

SEQ ID NO: 7355 - protein, 1449 aa, synthetic construct
  REGION 1..1449: note = Synthetic
MSKTIAYDLGTNSIGWSIREDQKEGNQILNAGVITFNKGVGEEKNIEYSLAASRTGRRSLRRRYQSHKYKLWSTLEILITSGYCPMTIEELDLWRKYTKGIGRKYPVNAVLFNNWIKLDFNNDGKPDYTSPYELRSELINQNLDFTLEENRHKLGRVLYHIAQHRAFKSSKKVQSDDSKEVKKEIIDEEYIGAEAPKVAAFTKFILSLGIEIKETVGATFYDAETKGIRIRENLQQYVVRKQLQQEIKSIFDFQVLSFDALFGKEIAKSSIFWNRPLRSQKGTIGKCTLEPNKYRCPVSHPEFEVFRAWSFLNNIKFRNKQENDSQWTKLPLEIKEAIYQKLFLGRLKADFEFSEIIDFVEKYNQHRNWELNYKAKTNVAASPVSARLQAIFGENWKLFTHNTTKTRINKKGIAHNITYTIEDIWHILFSYDDEEEVERFASENLELNEKQTKSILLLWFKMPVAYGMLSSTAIKNINVFLQKGLIYTEAVLLSKIPSLLKETWANNEDFLISEIGNIIDTNREEKKDIAIVNNLIAKYKSLELEEQFGYKNVQYKLDLSDKNDVLDTCIENYGAKTWEGLDEKIKELRIKKINDFYQKFFSNSKRDYFKSPHLLDTLKRFLDDNFNLPKNELNKLYHPSQIEIYPPAKEQYYKHLDQSLTLLDRPDKTGAFKNPMAMRTLFELRKLTNYLIITGQIEQETRVVVEVARELNDANMRWAIETYQNRRREENKEFALAIVEILEEFPNSKANPESNEDIDKFRLWLEQIEDDTTNDGKSEYTKYEWANTKSKVYKAVSSAKEMIDKYRLWREQSCKCMYTGRPINMFDLFSENNTDFEHTIPRSISFDNSLANLTVCDFAYNRTIKKNKLPTSLENYENDTTINGKYYTAIKPRLIDWEKKVESIKNNIEFWKKKSKQASDKEFKDKAIRQKHLWKMDLDYWQNKIHRFTTEEVTIGFKNSQLVDTQLISKYAFHYLKTVFNKVEVQKGSITAEFRKIFGVQDPNEKKSRDSHSHHAKDAAILTLIPSANKREEILKKAYSYYESNYKQYTETPYKGFSRNHIDEINDNTLINNIANDQRLIPANKKVRASAKIVYFKDNNGNKIKDEEGNPISKYAKGDSIRGQLHKETFLGAVKLLKKDENGKAIRNENGNFILDDTKYVTRKSLVYKKNNDSPGFSKLEEIEKCIVDKNLFQIIKKQVETAGGFKEALTDGVWMYSTERKDKDGKIVKNAEKINKIRRIRVFTADKNPPIIKKQTHQTEKPIVFLENRDHKQNYYATSGDGYLYLFYEGAVKGKLERDYECYSLLEVSKLNKIKATTLEDLLPKLKTVKNTEIPLRAILKSGQKVFFFKENMDELKELPKNELMKRLYRILYFEKDGLKKDGGIKRDGRIQFKFHSEARQDTKLENAESSLDFENPHPKLRLSKGNFDFAIENKDFTINADGTIKWL

SEQ ID NO: 7356 - protein, 1440 aa, synthetic construct
  REGION 1..1440: note = Synthetic
MSKIIAYDLGTNSIGWSIRDDQKEGNQIINAGVVTFNKGVGEEKNIEYSLAASRTGRRSLRRRYQSHKYKLWSTLEILINNGYCPMSIEQLDQWRKYTKGIGRNYPVNAVLFNNWIKLDFDNDGKPDYTSPYELRNELISQKLDFTLEENKHKLGRALYHIAQHRAFKSSKKVKSDDSKEVKKETTDDDLIGAESKKVETFTKFILSLGIEIKVTIGSTFYDAEKKGIRIRENLQQYVVRKQLQQEVKSIFDFQSLSFDALFGKEISKSAIFWNRPLRSQKGTIGKCTLETTKYRCPVSHPEFEFFRAWSFLNNIKFKNNQENGSQWTKLPLEIKEAIYQKLFLGRLKPDFEFSEIIDFVQKYNQHKKWELNYKAKTNVAASPVSARLQAIFGENWKSFTHNTSKTRINKKGVAHTITYTLEDIWHILFSYDDEDEVERFALENLELNEKQTKNFLLLWFKMPISYGMLSITAIKNINLFLQKGLIYTEAVLLAKIPSLLKETWANNEDFLIGEIGNIIDANRDEKKEIAIINNLIAKYKSLEHGATMFAHNDFGYTLQESDKNDVLQACIENYGNKTWGNLDEKLKDLKVNKITELYQGFFSNSKRDYFKSPHLLDTLKRFLNNNFELSKIELNKLYHPSQIEIYPPAKEKYYKHLEQSLTLLNSPKTGAFKNPMAMRTLFELRKLTNYLIITGQIEQDTRVVVEVARELNDANMRWAIEHYQNRRREENKEFASAIVEILEEFPNSKANPESNEDIDKFRLWLEQIENDTINEGKSEYAKYEWANTKSKVYKAVSSAKEMIDKYRLWKEQSCRCIYTGRMVNMSDLFSENNTDFEHTIPRSISFDNSLANLTVCDFAYNRTVKKNKLPTALENYENDVTINGTYYTAIKPRLIDWENKVESLKNNIEFWKKKSKQASDKDAKDKAIRQKHLWKMDLDYWQNKLNRFTTEEVTTGFKNSQLVDTQLISKYAFHYLKTVFNKVEVQKGSITAEFRKIYGVQDPNEKKSRDSHSHHAKDAAILTLIPTVNKREDILKKAYNYYESNYTQYTESPYKGFTRNHIDEINDTTLINNVVNDQKVTPANKKVRSSGKIVYYKDEDGNNITDNEGKPIAKYAKGDSIRGQLHKETFLGAVKLLKKGEKGKATRDESGKFVLEETKYVTRKPLIFKKNVDSPGFAKLEEIEKCIVDKNLFLVIKKQVETAGGFKEALTDGIWMFSKERKDKDGKIVKNAEKINKIRHIRVFTNDKNPPIIKKQSYQNEKELVFLDNRDHKQNYYATSGDGYLYLFYEGMVKGKLERDYECFSLLQLSKLNKVKATTLEDLLPKTKKVKGIEIPLRAILKSGQKVFFFKEDMDELKDIPKNELMKRLYKTIDFDKDQGRIRFRFHLEARQDKLLGDGMSSIDFENPYPKLRLSKGNFNFAIENEDFIINPDGTIKWKF

SEQ ID NO: 7357 - protein, 1439 aa, synthetic construct
  REGION 1..1439: note = Synthetic
MSKILGLDLGTNSIGWAIRNTVLPENQIEKFGVITFEKGVGEGKSGEFSFAAERTKNRSLRRRYQAHKYKLWTTLEILIINGYCPLSIESLNKWRKYEKGIGRKYPVDDIMFNNWIKLDFNSDGKPDYTSPYQLRLELVTKQFDFSKQEDKFKLGRALYHIAQHRGFKSSKKVQDKEENITEEDYIGAEKKRAKFIEDLSAKHKVTTVGAAFAMEEKQGNRIRKNLHQHVIRKQLQNEVKQIFNFQNLSFIDLFKKEINKSAIFWQRPLRSQKGTIGKCTLEPTKYRCPVSHPSFEEFRALSFLNTIEYKRKDDDETRWEKIPFELRHEIYEEKFFRISVPDFDFLEIRKLIEKHNGHDKWELNYKDKTNVSACPVSARLQDIFGNDWKNFKLETNQIKKIKKKDRIITEHKIVYTLEDVWHVLLSFDDEDDVRDFAVAKLGLTDKAEKFVTLWYKMTVAYSMLSLKAINNILPFLRQGMIYTEAVLLAKMPEIFGEELWKEIEANLTESIGNIIHLNREEKRKLTVANSLIAKYKSLDNILKFADRDFDYTLKNDDRKEVEETAKEAYGNKTWFEKNEEQRNEIISEIAASYQSFFNDKQREFKKLPHLLDTLKSFLRDNFEIDEKKLNKLYHPSQIEIYPPAKEKYYKEYNGHFKLLDSPKTGSFKNPMAMRTLYELRKLINYMLVTDQIDEETGIVVEVARELNDSNMRWAIETHQRRRQEENKEFVNAIIELLKEHPSSKANPDNNDDIDKFRLWFEQMNDETVNDGKNDYSKHEWNNQKSKVYKQIAAATEMIEKYRLWKQQECQCFYTGRMIGMADLFSENNIDFEHTIPRSVSFDNSMANLTVCDFDYNRNVKHNQIPTFLPNYETDVKLNGKSYTAIKPRLEKWEQKIEELKTNIEYWNKKSKQATTKEAKDKAIRQRHLWRFELDYWRNKLLRFTMIEVKSGFKNSQLVDTQIISKYAYHYMRTAFNKVRVQKGSITAEFRKIFNVQPKNEKKDRSKHSHHAKDAAVLTLIPIDTKREEILKKAYVYNERTHQLYHERPYHDFKQSYIEEIEDEILINNIAKDQALTPGQKKVRIRGKKVLLRNKNGEIIKDENGNPKEKWAKGDSIRGQLHLDTFYGAIKKVKRNENLKPLKDEANNFLYEDGLYFVVREEFVYKKNTASPGFKTLDEIKNSIVDPHLYKAIQKQVGQKNLKDAIAAGIYTLDRNGNPVTTDQNGKKINPIRHIRIFVRAKEPLAVKQQTNFSNKEYKNSYWADNAENYAYILYLGKINNVTERKFILLNLFDTSKLHQLNGSKKLEVEAELIANKKGNKLQLHAILKAGQKVLFYKNRNSDELKDLSKTDLMKRLYRIIKFEKDGRIVFGHHLDAKSDNELKALIPIYGKSIFNGFSTINYESPYPKLKLSVGNFDFLVENKHFEVKPDGEIKWLLNI

SEQ ID NO: 7358 - protein, 1058 aa, synthetic construct
  REGION 1..1058: note = Synthetic
MGNRTLGLDLGANSIGWALVDTDENKILAAGVRVFPEGVDNFDTKKEKSKSEARRIARGMRRQIARRSRRKRKLREALVKAKLLPADPAEQQRLEGLDPYHLRRRALDEPLAPYELGRVLIHLNQRRGFLSNRKTDRERKAETKGMLAEISALEGKIKAANCRTLGEYLCQKAETLDHRNRAEDDHVRHRHTLRAMYECEFNAIWDAQQRKNSLLTDELRGRIHRMIFFQRKMYWPASVVGRCELEPTQKRCPRADRLAQWFRLLQEVNNLRYVDPATGDDCRLDEQQRTLLIDKLAQKKELSFNDIRKTLNFSENVTFNLERGKRTKLLGMVTDATLAAKGLFGPAWYKRPETQRDEIVRTLIHADDDEIRRRAISDWGVSPDVAEALVDVDLPSEYLGLSRMALEKLLPHMRHGLLYMTDDDTPSALSEAGYLRRDQIMRPQLDCLPKPPEVTNSVVRQALHEVRKVVNAIIREYGKPDRIHIELARNAKATSEERKRIGEAMREREAVRDDAANKIREHGVKVTRDAIDRYLLWKEQRETCPYSGKPISIAQLLSGTGEIDIDHILPYSRCLDDSMANKVVCFRTANHDKGQETPHEWLAARQPAEFEQLKQHVASLPYNKRKRFTQKTLELDDFIQRQLNDTRYISRAVLEYVRCLVADPHHALCVKGEQTATLRRHWGLNSVLRHDDLDIKNRDDHRHHAVDAIAIALTDQKRLQQLAEMNRRGGEDVTGEIMLDPWDKFRDQVIEVTNRIVVSFRTQRRIAGALHKDFMYGATVKPRSATIDRPWAKTWTEDATTYVRRKKIEELDSTKHIAKVRDSAIRKTLEEYLRVRGIDPSLPQKFSPTVWKDGPTMASGIPIKKVRLLEKGESYHSIRTHTYVELGSNHHMEIVELLNENGDPILNRDGTPQCEGILVSMVEAAERIRDAQRALRTRRQELSHLTLSASKLERSIQVTKRETAERFPVIQRNHGPTRRFIMSLSINDVILLELDNGSTMPHRVQKMSEGSIILRPHTYAGKVSDYDKPPLIQRRTPNTLRGRKVTVDPLGRIRWAND

SEQ ID NO: 7359 - protein, 1010 aa, synthetic construct
  REGION 1..1010: note = Synthetic
MKNRNVIGIDVGTNSIGWALVEENENGLPQSLKAAGVRIFQEAVEAKTRTPKNHKRRQARLARRVLARRARRKQRLQNLLLKHGLLPGGVTDPVQREAAFTTLGDPYQLRAKGLNLPLGLHEFGRVLFQLGARRGFLSNRKTRYGHLNKLDELADLIEAEDAAPKTGDAEEGIIRKEIGELRQAMSAAGSRTLGEYLAGLAKEERKRCRHTERAMLEEEFERLWMVQARFHPELSDELKVQVHTVIFFQRPLKSNRASLGKCSLEPSRRKAARAWPEAQRFRLLQDLNNLEILDPRTGELRRLRDTERAILLNALEQQKSMTWNAVRKKLGLHQGEKFNLETGAKAETGLKGLQTLASLHAILQGWFDELGDKRDLLIEDLITIEDSAGLYRRLREHWGFDRETAFRLATLELEPGYASLSLKAIRKLLPHMGAGHRYSEARQQVGYGYETGQRDLQERLGEPPDPRNPVVDKALHELRRVINALIHRFGRPDVVRVELARDLKLAKRDKERLEKQNRENQRLNRKAEAALAELGLGQPSRDDLIKYRLWEESKGLCPYTGREIGLSTLFSPEVDVEHIIPYSRCLDDSYMNKTLCMTEENRMQKGNRTPWEAYGGDPARYEQILQCARYFPMAKRKRFLEQGSDFVDQFIQRQLNDTRYIAKLAKEYLAAVCTNVQVTKGGTTAMLRHHWGLNRLLGEDDGQKERGDHRHHALDAAVIAVTSRSLYQRLARIAHQRGHAPSQRGFYIDPPWQGYQADLAQTLAGIVVSHATNRKLTGALHEETAYGHIPHVGFVYRKTLNKDFKLGDIEAIYDPSLQELVKAHLEHHGNDPKRAFAEGIQCYHKDGHTPIKRVRIRAKQVSEKGTFSISDRAGRAYKHHKTGSNHHVEILRHRATGKIEPVYLTTKEATERARRGGEPVIQRDHGPEWEFIISLCINDMVRLGEGGQVAYFRVQKIEATNNRVTLRSHLAATLDDEDMKVTTSVPKLAVMPGFQKVLVTAVGEVLELHD

SEQ ID NO: 7360 - protein, 1175 aa, synthetic construct
  REGION 1..1175: note = Synthetic
LKGAYAPCCHRGLRSTHRRAGQMWVQCRTNVLKLGKIVTVGKCLRHLPIVYRDDVRSKEKPRRNRGQGQKTCRMVFIVISSRHESSCYLVQLQIPYEMSRTLGLDIGTNSLGWCLVEDGQGIVAMGSRIFPVGVKEDSYAKSGTEESRNAARRTARGIRRGYARYKLRRTELEQLLTTNGMMFDKTVSLPTKQLYGLRRDALDRKLELEELGRIFFLMNQRRGFKSNRKEQAKGGEEKNLTVTKQAMRDFEAKMQAAGCRTAGEYLATLFDDLPENWHNKNEPKERIRERQRVRRELYQQEFDLIWEKQQQYHPQVLTPELKHQLRDRVIFFQRKLKSAKHLVGKCRFEPAKHVMPRSHPLFQEFRILQALSNIRITDRDRVNDLLTLEERDALAVQLGQAEKVNVSLIKEWLDYPRSARINDLGDLRGHTTWSRIRKAVGDDWFEEQSKEARLKLWHTLYFAADEGWIEEYAQRALGMNDEQAKRFAEVNLELDYGNISHKAAQKILPFMREGYDFAGACEQAGYHHSQNELDNPDRELKDKLTGADIDELRNPLVQMTVNETARLVSAVIKEHGKPDLVRVELLRDLKKPKAVREGMRNAMRNKEKQRDEYRDFLKEKGIISNPYPSDIKKFELWLELEYSESDVARLAPDMDLKVFKKFAEAVKPADKEKYRLWLECERISPYTGKAIPLSALFTEAYHVEHILPYSRSLDDSFANKTLCEDTVNTEKGNLTPLEYYEQKRTPDELKAFKQRVKNFSEGKLAKFLATEVKDDFLNSQFTNSAYIGTEVRKLLRKAFKDVRVTNGQLTGLLRNKVWNLNTLLNTADGQKNRDDHRHHALDALVIACTSQSLVNRISRESQFDFRGVQRVPDVGLPWHNFRVDAAEKLNAMLVSYKGGKRLLTTKTNKYRHSKAHEGRPEKWQRTKAVRGPLHEETLYGRITLQHKGSKEEAYVVRKALTSLTKAEQLENIVDPMVRKTVQDHVAKHGSLKEALKTPVYMPVKQQNEGKLVPIRKVRMRVNSAEMLELRPRTFVEPGNNYCIAIYEDAKGKRAFRTVSFFDAVQRAKRKEPLYPAEVEGKKHLMTLQQRDLVVLYDKHPDQIQWNSPNWMAEHVYSIRSLDRKGEVHMVLHKAGNASSGNAAQKAAAIYLRRKVGGLTVVPITVDPLGTLVRRK

SEQ ID NO: 7361 - protein, 1042 aa, synthetic construct
  REGION 1..1042: note = Synthetic
MKYRLGIDLGTNSLGWAVLRLDPAGQPCGLVRAGARIFSDSRNPKDGSSLASARRLPRQMRRRRDRYLSRRGKLMSLLVKYGLMPTDIGERKKIENLDPWTLRAEGLNRELAPHELGRALFHMNQRRGFQSNRKADNADENEKGKISSAIERMAQHLRSGGGQFATIGQYLADRHSRKEPVRARLIGSGAKASYLLYVHRAMVAEEFDVLWSVQSAYRPGLLTSEACTAIRDCMFFQRPLRAVKPGKCYFEPADDRAPIAHPLSQQFRIYQELNNLRVIDAHMTERPLTLHERDTLAAKLLAGSELKFSSMAKLIGLPRDTRFNLESERRDKLKGDEVAAKLAGKRGIGGRWIALPQEQQTTIVELLLAETDEAKLLDRLKGEFGFSTDDALRLSAAVMPDGYGRLSVKALSAIVAELKRDVVTYADAAKRAGYNHSDQYTGEIRRQLPYYGAVLQRYVTPGTNDPRDNDEARYGRIANPTVHVGLNQLRKLVNAVIKRYGRPTEIAIELARDLKMSAKAKEDLRREQSENQRRNEGHARTLSELGLPSNYENRLRLRLWEETNADPHRRTCVYSGKPISMSQLFDPDRVHIDHILPFSRTLDDSIANKVLCFREHNRFKANRGPWEAFGTAPNYSWEEILGRANALPQNKRGRFAEDAMERYASEKSFEARQLTDTAYMARVAREYLCGVCPPNCIRTSPGRLTALIRSKWGLNRILGEGNAKNRDDHRHHAVDAVVVALTDRGMLQRVSSAAARAEQRQLDRILEDMPEPWAGFYQEIESVIDRVVVSFKPDHGPEAALHNDTAYGIVGAAGAKDQSVVRHRVPVTNFENPKELEKIADPELRRLLESRMSGLADKKQIKAELQKFSEETGIRRVRVIEQMRVIPIKDRDGRIYKGYKGDSNYCYEIFEAEGGKWGGEVIATFEANQRPYQEFRKSVAYAHRAFCGAPLVMRLCVDDMLGIEEMGERQVLRVVKISTGRIYLAGHSESGSLKARDADPADPFRYLVKSPAALINLKAESISVDILGYVIPRKATQCQDVS

SEQ ID NO: 7362 - protein, 1244 aa, synthetic construct
  REGION 1..1244: note = Synthetic
MKVLGLDLGTASIGWAVIDTNVENPNDIQLLGNGSRIIQYDNNEASDFSAGKGETPCTQRTFRRTARKCLDRYQQRRDKLRAFLVETGMIKPDEKFPPLNPLETWKLRSDAATPGTKLSTSEIARVLLHINQRRGYRHAKSDMSDSKQTEYVARVNNRFAEIKNLNQTVGQFFYTKLKASECTTVRGKKHYTYRIKEEVFPRNAYAEEFDSIISAQGEFYPQLLTTENVAELRNLIFYQRPLKSCKHLVSYCDFEKRVFKNSAGKEVDGGPKVTPKSSPLAQVCRIYEAINNIRLVNSRLKRRKAAVAPSLFDDIENLPLDYRKQQPEFILNEEEKQRIFNYLNTNERLTETKLLELIGLKRVDGFKSDMSLAKGIAGNKTYCSIAKALANLPNGENLLRFDLKITEKLDKTSGALEPVIDLAYLNEPLFLLWHTLYSISNKEELFNCLGAKFGINDPETLERLYALDFVKEGYANKSAKFIRRILPYLMQGYGYSDACAMCGVNHSNYITKEENSERELKPRLERLNKGELRQPLVEKILNQTINLSNAILDRFGEIDEVRVELARELKQNKEHRAETTIRINKQERENLMLANMISELNISPTRRRIQKMRMLRETDNKCIYCGAVVTPSQFIEGHGYEVEHIIPRSRLFDDSFTNKVCSCRECNAAKGNLTGYDFMKTQSEEKFNEYLDRIERLCKDNKISKGKLKRLKMSASEIPSDFIERDLRQSQYIAKKAIEILSASFRNVYASSGAVTSFFRHVWGYDDILHDLNLPKYQKAELVEDVEYTTHGQTHTAQRIKDWTKRKDHRHHAIDALVIALTRQGYIQRLNNLNASANKEFGKMNLEKWAAQQPHLSVSEVKKAVDNISVSFKAGKKLSTPGKRYVRRNGVRKCVQTGILVPRAALTKEYVYGQIKVQDGKKDLKYIFKNPEAIADDDIRTAVLERLATNDGNVSATLKQLKKKPLEVNGRTIEQADCFRREFVINYSVDSIKTQKDIDSIIDPAIRQKFRERFEQVGAKDFVKSIAENPICSDAEGKCAIRNVRCFTGLKPDSLACVRKDASGKEIGFSQTQNNHHLAFYRLPDGKIIESVVSFWNGILRKRYGVPVFVHDPAAVWDRIAEMNENNDIRAIAESLPPRDSEFLMSLQRNEMLVLGMSDDEWNDAISAHDIAAINKHLYRVWKLGSKDYNFKFHTDTTAQIKEGDKEMKMFHRIGSIQALLALNPRKVSVSILGEIDLENLTQS

SEQ ID NO: 7363 - protein, 1242 aa, synthetic construct
  REGION 1..1242: note = Synthetic
MKILGLDLGTASIGWSVIDISDKDSNVIQLLGLGSRIIQYENNEASDFSAGKGETPCSQRTARRTARKMLDRYQQRRESLRSFLIELGMVDKSEVFPPLNPLETWKLRSDASTPGIQLSKSDIARVLLHLNKRRGYRHAKSDMGDSKQTEYVTRVNNRYSEIKALNQTIGQFFYNKLKESEAESSRGKKQYTYRIKEEVFPREAYAQEFDAIINAQKEFYPEILTDENITKLKNLIFFQRPLKSCKHLVSYCDFEKRTFKNSAGKEVDSGPKVTPKSSPLAQVCKLYESINNIRLVNPRLKGRKIVQPSLFDGMDTTPTDVRKLQYEFPINPEERLRIFDYLNTNDRLSESKLLGLLGLKQADGFKSDQALAKGIQGNKTYCAIAKALADYPGKEELLKFKVKITDKVDKNTGALEPVIDLSYLDEPLYQLWHTLYSIKDKKELFDCLSRKFNISDAETLEKLYAIDFVKDGYANKSAKFIRRILPHLMEGNGYSKACELCGVNHSGSMTAEENNARTLKPRLDRLNKGELRQPIVEKIINQTINLTNAVTDRFGEIDEVRIELARELKQNKEDRAETTTRINKQEKENQKFADMIAELNISPTRRRIQKMRMLQETGNKCIYCGAVVTPSQFIEGHGYEIEHIIPRSRLFDDSFSNKVCSCRECNKAKGALTGYDFMKTKSDSEFNAYLDRVEELYKNGKISKTKRNNLKMSSSEIPSDFIERDLRESQYIAKKAREILSQMFRNVYASSGAVTSFFRHVWGYDNVLHDLNLPKYRNADLVEEVEYTTHAQTHTTERIKDWTKRMDHRHHAIDALVIALTRQGYIQRLNTLNADSDKSASDKVNLDKWASAQPHISVKEVQDAVNNISVSFKPGKKLATPGKRYVKRNGKRKCVQKGILVPRAALTKDSVYGKIKVPIGKKNLKHIFNNPDAIVDNNIRTAVLNLLKESDGNISKILKQLKKSPLVVNGHTVEQADCYGEEFVIKYPIESIKKQSDINSIVDLSIRRKFQERFDEVGEKDFVKSLIENSICSDENGKCAIRNVRCFTGLKADTLACVKKTLTGKEIGFSQTRNNHHLAFYQNPDGKITESVVSFWDGIKRKRYGIPVIITDPASVWDMIANMEDNSDIQEIITKLPPHDSQFVMSLQRNEMIVLGLSEDEWNDAIASRNHSAINRHLYRVWKLSPNNYSFKFHTDTTAKINEGDKEMKMFYNTQSISSFLALNPHKISISQLGEIDFDNMS

SEQ ID NO: 7364 - protein, 1233 aa, synthetic construct
  REGION 1..1233: note = Synthetic
MKILGLDLGTASIGWALIECNDELNGNNLLGLGSRIIQYENKEESDFTAGRGETACAKRTAMRTARKLLDRYQLRRASLRENLIELGMMKDNEKFPSLSPVEVWKLRSDAASSGNKLSLADIARVLLHLNQKRGYKHAKSDLNDSKQTEYVQKVNSRFAEIKELGLTAGQYFYRKLKESEEITAKGNKFYTYRIKNNVLPRVAYTEEFDQIMSSQRGFYPEILTEGNINNLKQAIFFQRPLKSCKHLVSFCEFERKLFKDLNGKEVESGPKVAPRTSPLAQVCKIYESINNIRLYNPRHKEQKNLFDDISDGPRDAKKLGYEYEMNKEERERVFDYLNTNEKLTETKLLSILGLQKSNGFKSDKALGKGIQGNITYCKIAAALEGYDRKDELLRFELKELDTELVDADTGEIIMKVSDEYREEPLYKLWHTLYSISDKKELFHCLKSKFGIDNESVLEKLYAIDLVSPGYSNKSAKFMRKLIPNLRRGYKYSEACTRVNVNHSDSLTKEENNKRILKSRLDILPKGTLRQPIVEKIINQTINLVNAILDEYGEIDEVRVELARELKMSREERTEISNRNNKQERENNKLSERIAEMGIMPSRRRIQKMRMLQETGNKCVYCGKTVTPTQFIEGHGYEIEHIIPRSRLFDDSFSNKVCSCRECNQAKGALTAYDFMKGRSEQDFNSYCDRVENLYKDNKISRTKRNKLMMEAKDIPQDFIERDLRESQYIAKKTREVLREAIRNVHASSGAVTSYFRHVWGYDNILHDINFQKYKDAGQIESVKYESHGQIHHRDRIKNWSKRKDHRHHALDALVIALTRQGYIQRLNTLNASSEEEGGKDNLDKWAAKQPHFSVEEVCKALDNVSVSFKAGKKLTTPGKRSVKKNGKRVCVQTGILVPRGPLTKESVYGEILVYDGKKSIKQALKIIDLVVNPEIRDMLKMRLEQYGGDESKVLKSLKKDPMKVGGKEVSDIGCYRREIVMNYDLSTFNKLKEAESIVDPRIRKIVKDRFKEVGEKDFAKSLVESPLYSDKNVEIKRVRCFTGISAESLACVRHDSDGNPIGYSQTRNNHHVALYRNPDGSIEESIVSFWDCILRKRYGLPIIITNPSDAWDKISCMEDNEDIQRLANGFPPVDSELYMTLRRNEMFVLGMSDDEWHDAVESGNVSEINRHLYRVWKLSSNNYCFKFHTDTTAKIEDGDKEMKQYYNVRSINAFSELYPRKVTVTMLGNLRFN

SEQ ID NO: 7365 - protein, 1256 aa, synthetic construct
  REGION 1..1256: note = Synthetic
MKVLGLDLGPTSIGWAIIEIDDKDNPVSILGMGSRIIPYGVDTASDDFSRGKGESPCSERTRYRQMRRNIDRFQLHRQQLKSLLLGLGIMKTDTITPAANPLDTWKLRADAATPGIKLSLEQLASVLLHINHRRGYKHAKSDIGDSKQTDYVSRINDRYAGIKQSGKTVGQYFYDRLKESEAINDNGKKSYTYRIKGKVCPRKAYEEETDRILAVQSEFYPEILTEGNRQAIKQTIFYQRPLKSCKNLVSFCQFERHEFLNKYGEKVENGPKVTPRSSPLAQICRIYEAINNIRLVNARRQCQKTDCTSSIFNGPASTTREVRKLMPEYRFNEEEYERIFDFLNTHEKMTEKDLFKLLGLAADDGFKSDKALGKGIQGNTTRWQIANALGDHPDKEKLLRFEIVEEHPASGPDIAASTGEGLPRIYPQYIHQPLYMLWHTLYSIKDKEELFKVLSAKFGINDTPTLNRLYALDFVQAGYANKSAKFIRKLLPLLKRGMMYSKACAMAGVNHSNSMTRAENEERELHPKLAQLRKGELRQPVVEKILNQTINVVNAIIDEFGVIDEVRIELARELKKDKEGREKMARDIARNERENRALADEISGLEIQPSRRRIQKMKMLKETGNRCMYCGKPVTPYQFIEGHGYDIEHIIPRSRLFDDSFANKVCACRECNAAKGAHTAFDFMKSRSEQDLNSYLDRVDELYRANKISRTKRDRLLMSASDIPDDFIQRDLRETQYITRKSMEILSAAIRNVHASSGMVTDFFRHAWGYDTILHDINLPRYEAAGLTENVEYQSHGQKHMAHRIRGWSKRKDHRHHALDALVVALTRQGYIQRLNTLNALSDKSDDGEKWSSLDRWAAERPHIGRQKVIEALEKVAVSYKPGKKLTTPGKRYVRKDGRRTCVQTGVTIPRAPLHKETVYGRIKIDDGEKDLKHALQNINLIKDDGIRQQLAMRLQENDGNIPLTIKALKKNNLEVGGRSVENVRCYREEIVVRYPLESIRYKDLRYIVDPHIREIVQTRFTEVGNADKDFVKSLTERPLYSDKNCRHQIRAIRLISGLNPSTLAGVRRDQSGDTIGYAQTRNNHHLALYRNPDGSIVESVVSFWDCIKRKQAGLPPIIKNPAEAWDTVIANSESARFAGIADTLPPDGSEFIMSLQRNEMVVLGMSDDEWNDAVASNDFRTINRHLYRVWKLSSGKYCFKFHTNTSAAIEDGDREIRQFYVTSLSSLRALHPRKITISILGNPDSLSDDKESPML

SEQ ID NO: 7366 - protein, 1242 aa, synthetic construct
  REGION 1..1242: note = Synthetic
MKILGLDLGTASIGWSVIDISDKDSNVIQLLGLGSRIIQYENNEASDFSAGKGETPCSQRTARRTARKMLDRYQQRRESLRSFLIELGMVDKSEVFPPLNPLETWKLRSDASTPGIQLSKSDIARVLLHLNKRRGYRHAKSDMGDSKQTEYVTRVNNRYSEIKALNQTIGQFFYNKLKESEAESSRGKKQYTYRIKEEVFPREAYAQEFDAIINAQKEFYPEILTDENITKLKNLIFFQRPLKSCKHLVSYCDFERRTFKNSEGKEVDSGPKVTPKSSPLAQVCKLYESINNIRLVNPRLKGRKAVQPSLCDGMATMPIDVRKLQYEFPINAEERQRIFDYLNNNDRLSQSKLLGLLGLKQADGFKSDQALAKGIQGNKTYCAIAKALADYPGKEELLKFEVKITDKLDKNTGAVEPVIDLSYLDEPLYKLWHTLYSIKDKKELFDCLAKKFNISDAETLEKLYAIDFVKDGYANKSAKFIRRILPHLMKGNGYSKACELCGVNHSGSMTVEENNARTLKPRLDPLYKGELRQPVVEKIINQTINLTNAVTDRFGEIDEVRIELARELKQNKEDRAETTSRINKLEKENQKFADMIAELNISPTRRRIQKMQMLRETDNKCIYCNTDVTPAQFIEGHGYEIEHIIPRSRLFDDSFSNKVCSCRECNKAKGALTGYDFMKTKSDSEFNAYLDRVEELYKNGKISKTKRNKLKMSSSEIPSDFIERDLRESQYIAKKAHEILSQMFRNVYASSGAVTSFFRHVWGYDNVLHDLNLPKYRDADLVEKVEYTSHDQKHTAERIKDWTKRMDHRHHAIDALVIALTRQGYIQRLNTLNADSDKSASDKVNLDKWASAQPHISVKEVQDAVNNISVSFKPGKKLATPGKRYVKRNGMRKCVQKGILVPRAALTNDHVYGKIKVPVGKKDLKYLFNNPETIVDDNIRTAVLNLLKKDDGNVSKILKQLKKSPFVVNGRTIDQTVCYEERFVFKYPFNSIAKQSNINSIVDLSIRRKFQKRFDEVGEKDFVKSLIEDRICSDVNGKCVIRNVRCFARVTEDSIVCTKKDSSGRKIGFSQKQNNHYLNFYKKTDGKIIEFIISFWDGIMFKRYGIPTNATDPATIWEMIANMEIESEFQEIISKLPPHDSMLVMSLKKNDMVVLGMSEDEWNDAIESHNHVAINNHLYRVGPFSSKDYNFKFHTDTSAKIADGDKKMKMFYRIRSADNFFALNPHKINISLLGEIDFDNLS

SEQ ID NO: 7367 - protein, 1275 aa, synthetic construct
  SITE 1258: note = misc_feature - Xaa can be any naturally occurring amino acid
  REGION 1..1275: note = Synthetic
MNVLGLDLGTTSIGWALIEIDDNNNPVSILGMGSRIIPYSDDTTAADFSKGRGESPCAERTRCRQMRRNLDRFQLHREQLKKLLVEIGMIDSHFRLSPASPLEVWKSRADAATPGTRLSLENLAAVLFHINHRRGYKHAKSDLGDSNQTDYVAKINDRYLEMQETGETVGQYFYAKLKESEVINPNGKRYYTYRVKEKVCPRKAYEEEVDSILKVQSEFYPEILTEENQIAIKQIIFYQRPLKSCKNLVSFCEFERREFLNKRGKKVESGPKVTPRTSPLAQVCRIYESINNIKLVNSRLRSRKSDHLPSLFDDPASAPKGARKLMPEYIFTDEERDRIFDFLNTNEKMTEKDLLKILGLTSDDGYKSDKALGKGIQGNTTRCQIAKALGNCPNRNKFLSFEISEEIPASNPDVDKNTGEILPRVASFFTRQPFYMLWHTLYSINDKDELFKVLSEKFGISDTETLNRLYALDFVKAGYANKSAKFIRKLLPLLKKGLKYSDACVVLGINHSNSLTKDENNKRELQHHLKSIHKGELRQPVVEKILNQTVNVVNAIIDEYGVIDEVRVELARELKRDKEGREKMAQDISRLERENKALEKEVAELDILPTRRRIQKMKMLKETENKCMYCGKPITPYQFIEGHGYDIEHIIPRSRMFDDSLANKVCACRECNASKGAMTAFDFMKSRGEHEFNSYLDRVEDLYKNNRISRGKRDRLLMSGSAIPENFIERDLRETQYISRKSKEILSGVIRNVYASSGRVTDFFRHAWGYDTILHDINFPRYESAGLTEVVEYETHGQKHTARRIRDWSKRKDHRHHALDALVVALTRQGYIQRLNTLNALSEVDEDSAEWHGLDKWAAERPHIDRATVVKALEEVAVSFKSGKKLTTPGKRYIRKNGKRICVQTGIVIPRAPLHKETVYGRIKVDDGEKKLKFALDNLDLIKNIDIRRQLELRLRQNDGDKKKTLKELKKNPIEINGCTVESIGCYREEIVVKYPVESIVYKDLRYIVDAHIRKILETRFGEVGNVDKEFVKSLSERPLYSDKACKQRIRTVRLFSGIKMSTMAGVRKDDHGKIVGYAQKRNNHHVAFYRNPDGKIVESVVSFWDCVKRKNAGLPSIIKKPNDAWDTLVAMGDSDCVEEIAKIFPPVGSEFVMSLQRNEMVVLGMSDDEWNDAVASRDRRIINRHLYRVWKLSLGVYCFKYHTNTTAAIEDGDKEIKQYYIIKSISSLAALHPRKVSISILGKLNLLSDDKENIMFXQSCVFVLQKPSVDYSYG

SEQ ID NO: 7368 - protein, 1262 aa, synthetic construct
  REGION 1..1262: note = Synthetic
MIYIITFVIQFTVHFTIYYLRMKILGLDLGISSIGWAVINIDNKSEDIDLLGFGSRIIPFNGDNDATDFAQGKGETPSSKRTQARSMRRNLDRWQLHREQLKEMLHSCRIMSASSKFEALDPFQVWKLRADAATPGKQLSFQDLSRVLLHINHRRGYKHAKSDDMSDSKTTAYVERINDLYAKIKAMDLTPGQYFCQELAKSAMESPKGKKHYTFRVKEKILPRKAYEEEVKQILEVQSQFYPEILTEKVKDELVRVIFYQRPLKSCKHLVSYCEFEKQLFPNSKGKLVDGGPKVAPRTSPLAQVCRIYEAINNISIVNPRLKGKTTGAEDMSLIPPSRHELKKFRYKYEFDAEEREKLFDYLNTHEKLTQAELFKILGLKRSDGFRCDQAVGKGIQGNMTRCQLEAALQGLEEDKIKKLLQFDLSFQQKVDKSTGEIREEISSSYNQQPLYALWHTLYSINDRDELFLVLKEKFGIDNQEVLDRLYTLDFVKAGYSNKSAKFMRRILPELMQGMQYNEACESIGIRHSDYLTKEENENRTLSNRLAQINPGELRQPIVERILNQTINLVNALMDKYGEIDEVRVELARELKQSKEERKRTTDNINLREKDNKALALQISELGIVPTRRRIQKMRMLAETGNRCMYCGKPVSPARFVEGHGYEVEHIIPRVRYFDDSFSNKVCACHECNAAKGAHTAFDFMSARGEQQFNEYKDRAAYLLDQKKISKQKYKYLMMSGSEIPQDFIERDLRESQYIAKKAKELLVTVIRNVYSSSGSVTDFFRNAWGYDTILHDLNFPRFDSAGLTEVQEYESHGHKHREPRIIGWNKRRDHRHHAIDALVIALTRQSYVQKLNTLNAAFDSRDERNEAKQNLSRWAASQPHIERSKVMAKADEIAISLKPGKRFATPGRAYKDPSGILRRTLVPRAPLHKDTVYGKIKVPDGLKKIKYALENLSLVADADLKEALAKRLSENIYDIKATLKSLKANPIKKEGTEVSAVPCFRDEIVVRYPIEAIKRKDLSSVVDKRIRKVLESRFAEVSSDKDFVKSLAERPLYSDADCTNRIKAVRCFTGIKADSLAIVRRNEAGDSIGYAMTRNNHHVAFYIGEDGKPLAITTSFWAAIKRKRYGMPVIITEPQKAWDILTVTEENPDIREIAAGLPPEQSRFLFSLRRNEMVVLGMSDDEWADAIRMNDKAAICRHLYRVWKLGNGDYYFKLHTNTTSIIEEGDKEMSEYYRCASIGSLLSLNPRKVTIDITGEIVPEK

SEQ ID NO: 7369 - protein, 1257 aa, synthetic construct
  REGION 1..1257: note = Synthetic
MKILGLDLGPTSIGWALIETDSNNNPISILGLGSRIIPYSNDTTAADFSKGKGESPCTERTRCRQMRRNLDRFQLHREQLKNLMTEIGITDSDFKPSPASPAEIWKSRADAATPGIKLPLDKLACVLLHINHRRGYKHAKSDLGDSKQTDYVAKINDRYSEIQKTGKTVGQYFYDKLKDSEVINPDGKRYYTYRIKEKVCPRIAYEEEVNRILKIQSEFYPDILTEENKNAIKQVIFYQRPLKSCKNLVSFCDFEKHEFLNKAGKKVENGPKVTPRTSPLAQVCRIYEAINNIKLVNSRRRNKKTDIAPSLFDDSECAPKDLRKLMPEYKFSDEERERIFVFLNTHEKMSEKDLMKILGLTFEDGFKSDKALGKGIQGNTTWCQIAKALESHPDKESLLSFNISEEIPATNPDVNKETGEVLTRIKPDCTQQPLYMLWHTLYSINDKDELFKVLTEKFGIEDDETLNNLYALDFVKAGYANKSAKFIRKLIPLLKKGLMYSEACAILGKNHSNSLTKEENENRELQHHLTPLHKGDLRQPVVEKILNQAINVVNAIIDEYGEIDEVRVELARELKRDKEGREKMAQNISKLERENKALAEEIAELNILPTRRRIQKMKMLKETDNRCMYCGKQITPYQFIEGHGYDIEHIIPRSKLFDDSLTNKVCACRECNAAKGAQTAFDFMKTRGEQEFNSYLDRIEDLYKNNKISRGKRDRLLMSESAIPEDFIERDLRETQYISRKSLEILSSAIRNVYASSGMVTDFFRHAWGYDTILHDINLPRYEAADLTEDVEYETHGQKHTAHRIKDWSKRKDHRHHALDALVVALTRQGYIQRLNTLNALSNSEADSEGWNGLDKWAAQRPHIDREKVMNALEEVAISFKSGKKLTTPGKRYIRKNGKRICVQTGVSVPRAPLHKETIYGRIKVDDGEKKFKFALDNLNLIENKEIRRQLELRLQQAEGDKGRVLKDLKKNPIKINDREVENVRCFREESVVKYPIESIAYKDVRYIVDSHIREIVEQRFEEVGKKDKEFVKSLAEKPLYSDKDCKHLMRTIRLFSGIKMSTLAGVRKNESGEIIGYAQKRNNHHVAFYKNTDGKIVESVVSFWDCVKRKNIGLPSIIKKPGEAWDALVALGEHSDIEEIANTLPTADSEFIMSLQRNEMVVLGMSDDEWNDALASNDIRSINKHLYRVWKLSSGEYCFKYQTCTTAATEDGDKEIKQYYITKSIPSLIALHPRKVKVSILGKFNPLSNDKENTML

SEQ ID NO: 7370 - protein, 1240 aa, synthetic construct
  REGION 1..1240: note = Synthetic
MKVLGLDIGPASLGWSLVDFSSEFTQVAIIAMGSRIIPYSEDSVVGDFNAGKGETACSIRRVFRQMRRNLDRWQLHREQLKDVLIQAGIMQDKESFPNLHTLDVWKLRANAASPENQITLSELARVLLHINHRRGYKHAKSDAGDSKQSEYLSGINQRFKEITEANVTVGEYFYRNILDSEHISPKGKKCYSYRVKEKIFPRAAYFQEVDTILEAQSRFYPDVLTTEVKDKIKQVIFYQRPLKSCKHLVSLCEFEKRQLTDSNGNQKEIGPRVAPKTSPLAQLCRIYEAINNISLTNPRIKENRKVFEPSLFDDPANFPKQARKLQHKYDINAAERQLIADYMQVNEKITLTELFKLLGLKKSDGFQGDKLIAKGIKGNETAVQIRKALSNLPQDKIDELMRFNIEFAEDVNKETGEVYKVISSAYEREPLYMLWHTLYSIDDRDVLLKVLQNKFGIQDEKTLERLFALDFVKAGYSNKSSKFMRRILPSLMDGMKYNVACERIGVNHSNSITKEQNDQRVLVDKILPLSNGELRQPVVEKVINQVVNLVNEVKAKYGEIDEVRVELARELKQSKEDRAQTTSALSKLEKDNNRYAEEIKELGLVPTRRRIQKMKMLKETENRCIYCGALVSPTQFIDGHGYEIEHIIPRSRLFDDSFANKVCACHECNASKGNKTGYDFMEGKTESEFNSYKERVIGMWTSGRISKRKKDYLLMPESKIPSDFLNRDLNETQYITRKVMEVLRSGFRNVWASSGSVTDFFRHVWGYDNILHDLNLPKYRDAGLTEDVQYESHGQTHTAHRIKDWTKRNDHRHHAVDALVVALTRQAHVKRLNDLNQVDRDSLGYEISKKNLEKWGAEQTHPSVEEASREVEKISVSFKGGKKLATPGKRCTDRNGNVRRTLVPRAALHKETVYGEILVAAGDKTLKDAYKDLTLVVDKTLREQLYGRLQECDNDLAATLKSLKKNPLMKGDEPVQRVACFKREIVVRYPIASIARKDIDSIVDSRIRELIRDRYKTVANEKEFQRSLSESPIYSDPSNTHKISHVRCFTGLKPETLATVAKNSDGKGIGFSQTRNNHHMAIYVDSEGNYSHLVTSFWECIKRKRYGLPIIVTDPAEAWDALVNCEENEDIEEIAKGMPAPDSQFVMSLQRNEMVVLGMSDDQWNDAVANNDVKEINKYLYRVWKIAVTEYCFKYHTNTTAAVKEGDKEIRAHYKLASLGALFALNPRKVRINSLGELIL

SEQ ID NO: 7371 - protein, 1247 aa, synthetic construct
  REGION 1..1247: note = Synthetic
MRVLGLDIGSASVGWAVIDVNDFTNEAEKLLGLGVRVIHYADDSAAKDFSRGSGETACSNRTMKRQMRRQLDRWQLHREQLRDILVKNGFIASNEAFEPLNPEEQWRLRADAARPEKQLTLAEIARVLLHINHRRGYLHAKSDMNNKKETEHVAKINSRYKEIKELQKTVGQYLYDNLMASETVSKRGKKCYTYRIKEKVFPRMAYKEEVKQILESQAQYYPDVLTPEVRDALFNVIFYQRPLKSCKHLVALCDFEKKSVKHANGQVYHYGPRVAPRSSPLAQMCRLYEVINNIRLENIQKEIVNSHPQLDLFDDVATAPKDYRLMRRIYEFSAAEREAIFKALNESEKLTFNNLKKLISLKGDAAKGLVGDKQINAGIKGNDTYRRIAAAIKNLPAEKQEELLRFEVYSEVHVDPATGKERNMISADYQKEPLYMLWHTLYSIDDRNELFGVLRSKFGIEDEETLDRLFAIDFVKDGYSNKSALFIRKILPMLMDGDGYSVACEKAGVNHSNSLTKEENEKRELKQQIDFLRKGELRQPIVESILNQSIALVNAIKEEFGEIDEVRVEMARELKQSKTDRAETSKAIAQREKENQELAAQISGEGIRATKRRVQKMRMLAETGNRCMYCNAPVSPVQFLEGNEYEMEHIIPRSRYFDDSFANKVCACRECNHEKGNKTGYDYMKGKAGSEFHAYELRVKQLFTDKKIGKRKRDYLLMPGDKIPDDFVNRNINETQYINRKVIEILRTAFRNVRASSGEVTDFFRRAWGYDTMLHDLNLPLHRKADLTEQVEYITHGQKHTVERIKNWSKRNDHRHHAVDALVIALTRQGYIQRLNTLNAIKDMRAEYLEGKQSLNRWSAMQPHFDRSEVMQRLQELSISFKRGKKLTTPGRKQIVNGEVKRMAVPRSALHKDSVYGKILLHDGFKTIKQALAIPQLICDPEIKAQVVAALEKHNQDQKATLKYLKKNPIEVNGDKVEEIRCFKEEVVIKYKISAITKKDLPSIVDKKIRDVIEARFNELAKEKDFEKSLAERPLYSDAEGKHEIKTVRCKTGNDLSKMAVTQRNERGEAIGYSSTRNNHHLAFYKDAEGNIIESIVSFWDCLKRQRYGIPTIIENPSEAWDMLLEHEENEDIREIAQTLPPVNSTFWMSLQRNEMFVLGMTDDEWRDAVKSRDYATLNKHLYRVWTLSTREYRFKRQTNTQAAIVDGDKEMCQHYICKSIGAFMALNPRKVSVNLLSKIMLPEIDD

SEQ ID NO: 7372 - protein, 847 aa, synthetic construct
  REGION 1..847: note = Synthetic
LKSSKSIRRPVRTLRPPPAYIHQPLYMLWHTLYSIKDKEELFKVLSAKFGINDTPTLNRLYALDFVQAGYANKSAKFIRKLLPLLKRGMMYSKACAMAGVNHSNSMTRAENEERELHPKLAQLRKGELRQPVVEKILNQTINVVNAIIDEFGVIDEVRIELARELKKDKEGREKMARDIARNERENRALADEISGLDIQPSRRRIQKMKMLKETGNRCMYCGKPVTPYQFIEGHGYDIEHIIPRSRLFDDSFANKVCACRECNAAKGAHTAFDFMKSRSEQDLNSYLDRVDELYRANKISRTKRDRLLMSASDIPDDFIQRDLRETQYITRKSMEILSAAIRNVHASSGMVTDFFRHAWGYDTILHDINLPRYEAAGLTENVEYQSHGQKHMAHRIRGWSKRKDHRHHALDALVVALTRQGYIQRLNTLNALSDKSDDGEKWSSLDRWAAERPHIGRQKVIEALEKVAVSYKPGKKLTTPGKRYVRKDGRRTCVQTGVTIPRAPLHKETVYGRIKIDDGEKDLKHALQNINLIKDDGIRQQLAMRLQENDGNIPLTIKALKKNNLEVGGRSVENVRCYREEIVVRYPLESIRYKDLRYIVDPHIREIVQTRFAEVGNADKDFVKSLTERPLYSDKNCRHQIRAIRLISGLNPSTLAGVRRDQSGDTIGYAQTRNNHHLALYRNPDGSIVESVVSFWDCIKRKQAGLPPIIKNPAEAWDTVIANSESARFAGIADTLPPDGSEFIMSLQRNEMVVLGMSDDEWNDAVASNDFRTINRHLYRVWKLSSGKYCFKFHTNTSAAIEDGDREIRQFYVTSLSSLRALHPRKITISILGNPDSLSDDKESPML

SEQ ID NO: 7373 - protein, 979 aa, synthetic construct
  REGION 1..979: note = Synthetic
MQKILGLDLGTNSIGWSLLEEDSADSSRILGAGVRIFSEVTESKSKTLKNNKRRQKRGERRQRARRKMRRDTLISFLLKKNFLPAHTEDSNPLEEWFCQMPNPYELRTRALDDSLSMAELARIFLHICQRRGFQSNRKAKKKDDDGKVKSEILELQESIDDSPYRTLGEYLFHQPTQRRRYTSRQMYEEEFRTICESQQKHHPDLLDAATQGRLFQILFFQRPLKVQKHLIGKCSLEPNRKRCSKAHLDWQRFRIWQDLNHLTVKDPITRQNRALSGTEKEKLFEKLDEKTHLTWKQARKVLGLHDGELFNLEESDRKHLSGNETQGKLIKAIGSTYSNLTPDRQDQLVTDLFTISDERPLINRLKNYWNFSDEEIASLCEVELPDGYGNVSMKAVRKLLPHLQQGKPYTNAREDAGYEIVVNYGEGADKLEEVPDLRNPVVSKALHELRKVVNGVLRQHGKPDIIRVEMSRDLKQSEKQRKETQRIINQNEQKNERVREVLRNDFKLSNPKREDIQKYILWEETNHECPYTGATIGREKLYSSEVQIEHILPYSRTLDNSLSNKTLCLAIENQQIKRNQTPYEAYSGKPERYQEILQRVKKLPLSKRRKFEQQALEEDAFSERHLNDTRYISRAAKDYLLTLGTKVQIGNGRLTSILRNKWNLNQILNPHGDTKKKNRDDHRHHAIDATVVALTSPGLLQRVSQLSAKLEEKELNDANFVLGEPWPGFHQEICKLIYNINVSHAPTRKIAGALHKDTAYGYIESENKFVYRKPIETLKKSELERVRDKSVKEILKTRIEEYDGNLKQAFAEPVYHVDGKTSIMNVRINKDKISKVSVFSVARNGKEYKHYQTGNNHHLEIFEEVSGKWTCEIISTLEAARRVRIRKINLYNRESPKGKFVFSLVANDCIQIPDGEFKGIYRVQKIETTGGGRVVLRRIEISSTDSKEGSITKNINPLKKLNARKVMINPIGQIYPAND

SEQ ID NO: 7374 - protein, 1321 aa, synthetic construct
  REGION 1..1321: note = Synthetic
MKKILGLDLGTNSIGWALVKMEEEECKEISGAGARIIPAGNDEIIEFQKGQTKSKAAERRQYRMSRRINHRYIQRRDNLVKGLLAIGIMPGDLFYKLHPRKCSQILERLAKEDINGSTLETNVPETDIEHYSLRLKALNQPVSSGAFGRILYHFNQRRGYQSTRKERKQSSDGVPSNYKKQVETIVIVAAEPTGETKAKKNEYLLHLNDGRTATTLNEYYAQKLKEPIQVETRWRKNKNGEETLEVAYFDPTDWQKRLDALDREFEQSGMFPGAYFHSQLKLMPSNQAGKDYRIRQQFILRKRYIEEFNAIWDKQEEYHSFLKDESAKEKAVKVILPENSPERKYWLKRPLKELVRDYIIYYQRPLKTKRSTIGHCTFEPLKKVTPKSHPDYQEFRVWQAVHNLRYLNEEESLTELSKNQKVNLFEVLSQKEYLEPVKLPTILQLPENTQFRITDKLPGNETLSEFLKAARKAEIEIESIITNPAQKIDLWHIIYSVDSEDARIKTLRKRFGWTPAVAQVFADLYFERDFGSLSARAVTQILPLMRVGQYFNQEDISTKAQENIKSLMEGVIPVDIPEDIAKKLAEKINTTPVDNGFSYSEAAALVYGQHANLHSSGKILAPENLKPLPAHSLRNPLVEKVINETLQLVAEIWRTYGKPDEIRVELARELKQNNEERKKSWQRNLQREKKRKEVAVEIKNQKNFGISQPSKKDIDRYLLWEEAGFRCIYSGKNIPVSALFNGETDVDHILPKERFFDDSFANKVLVFRSENERKTNKTAYEYMQGKGPAEWDRFENEVKNQFRGAKKRNLLAKEIPQDFVKRQLNETRYISRKVKEELQKVCPGKIFSTSGTITDYLKSIWDLHETFKKIQLPRFERMEKITGDAWIKEEINRENKRVLHLREWDKRIDHRHHALDAIVVAVTRQGYITQLNTLSQQFSFSTMKDKSVRRFKLPNPAFRSMVMEAIDRIIVSHRSRKRLTNATVNHYLLRDPDGKLIQKKQDAGHLTGVRGELHEQQPFGPVQLYERIKVEKAFENLGKLAVDWQKALVKQRLTDHNGDKIQAKKSLKKSPLVDMKGEPLSEVIIFETRFAKRRDLNPNISEKQLKEIADRKLQRELLDFVDQFPSGIKEAFTEENLEKFNQDRHKPVFKVRTHTNGNPEELNRKFSTNDKLFVEKGNNYCFVIYEHEQTKERSYEVVSFYDAVMRRLNGEPLAPAKDGCRQFTLSHNEIVYVPESDEVLEEIDWTDTKRIAGRLYKVEKFTSKGYEIHFSPIHFSLSLSGEFIHPNPSDKSTFTLDTPRISIKTKCIKVFIDRLGRIKPG

SEQ ID NO: 7375 - protein, 1118 aa, synthetic construct
  REGION 1..1118: note = Synthetic
MVEKKGRIWRLGADLGANSLGWAAIELSAAVDGKPVSILAAGSRIFSDGRDPKSGASLAVDRRDARAMRRRRDRFQQRQRALIKYLIADGLFPADEAARKAMAAIDPYAVRARALDAPLSLPELARALFHLNQRRGFKSNRKADRKADDDAGKIALGIDRTRDAIRQAEEGAGAEPGSWTYGKWLHERRASAADANAIPGVRTRLRPESGEDARGDGYDFYPGRALMEEEFDAIWQAQAPHHPDVLTNAVHDRLHEIIFYQRPLKTPRIGMCTLVAGDQRLPKAHPLFQRRRLLEELNALMIVRPGEVAQRLTREERDILFLKLKDKGKVSFASLRKTLKLDPEARFNKESENRPDLKGDEVAAAMGAKARFGNRWVHLSIEEQWDVIARLEAVESDAEDAALRIWLSDTHDLTPEQARAVVNAPLPPGYGRFGEDATRRLIEALRDGEKDGRVLVYSEAVIAAGFGHHSDLRTGEIFEDREGRPQLPYYGVALERHIMPGTGDPSHPEEMRVGRLTNPTVHIGLNQLRRIVNALIRAYGPPAEIAIELARELKLTDEDKKRINKENNDNRLAAERRSEKLLAIGKPDTGANRALLKLWEELNPDNVLDRRCIYTGQQISIDMLFSAAVEVDHILPFTATLDDSNGNKIVCLREANREKRKQSPYEAWGHSDRWDEIAARAAQLPRNKRWRFEPDAMDKFREEGGFQARHLVDTQYLARLSREYLATLYPDKGEGTGKIWVSPGRMTEMVRRKLGLNDLLPDHNFGGGADQPKNRLDHRHHAIDAVVVAIVDRAMLNAISRASGQDGVDGRERIEIPPPWDGFRNDLRAAVNAITVSHRADHGTASKAGLAKGADATAGRLHNDTAYGLTGETDAKGNSIVVRRVPLSSFRKLADLDRIRDRDLKAALYQHLDGLEGKAFEKAVANFPNLGWHNFGGVRRVRVTEPLTVIPIRDRNGLIYKGYKGDSNYRYDVWELPGGKWVTNWKNEDGNALSSVISTFDAHQSVDLPRPHPAARKILSLHQNDLLAIEHTGEDRKLMRVVKFGQNGQITLAEHQQAGDLKRRDAALNDEDPFKYFAPTAGGLKKVKARQVRIDEIGRVLDPGFPARTARRKTRKRA

SEQ ID NO: 7376 - protein, 1110 aa, synthetic construct
  REGION 1..1110: note = Synthetic
MTARTHKIWRLGADLGANSLGWAAIELSAPVDGKPIAILHAGSRIFSDGRDPKSGASLAVDRRDARAMRRRRDRLQQRQRALIKYLIADGLFPADENERKAMATIDPYAVRARALDEALTLPEVGRALFHLNQRRGFKSNRKADRKADEDAGKIAIGIDRTRDAIRQAEEEAGAEPGSWTYGKWLYERRASATDANAIPSVRTRLRPETDEHAKGDGYDFYPGRALMEAEFAAIWEAQAAHHPDALTNEVHDRLHEIIFYQRPLKAPQIGVCTLIRGDQRLPKAHPLFQKRRLLEELNALTIVRPGEMAQRLTREERDTLFLKLKDKAKVSFVSLRKTLKLDPDARFNKESENRSDLKGDEVAAAMGAKTRFGNRWVHLSIEEQWDVIARLEEVESDAEDAACRAWLAATFDLTPEQIRAVTNAPLPPGYSRFGKVATQRLIDALRDGEKDGRVLVYSEAVAAAGLGHHSDLRTGEIFEDAQGRPQLPYYGVALERHIMPGTGNPDHSDEMRIGRLTNPTVHIGLNQLRRIVNTLIRAYGPPAEIAIELARELKLTDDDKKRINKENNENRLAAEKRSEKLLTIGRPDTGANRALLKLWEELNPANVLDRRCIYTGTQISVDMLFSAAVEVDHILPFTATLDDSNGNKIVCMREANRTKRKQSPYEAWGHTDRWEEIAARAAQLPRNKRWRFEPDAMEKFKDESGFQARHLVDTQYLARLSREYLETLYPGSGEGSSHIWVSPGRLTEMVRRKLGLNDLLPDHNFGGGADQAKNRLDHRHHAIDAVVVAIVDRSMLTEISRVSGLEGAEGRERIIIPPPWDEFRNDLRTAVNAITVSHRTDHGTISKAGLPKGKDATAGRLHNDTAYGFTGETDAKGNSIVVRRVPLASFKKLADLDRIRDTDLKAALYQHLEGLEGKAFEKAVMDFPNLEWHPFGNVRRVRVTEVLSVIPISDQNGRIYKGYKGDSNYRYDVWELPGGKWEAEVVSTFDAHQPDWVSKIRSRSPTARKVLSLQQNDLIAVERAHETRELMRVVKFRQNGEITFAPPQEAGSLKRRDATPNEDDPFKYFAVAASSLQKAKARQVRIDELGRVLDPGFPARTARRKTRKST

SEQ ID NO: 7377 - protein, 1109 aa, synthetic construct
  REGION 1..1109: note = Synthetic
MTWRLGLDLGTNSLGWAALRLDEADQPCGIIAAGSRIFSDGRDPKSGASLAVDRRDARAMRRRRDRFQQRQRALLDYLVKDGLFPADPAERKALAALDPYALRARALDEPLSLAEIGRAIFHLNQRRGFQSNRKADRGKDEDAGKIAIGIDRLRDAIDAAGARTFGEFLHLRRAGAESANAIPSVRTRLRPETGEGAKGDGYDFYPGRELIKAEFDAIWDAQAPHHPTALTGDVYGHLYEIVFHQRPLRTPKVGKCSLPPHMEERLPKAHPLFQRRRLLEELNALMIVRPGETAERLTPEQRDLLLLKLKDKRKVGFESLRKTLKLDPAARFNKESEHRTELKGDEVAAEMSTKARFATLWCHLSIDRQWEVIRRLQALESKEDEARFCAWLAEAHALSEEQAKAVMGARLPHGHGRFGPTATAALIEALTTGRTPQGRGPTAPPIAPDRVVVYSEAAALAGYHHSDHRTGEIFEDGDGRPALPYYAVPLERHIMPGTADPDERDEALRLGRLTNPTVHIGLNQLRRVVNRLIRAYGPPAEIALELARDLKLSDDEKKRRNQENSRNRLDAEKRSEKLEAIGQRDSGANRALLKLWEELNPGNVLDRRCVYTGTQISMEMLFSGAVEVDHILPFDATLDDSNANKILCLREANREKRKRSPFEAWGHTDRWEEIAERASRLPRGKRWRFEPDAMQRFAEEGGFLARHLVDTQYLGRLARDYLAALYPGTGEGSSPVWVSPGRLTEMVRRKLGLNTLLPDHNFGGGADQPKNRLDHRHHAIDAAVIAILDRGMLNRIARESGQGASDADLLRIIVPEPWPGFRDDLKRTVDAIVVAHRPDHGTVSKAGLKRGRDQTAARLHNDTAYGLTGETDEKGNSLVVHRVPLASLKKAADIDKVRDLALRTALADFTAGSEGKAFEARIAKFPELGPLDYRGIRRVRIIEPLSVIPIRDATGRAYKGYKGDSNYRYDVWELPDGKWQASVISMFDAHRLEAQPRPHPAARKVLSLQQSDLLALEAEGAARRLMRVVKFGQNGQIVLAEHQESGDLKRRDATSNDEDPFKYIAPTAGGLKKARARQVRVDELGRVLDPGFPARKSRRITKPRRIAAE

SEQ ID NO: 7378 - protein, 1107 aa, synthetic construct
  REGION 1..1107: note = Synthetic
MKRALRWRLGVDLGANSLGWAAILLNEAGEPAGFLAAGSRIFSDGRDPKSGASLAVDRRDARSMSRRRDRFKQRQRALIKYLVRDGLFPADEAERKALAALDPIELRARALDEALPLAHLGRALFHLNQRRGFKSNRKADRKDDAESGKIAIGIERLRDAMQEAGARTYGEWLHLRRKSAVNANAIPSVRTRMRPESGEGAKGDGYDFYPARALLEEEFDAIWEAQSPHHPDVLTAEVHDRLFEIIFHQRPLKAPKIGKCMLVDGEDRLPKMHPLFQRRRLLEEVNALMIVRPGEKARRLTPEERDLLVLKLKDRAKVGFDSLRKVLKADSDSRFNKESENRTHLAGDEVAAIMGAKTRFGTRWAHLPAEEQWDVIQRLNAVESDADHRAFLDWLAATYGLEEEQARAVANAHLPQGYGRFGLTATTRLIEALTSGRTPEGRTEKAAPIEPGRVIVYSEAVEHAGLGHHSDRRTGEVFEDEQGRPQLPYYGVALERHIMPGTGNASDPEEMRIGRLTNPTVHIGLNQLRRVVNRLIRAYGPPAEIAIELARELKLNDEQKKDLNRKNAENRAAAERRGKKLEELGQPNTGANRALLKLWEELDENAIGRQCVYSGQVISAAMLFDGRAEVDHILPFSATLDDSNANKIICVREANRDKGNRSPCDAWGHLDRWPEVAARAARLPKNKRWRFEPDAMERFREEGGFLARHLVDTQYLGRLAHEYLAALYPDRGEGSRPIWVSPGRLTEMARRKLGLNDLLPDHNFGGGADQPKNRLDHRHHAIDAAVVAIIDRSMLQRIARASGMEGADGREKIEIPPPWAGFRDDLRKVVNAIVVSHRADHGTVSKAGLDKGKDQTAGRLHNDTAYGLTGEVDDKGNSIVVRRTPLSGLKKLEHIEQIRDTDLKAALYRQVEGLEGKAFEKAIAEFPKLHWHPYGGVRRVRRVEPLSVIPIRDREGRAYKGYKGDSNYRYDVWELPDGKWVSEVVSMYDAHQPGWTSKVRASCPTARKVLSLHQNDLAAATPPDGERLLLRVVKFGQEGRLYLAPPEEGGSLKGRDADKNDPFRYISLFPAKQKAWRLRKIRIDELGRVLDPGFPARTTRRKTRKAA

SEQ ID NO: 7379 - protein, 1107 aa, synthetic construct
  REGION 1..1107: note = Synthetic
MRWRLGLDLGTNSLGWAALGLDAEGKPEQVISLGSRIFSDGRDPKSGASLAVDRRDARAMRRRRDRFKRRQAALLKHMTRLGLFPEDPAERKALETLDPYELRARALSEKLPLPHLGRALFHLDQRRGFKSNRKADRGKDDDQGKIAVAVGRLAEAMEEAGAETLGQFLHMRREKAEALRASGEEPGREGWVRTRLRDAAVDGYDFYPSRAIVEEEFETIFARQRPHHPDVLTDEAHDCLYEIIFHQRPLKAPKIGRCTLVSGDERLPKAHPLFQRRRLLEEVNALEITLPGEKPARLTREQRDLLLLKLKGKRKVAFKSLRSALKLDPDARFNKESESRVDLKSDEVAAALGDPKRFGNVWSHLSPETQWEVVSRLRELESDEDEAAFSSWLTERHGLSPDAARAVCGAPLPEGFGRIGETATRRLIAALEAEVIVYSEAVEKAGLGHHSDFRSGEVFLDDKGRPALPYYGAALERHILPGTADPNEEDEALRVGRLTNPTVHIGLNQLRKVVNDLIQVYGPPEEIAIELARELKLDEDEKKKRNRENNDNRIAAEKRSEKLRDLGKPDTGANRALLKLWEELNLDNALDRRCPYSGRQIGVEMLFNGQVDVDHILPFTRTLDDSNANKTVCLVEANRMKRNRSPDEARADFAAKWGADADWEAIAARAARMPKNKRWRFEPDAMDRFRDDPENGRGFIARQLTDTQHLSRLAREYLSTLYPHRGEGSSHVWVSPGRLTEMVRRKLGLNDLLPDHNYGGGDQPKNRKDHRHHAIDAAVVAIVDRSLLQEIANASGKEGKDGREKIVIPEPWEGFRDELRRAVNDVVVSHRPDHGTVSKAGLKPGFDKTAGRLHNDTAYGLTGLKDARGNDLVVHRAPLSSLKKASDLDAIRDDELREALKGWTSGKEGKAFEQALRDFGDPLKGYMRDGRRASYPHIRRVRLVEPLSVIPIRDGSGRAYKGYKGDSNHRYDVWELKDGAWKAEVVSTFDASQPGWTSAVRTDNPTAKKVLSLHRDDMLAIERPEGLRIARVVKFNQAGQLILAEPNEAGSLKARDADKTDPFKYLYPSANTLKAWRARQVRVDPLGRVSDPGFPPRTAVRRTRPKT

SEQ ID NO: 7380 - protein, 1106 aa, synthetic construct
  REGION 1..1106: note = Synthetic
MVWRLGLDVGTNSLGWAAVELDADTLKPKGFLKAGSRIFGAGIAGAGRDPKSGASLAVDRRAARAMRRGRDRFKQRQAALLKYLQADGFFPSDPEARRALANKDPYALRARALDEELSLPEIGRAIFHLNQRRGFQSNRKADRKDDEAGKVAIGIDRLQDRIEEAGARTFGEFLHLRRESAENRNAIPSVRTRLRPETGEGAKGDGYDFYPGRALIQAEFEAIWHAQAPHHPDTMTQAVHDCLYEIVFWQRPLKTPAVGRCSLPPYAEERLPKAHPLFQRRRLLEEVNALMIVRPGEAAVRLTPEQRDTLYRRLKDKPKVSFEKLRKDLKLDPAARFNKESEHRTELKGDEVAAVMQSKQRFGTRWLHLSLDQQWDVIARQQAVESDADDAAFRAWLEAVHALTPEQAKAVARAPLPAGYGRFGLTATTKLVAALADGRTPEGRTPDAAPIEPDRVVVYSEAVVIAGYGHHSDHRTGEIFTDAAGRPALPYYAIPLERHVMPGTADPREADDAVRHGRLTNPTVHIALGQLRQVVNRLIRAYGPPHEIAVELARELKLSDDDKKQRNLENTRNRQDAEKRSEKLREIGQRDTGANRALLKLWEELNPGNVLDRRCVYTGTQISIDMLFSNDVEVDHILPFTATLDDSNGNKIVCMRSANRDKRKRSPYDAWGHTPLWPEIAERAARLPRNKRWRFEPDAMERFEKEGGFLARQLIDTQYLGRLARDYLSSLYPVRGEDSGRVWVSPGRLTEMVRRKLGLNDLLGDHNLGADQPKNRKDHRHHAIDAVVVAILDRAMLQRIAYESGQGATDADMLRILVPTPWEGFRDDLKRTVDAIVVAHRPDHGTVSKAGLPKGGDKTAGRLHNDTAYGLTGATDAKGTDLVVHRIPIGSLKKAADIERVRDPLLRDALSAFTAGFSGKDFERRIGEFPELGPLDYRGIRRVRIIEPLTVIPIRDAAGRAYKGYKGDSNYRYDVWEMPDGKWRATVVSMFDAHQPGERPRPHPAARKVLSLQRDDMLAIDRGSGRELVRVVKFSDKQFAVAAPNEGGALKARDADGDDPFKYSYPSPNTLKAWQARQVRVDQIGRVLDPGFPARKTVRPTRKAAE

SEQ ID NO: 7381 - protein, 1105 aa, synthetic construct
  REGION 1..1105: note = Synthetic
MDMAWRLGLDLGTNSLGWAALSLDAAGAPDAILAAGSRIFGDGRDPQSGTSLAVDRRAARAARRRRDRFKQRQRALLKHLEADGLFPADPEVQQALAALDPYALRARALDEALSLHEIGRALFHLNQRRGFQSNRKADRGKDEDAGKIAIGVDRLKDAIAAAGARTFGEFLRQRRAGATGENQIPSVRTRLRAETGEGAKGSGYDFYPSRALLKDEFDAIWHAQAEHHPKVLTDEAYHRLHEIVFRQRPLRAPKVGACTLVPGEARLPKAHPLFQRRRLLEELNALMIVRAGAVAERLTPEQRDLLLLKLKDKGKVTFKSLREKVLKLDGDARFNKESEHRTELKGDEVAAEMGGKTRFGSLWPHLSTEQQWTVIERQQALESDADEAAFRTWLVETHKLTAEQARAVAGARLPAGHGRFGLTATAALLAALRDGRTPEGRGPNAPATEAGRVVVYSEAAAIAGYHHSDHRSGEVFTDAKGRPALPYYGVPLDRHIVPGTADPDEPDEAARIGRLTNPTVHIALNQLRRVVNRLIRVYGPPAEVALELARELKLSEDEKKERNRENSRNRLDAEKRSSKLAELGQRDNGGNRALLKLWEELNPENILDRRCIYSGRQISIGMIFSGAAEVDHILPFDATLDDSNANKILCLREANRDKRKRSPFEAWGGTPQWEEIAERASRLPRNKRWRFEPDAMERFAEEGGFLARHLVDTQYLGRIAHDYLRCLYPDKGDGSSHVWVSPGRLTEMVRRKLGLNGLLGDHNLGAEQPKNRKDHRHHAIDAVVTAILDRSMLQRIQRASGEGASDAELLRIIVPEPWTGFRDDLQRAVDRIVVAHRADHGTVAKAATRGRDQTAARLHNDTAYGFTGEADAKGTPIVVHRAPLGALKKPEHIDQVRDPLLRAALHDFTAGLSGKPFEDRIAAFPRLGPLDYRGIRRVRVVEPLQVIPIRDAAGRAYKGYKGDSNYRYDVWELPDGKWEQRVLQMYYAHQSGEPPRPHPAARKVLSLHRDDVLAIERGEGGRELVRVVKFSTNEFTLAPLNEGGALKSRHADKGDPFRYLYPSPSTLKAWRAREVRVDELGRVLDPGFPARKRRRVTRPGRADAD

SEQ ID NO: 7382 - protein, 1105 aa, synthetic construct
  REGION 1..1105: note = Synthetic
VEKKSRIWRLGADLGANSLGWAAIELQKIDDRYEPIGILAAGSRIFSDGRDPKSGASLAVDRRDARAMRRRRDRFQQRQRALIKYLIADGLFPADEAARKAMAAIDPYAVRARALDEVLTLPELGRALFHLNQRRGFKSNRKADRKADDDPGKIVEGIDRTREAIAEDEQEAGAEPGSWTYGKWMHMRRIGAVDANKIPRVRTRLDTEKDEAGKERGYDFYPGRDLMEEEFDAIWGAQAPHHPDVLTNDAHDRLREIIFYQRPLKAPQIGMCTLIGGHPRLPKAHPLFQRRRLLEELNALMIVRPGEVAQRLTREERDTLFLKLKDKGKVSFTSLRKTLKLDPDARFNKESENRTDLKGDEVAAAMGAKTRFDNRWVHLSIEDQWDIIARLGDVESDAQDAAFRAWLGDTYALTPEQARAVANAPLPPGYGRFGEVATRRLIDALRDGEKDGRVLVYSDAVIAADLGHHSDRRTGEIFEDKEGCPQLPYYGVALERHIMPGTGDPSHSDEMRVGRLTNPTVHIGLNQLRRIVNTLIRAYGPPAEIAIELARELKLTDDDKKRINKENNDNRLAAEKRSDKLLAIGKSDTGTNRALLKLWEELNPANVLDRRCIYTGTQISIDMLFSVAVEVDHILPFTATLDDSNGNKIVCMRESNREKCKRSPYEAWGHTARWEEIAARAAQLPRNKRWRFEPDAMEKFKDESGFQARHLVDTQYLARLSREYLATLYPGKGEGSGHIWVSPGRLTEMVRRKLGLNGLLGDHNLGADQAKNRKDHRHHAIDAVVVAIVDRKMLNEIARVSGQEGVDGRERIEIPPPWDNFRDSLRTAVNAITVSHRTDHGTASKAGLAKGKDATAGRLHNDTAYGFTGKTDAKGNSIVVRRVPLSSFKKLADLDRIRDADLKAALYQHLDGLEGKAFEKAVAAFPDLEWHPFGGVRRVRVVEPLSVIPIKDRNGRIYKGYKGDSNYRYDVWELPGGKWVNEVVSMFDAHQPGWQSAIRVANPTARKILSLHRDDVLAVERDGGARELVRVVKFSEKQFAVAPPNEGGALKARDADKGDPFKYSYPSPNTLKAWRARQVRIDEIGRVLDPGFPARTARRKTRKKA

SEQ ID NO: 7383 - protein, 1103 aa, synthetic construct
  REGION 1..1103: note = Synthetic
MSKAGTRYWRFGADLGANSLGWAAIELDGPAPNGKPFAILAAGSRIFSDGRDPKSGASLAVDRRDARAMRRRRDRFQQRQKALIKYLIADGLLPTDETARKAMAAIDPYEVRARALDEALSLPELGRALFHLNQRRGFKSNRKADRKADDDMGKIAIGIDRTRNAIAEDEEAAGVEPGSWTFGKWLYERRLVGKPVRTRLRPESADDAKGDGYDFYPGRALMEEEFDAIWAAQAPHHPDVLTNEVYERLHEIIFYQRPLKAPQIGMCTLRPGDKRLPKAHPLFQKRRLLEEINALMIVRPGEVAQRLTREERDTLFLKLKDKGKVSFATLRKTLKFDPDARFNKESENRPDLKGDEVAATMGAKTRFGTRWVHLSVDEQWDVIARIDEIESDAEDAAFRAWLVDSYDLSAEQARAVANAPLPPGYGRFGETATRKLIDALRDGEKDGRVIVYSEAVALADLGHHSDLRKGTTFTDEKGRPQLPYYGVALERHIMPGTGNPSDPEEMRVGRLTNPTVHIGLNQLRRIVNTLIRAYGPPAEIAIELARELKLTDEDKKRINRENNDNRIAAERRSEKLLAIGKPDTGGNRALLKLWEELNPANVLDRRCIYTGTQISIDMLFSAAVEVDHILPFTATLDDSNGNKIVCMREANREKRKRSPYEAWGHGARWEEIAARAAQLPRNKRWRFEPDAMEKFKDAGGFQARHLVDTQYLARLSREYLATLYPEKGEGSGHIWVSPGRLTEMVRRKLGLNDLLPDHNFGGGADQAKNRLDHRHHAIDAVVVAIVDRSMLNEIARVSGQEGVDGRERIEIPPPWKGFRDDLRAAVNAITVSHRTDHGTASKTGLPKGKDATAGRLHNDTAYGLTGEVDAKGNSIVVRRVPLISFKKITDLDRVRDADLRAALYQHLDGLEGKAFEKALAEFPRLEWHPFGGVRRVRVIEPLTVIPIKDRNGRIYKGYKGDSNYRYDIWELPDGKWEAEVVSTFDAHQPGWISKIRANNPTARKALSLHQGDLIAIEQESGMRRLMIVTQFWQNGQVRLVEHNEAGKLEERNKSKDDPYRNYSPTCGGLKKARARRVRIDELGRVMDPGFPARTARRKTRKPG

SEQ ID NO: 7384 - protein, 1099 aa, synthetic construct
  REGION 1..1099: note = Synthetic
MTQHKIWRLGADLGTNSLGWAAIELSAPINGEPVSILAAGSRIFSDGRDPKSGASLAVDRRDARAMRRRRDRFQQRQRALIKYLIADGLFPADEAARKAMAAIDPYAARARALDEVLTLPELGRALFHLNQRRGFKSNRKADRGADDDAGKIATGIDRTCDAIRDDEAAAGAEPGSWTYGKWLYERRLAGKSVRTRLRPESDEGAKGDGYDFYPGRKLMEEEFDAIWQAQAPHHPTVLTDEVHDRLHEIIFYQRPLKAPRIGMCTLIAGDERLPKAHPLFQRRRLLEELNALMIVRPGEVAQRLTREERDILFLKLKDKGKVSFASLRKTLKLDPDARFNKESENRTDLKGDEVAAAMGAKTRFSNRWAHLSVEEQWDVIARLSEVESEAEDSAFRQWLTELYDLTPQQARAVLNAPLPQGYGRFGETATRRLIDALRDGEKDGRVIVYSEAVVLADLGHHSDRRTGEIFTDEEGRQQLPYYGVALERHIMPGTGNPSDPEEMRVGRLTNPTVHIGLNQLRRIVNRLIRAYGPPAEIAIELARELKLTDEDKKRINRENNDNRLNAERRSEKLIAIGQADTGANRALLKLWEELNPANVLDRRCIYSGQQISIDMLFSAAVEVDHILPFTATLDDSNGNKIVCLRETNREKRKRSPYEAWGHTGRWDDIAARAAQLPRNKRWRFEPDAMEKFRDESGFQARHLVDTQYLARLSREYLATLYPEKGEGSGHIWVSPGRLTEMVRRKLGLNDLLPDHNFGGGADQAKNRLDHRHHAIDAVVVAIVDRRMLNEIARVSGQEGAEGRERIIIPDPWDGFRDDLRTAVNAITVSHRTDHGTASKAGLPKGQDATAGRLHNDTAYGFTGETDAKGNSIVVRRVPLSSFKKLADLERVRDPDLKAALYQHLDGLEGKAFEKAIGEFGDREWHAYRNVRRVRVVEPLTVIPIRDRNGRIYKGYKGDSNYRYDVWELPDGKWVNEVVSMFDAHQPGWLSGIRAANPTARKILSLHRDDVLAIERNGGDRELVRVVKFSEKQFAVAPPNEGGALKGRDADKEDPFKYSYPSPNTLKAWHARQVRIDEIGRVLDPGFPPRKARRKTRKPG

SEQ ID NO: 7385 - protein, 1097 aa, synthetic construct
  REGION 1..1097: note = Synthetic
MTGKKHIYWRLGADLGANSLGWAAIELDARGLPRAILAAGSRIFSDGRDPKSGASLAVDRRDARAMRRRRDRFQQRQRALLKYLVADGLFPEDEGERKALAALDPYALRARALDEALSLHELGRALFHLNQRRGFKSNRKADRKADDDAGKIAIGVDRAREAMAENGARTYGEWLHRRRASATDANAIPPVRTRLRPESGEDAKGDGYDFYPGRDLLEEEFAAIWEAQAAHHPDVLTDDVYERLFEIVFYQRPLKAPQIGMCTLIAGDRRLPKAHPLFQRRRLLEELNALMIVRPGEVAQRLTREERDTLFLKLKDRNKVSFESLRKTLKLDPDARFNKESENRTELKGDEVAAAMGSKTRFGNRWVHLSIEEQWAVIERLGDVESDAEDAAFRAWLAERYELTPEQTRAVTNAPLPQGYGRFGETATRKLIDALRDGEKDGRVLVYSEAVTAAGLGHHSDRRTGEVFEDEEGRPQLPYYGVALERHIMPGTGDPSDSDEMRVGRLTNPTVHIGLNQLRRIVNRLIRAYGPPAEIAIELARELKLTDEDKKRINKENNSNRLDAERRSEKLLAIGKPDTGANRALLKLWEELNPANVLDRRCIYSGVQISIDMLFSAAVEVDHILPFTATLDDSNGNKIVCTREANREKRKRSPYEAWGHSARWEEIAARAAQLPRNKRWRFEPDAMEKFKDDGGFQARHLIDTQYLARLSREYLATLYPDKGEGSGHIWVSPGRLTEMVRRKLGLNDLLPDHNFGGGADQAKNRLDHRHHAIDAVVVAIVDRGMLNRIARASGQEGAEGRERIIIPEPWEGFRDDLRTAVNAITVSHRTDHGTASKAGLPKGKDATAGRLHNDTAYGFTGESDAKGNSIVVRRVPLSSFKKLADIDRVRDPELKAALYQHLDGLEGKAFEKAIGEFGSREWHPYGGVRRVRVTEPLSVIPIRDRNGHIYKGYKGDSNYRYDVWELPGGKWVNEVVSMFDAHQPGWQSAIRAANPTARKVLSLHRDDVLAIERNGAERELVRVVKFSEKQFAVAPPNEGGALKARDADKGDPFKYSYPSPNTLKALRARQVRIDELGRVLDPGFPARTKQRKTRKPN

SEQ ID NO: 7386 - protein, 1096 aa, synthetic construct
  REGION 1..1096: note = Synthetic
MANDRKIWRLGADLGANSLGWAAIALHKDGDRYEPVAILAAGSRIFSDGRDPKSGASLAVDRRDARAMRRRRDRFQQRQRALLKYLTADGLSPADAAERKALEQLDPYALRARALDEALPLHHLGRALFHINQRRGFKSNRKADRKADDDAGKIAVGVGRLEEKMKEKGARTFGEFLHMRRLEATDPNAIPSVRTRLRPESGEGAKGDGYDFYPGRAQLEAEFEAIWEAQAPHHFDMLTPDVYQRLFEIVFHQRPLRAPQIGKCTLISTDARLPKAHPLFQRRRLLEEINALMLVRAGEKAQRLTHEQRDLLLLKLKDKAKVRFESLRKTLKLDPDARFNKESENRTELKGDEVAALMGGKTRFGNRWVHLSPDEQWAVIERLEAVESETEDADFRAWVGATYDLTPEQAKAVANAHLPAGYGRFGDSATRRLIDALRDGEKDGRVIVYSEAVELAGLGHHSDFRDGVVHDALPYYGVALERHIMPGTGEPSDAEEMRVGRLTNPTVHIGLNQLRRVVNALIRAYGPPAEIAIELARELKLTDDDKKRRNKENNDIRIAAEKRSEKLLAIGQRDSGANRALLKLWEELNPANVLDRRCIYSGQQISIDMLFSAAVEIDHILPFTATLDDSNGNKIVCTREANRVKRKQSPYEAWGHTGQWDAIAARAAQLPRNKRWRFEPDAMETFKSEEGFLARHLVDTQYLSRLAREYLSILYPDKGEGSGHVWVSPGRLTEMVRRKWGLNDLLPDHNFGGGADQPKNRLDHRHHAIDAAVVALVDRKLLMQIAKASGEEGAEGRERIIIPPPWESFRDDLRRVVNAIIVSHRTDHGTASKAGLPKGKDATAGRLHNDTAYGLTGESDAKGNSIVVRRVPITNIKKLADIDKVRDADLKAALYRHLDGLEGKALEKAVAEFGDREWHAYPGIRRLRMVEPLTVIPIRDKEGRVYKGYKGDSNYRYDVWEMKDGSWQAEVVSTFDAHQPGWASAVRAANPVARKVLSLHQNDLLAIERDGEARKLMRVVKFGQNGQITLVEPQESGDLKRRDATPRDEDPFKYFAPTCGGLKKAKARQVRIDEIGRVLDPGFPARTARRKTRKRT

SEQ ID NO: 7387 - protein, 1095 aa, synthetic construct
  REGION 1..1095: note = Synthetic
MDGGAMDWRLGLDLGANSLGWAALRLDRAGDPIGILAMGSRIFSDGRDPKSGASLAVDRRAARAMRRRRDRFKQRQAALLKYLIRDGLFPADQADRQRLADEDPYALRARALDEELSLFEIGRALFHLNQRRGFQSNRKADRGQDDEAGKIAVGVDRLNQQMEEQGARTLGEFLHQRRRAATDANHIPSVRTRLRPETGEGAKGDGYDFYPSRALIAEEFEEIWAAQAPHYPDTLTQQVHDRLYEIIFHQRPLRAPQVGQCTLVAGETRLPKAHPLFQKRRLLEEINALMIVRPGEIAQRLTPEERDTLYLKLKDKRTVSFATLRKTLKLDSAARFNKESENRTELKGDEVAAELGAKTRLGTRWQHLSGDQQWEVVHRLMALESQADEAAFRDWISQTYDLLPEQAAAVLGARLPQGHGRFGPTATTTLIDSLLHDRTEDGRVVVYSEAVQRSGLGHHSDLRHDRDDEDVTELPYYGVALERHIMPGTAEPTDPEEMRIGRLTNPTVHIGLNQLRHVVNRLIRAYGPPKEIAIELARELKLSEDEKKKRNSENRDNRLAAEGRSKKLEEIRQRDTGANRALLKLWEELNPGNVLDRRCIYTGEQISIDMLFSDRVEVDHILPFAQTLDDSNGNKLLCLREANREKRRRSPYEAWGHTDRWPDIAERASRLPKPKRWRFEPDAMQRFATEDGFLARHLVDTQYLGRLAREYLSWLYPGRGEGSGHVWVSPGRLTEMVRRKLGLNDLLPDHNFGGGADQPKNRLDHRHHAIDALVVAIVDRGMLQAIARASGQDGSEGRERIHIPAPWDGFRDDLRVAVNGIIVSHRPDHGTVAKAGLARGRDQTAGRLHNDTAYGLTGETDAKGNSIVVRRIPLSAIKKPADIARVRDPLLRNALAEFTKGLDGKAFEARIGRFHELGPLLYRGIRRVRVVETLTVIPIRDAEGRAYKGYKGDSNYRYDVWEMPDGKWRCQVVSMFDAHQSTEQARPHPAARKILSLQRNDILAIERTEGDRELVRVVKFSEKQFAVAPPHEGGSLKTRDGNADDPFRYLYPSPNTLKGWRARQVRIDELGRVLDPGFPARKSVRRTRPRAAPVD

SEQ ID NO: 7388 - protein, 1094 aa, synthetic construct
  REGION 1..1094: note = Synthetic
MKYRVGFDLGTNSLGWAVVRLNASGEPDRIEVAGSRIFSDGREPKSGASLAGARRDARAMRRRRDRFKQRQAALIKYLTQAGFFPADESERKALSALDPYELRARALDEALPLAHLGRALFHLNQRRGFKSNRKTDRGKNDDTGKIRIGVARLYEQMRDADARTLGEFLHKRRAAASDPNAIPHVRTRIVTLAAEDGKASDVYDFYPDRQTLEEEFEAIWEAQTSHHPEALTEERRAQFYEIIFHQRPLKQPKIGFCTLLPPEKRLPKAHPLFQRRRLLEEVNALRIVLPGKETRALEKAERDALLSKLNQRKKAAYESLRKALKLDPDARFNKESDNREDMIGDEIAAEMAHKSRFGKVWLGMSAEAQAQVIERLRGLESDADADDFEAWLRDDHGLAQEQAKAVTAANLPEGYGRFGETATRKLIAALEQEVIVYSEAVQRAGLGHHSDLRDGQVWTDKKGNPALPYYGAVLERHIVPGTADPNETDDALRIGRLTNPTVHIGLNQLRRVVNALMRRYGQPQEIAIELARELKLSDDRKKEINTRNRENRKAAEKRSQKLRNIGQADKGGNRALLKLWEELNPENVLDRRCVYTGRVISIDMLFSGAAEVDHILPFSVSLDDSNGNRILCLREVNRIKRQRTPWEARDDLRAHFGPDAGWEAIAARAARLPREKRWRFEPDAANRFDAQGGFLARHLTDTQHLSRLARSYLSALYPETGEGSGHVWVSPGRLTEMLRRAWSLNHHLPDHNIAGAANQPKNRKDHRHHAIDAIVVALADRAMLNRIARESGKEGHEAAGRLVASIPEPWEGFSDEVGRAVRAITVSHRPDHGTASKAGRAKDKDATAGRLHNETAYGLTGEKDARGLDIVVTRKPLSAFKKSADLDAIRDDDLKQKLKAWAAGKEGGAFEQAMRSFGDPERGPRSHPGLRRIRVTEPLSVIPIRDRDGRPYKAYKGDSNYRFDIWELKTGKWKDEVVSMFEAHRPNWTSPIRAGNPTARKVLSVRQNDVIAIERENGPELMRVVKFSAGSLALAPPQEAGSLKARDADKNDPFKYVYGSPSSLQRWKARQVRIDELGRVFDPGFAVRSRRSSE

SEQ ID NO: 7389 - protein, 1093 aa, synthetic construct
  REGION 1..1093: note = Synthetic
MIMPWRLGLDMGAGSLGWCAVRLDEQGQPIGILAAGAHIFGDGRTPARGDQQGTPLAVERRAARAMRRRRDRFKRRQAALLTQLAAHGLFPADPVRAKALELLDPYELRTRALDQPLPLEHLGRALFHLNQRRGFKSNRKTDRGAEEEAGKIAVGVDRLRAAMRDAGARTMGEFLHRRRLSAPDANAIPSVRTRLRPETGEDAKGDGYDFYPGRDLVEEEFKAIWAAQVPHHPAVLTPAVHDLLHRTIFHQRPLLRPRIGTCTLVDGEQRLPKAHPLFQRRRLLEEVNALRIVRPGTAAAPLTRMQRDLLLLKLKDKAKVGFESLRKLLKLQPEARFNKESEHRRDLAGDEVFAQMAARTRFGTAWAHLPVETQWAVISRVLEEEETEPLLAWLQAEHGLDAERAKAVAGARLPQGYGRFGETATRRLIEALTADVITYDKAVVAAGLGHHSDRRTGEVLDDLPYYGITLERHLLPGTGDRSDPEEMRIGRLTNPTVHIALNRLRRVVNRLIRTYGRPAEIAIELARELKLTAEEKQRLSKENNRNRAEAEVRSRKLAELGQPDTGANRARLKLWEELNPDNVLDRRCVYSGVQISPAMLFTDVVEVDHILPFDSTWDDSHANKILCLREWNRRKRKQSPFQAWGHTPDWPDIAARAARLPREKRWRFEPEAMQRFDEKGGFIARHLVDTQYMSRLAREYLEALYPERGEGSSHVWATPGRLTELIRRKLGLNELLPDHNYTTGKNRLDHRHHAIDAAVVAITDRSLLQRMARASALEGDEGRERVVVIPPWESFHDDLRDVLTVMTVSHRSDHGTASKAGLPKGRDQTAGRLHNDTAYGLTGLKDSRGNDLVVSRKPLTALKPADLEPVPDGTAITTGVRDPALRRALHRFTCGHDGKAFLQALAAFAKDGPLPFRGIRRVRRIEPLKVIPIRGADGLPYKGYKGDSNYRYDVWELPDGTWKAEVLSMFDAHQPGWTSAVRAGCPTARKVLSLHQDDIIAIESEGGSRELKRVVKFGQNGQITLAAPNEAGDLKRRNDLPLDQDPFVYSSPTAGGLKRLKARQVRVDELGRVQDPGFPARKVRRRTRAKVGT

SEQ ID NO: 7390 - protein, 1092 aa, synthetic construct
  REGION 1..1092: note = Synthetic
MRWRLGADLGTNSLGWAVIELDDDDVPIRVVTAGSRIFSDGRDPKSGASLAFDRRAARAMRRRRDRFKQRQAALLKHLADAGFFPAGETERKALEGLDPFALRANALREKLPLHHLGRALFHLNQRRGFKSNRKADRGKNDDSGKIRVGVGRLHEAMRDAGAETLGDYLHGRRAASADPNTITSVRTRLRPETGEGARGDGYDFYPDRAMLEEEFKLIWERQAPHHPETLTPENEKRFFEIIFHQRPLKQPKIGMCTLTGNEPRLPKAHPLFQRRRLLEEINALRIVRAGANPEPLTLEQRNLLYVRLKDKKVVSFDTLRNKVLKLDPDVRFNKESENRKDIKGDEVAAELGAKARFGTLWQHLSDEARCEVVSRIREQESDEDEAMLLAWLQETHKLAPEQARATVGARLPEGYGRFGETATKKLIEALKAEVIVYSEAVEKAGLGHHSDKRTGEIFTDAKGRPALPYYGVPLERQIMPGTGDPADPEEMRVGRLTNPTVHIGLNQLRRVVNALIRRYGPPEQIAIELARELKLDDKRKQEINAKNRQNRDAAVKRSEKLGEIGIADKGANRALLKLWEELNPANVLDRRCVYTGTLISIDMLFSGAVEVDHILPFSATLDDSNGNRLLCMREANREKRKRSPYDAFGHRTDWEEIAARAARLPREKRWRFEPDAMSRFDVQGGFIARQLVDTQYLSRLAREYLSSLHPDSGEGSSHVWVSPGRLTEMLRRSWGLNSALPDHNFGGGADQPKNRKDHRHHAIDAMVIAVTDRRRLMEIAREAGQHGHESANRMTSDLSEPWEGFSDEVREVVRGIVVSHRPDRGTASKAGLPKGHDATAGRLHNETAYGLTGEKDEKGNAIVVHRVPLTALKKTDDIDAVRDPDLRTALHEWTFGLEGKDFEARLRKFPELGPLPFRNIRRLRVVEPLSVIPIRDRDGRAYKGYKGDSNYRYDVWEMKDGKWQAEVVSMFDAHQPGWMSTVRQQNPTAKKVLSLHRDDLIAVEPHGTLELVRVVKFSERQLALAPPNEAGALKARAADKEDPFNYLYPSPNTLKSWKARQVRIDELGHVSDPGFPARKAKRRKRANLVAAK

SEQ ID NO: 7391 - protein, 1090 aa, synthetic construct
  REGION 1..1090: note = Synthetic
MMKWRLGIDLGATSLGWCGFLLDEDGQPAAIIGAGARIYSDGREPKSGASLAVDRRNARALRRRRDRFKRRQAALIKHLTKDGVFPATPGDRKLLEGLDPFELRSRALDERLPLYHIGRAFFHLNQRRGFKSNRKADRKADDEAGKIAVGIDRLRMAIEESGARTFGDFLHNRRSAATDCNRIPSVRARLRPEAGDGAKGDGYDFYPGRSLLEEEFDAIWQAQAPHHPEALAQEVHDRLFEIVFHQRPLKEQEVGACMLLPEEKRLPKAHPLFQQRRLLEELNALMIVRPGEKAQRLMMEERDLLFLKLKDKAKVKFESLRKVLKLDPETRFNKESENRPELKGDEVSALLSDKKRFGPRWAHLSADAQWEVVARLRAIETDQDDAKFCAWLSAIHALSADEATSVASVGARLPQGYGRFGHTATSRLIKALRHETKDGRVIVYSEAVERADLGHHSDLRTGEIHMTLPYYGAVLERHIMPGTGEPSDPDEMRIGRLTNPTVHIGLNQLRRVVNRLIRAYGPPKEIAIELARDLKLTDDEKRQRNKENNDNRIAAEKRSKKLLEIGQPDTGANRALLKLWEELNRDNALDRRCIYTGEQISIDMLFSGAVEIDHILPFEATLDDSNGNKIVCMREANRFKSKRSPYEAWGHNSQWDEIAARAAHLPNNKRWRFEPDAMERFQDEGGFLARHLVDTQYLSRLAREYLAALYPEQGEGSSHVWVSPGRLTEMVRRKLGLNELLPDHNFAGGDASKNRLDHRHHAIDAAVVAIVDRSMLQAIARISGQDGSEGRERIIVPEPWKGFRDDLRRVVNDIVVSHRADHGTVSKARLQKGLDTTAGRLHNETAYGLTGETDAKGNSVVVTRKPLGGLSPSDLDIIRDVDLKEALRDFTKGRQGKDFEKALADFAYLGPLQYRGIRRVRAVEPLKVIEIRDSSGHVYKGYKGDSNYRYDVWELADGKWVPEVVSMFDAHKPGWSSRIRAAHPTARKVLSLQQNDVIAIEPEGGERRLMRVVKFGQNGQITLAAPNEAGDLKRRDAAPNDEDPFKYIAPTAGGLKRVKARQVRIDELGRVQDPGFPARIARRQTRRKST

SEQ ID NO: 7392 - protein, 1090 aa, synthetic construct
  REGION 1..1090: note = Synthetic
MRWRLGLDMGAGSLGWCAVGLDDQGYPDSILAAGSHIFGDGRAPSRGDQQGTPLGVERRAAKAMRRRRDRFLGRQAKLLARLTLAGLFPADPVRAKALELLDPYVLRARALDEALPPHQLGRAFFHLNQRRGFKSNRKTDRGVDDEAGKIAIGIDRLRAAIAAAEARTMGEFLHKRRQSAPDVNQIPSVRTRLRPETGEEAKGDGYDFYPGRELVEEEFDAIWDAQAPHHPSLLTPDNRALLHEAIFYQRPLKAPKIGKCTLLNNEPRLPKAHPLFQRRRLLEEVNALRIVRPGEVATKLTCEQRDLLMLKLKDKAKVSFETLRSKVLKLEPEARFNKEGENRTELVGDEVCAQMSAKTRFGKAWAHFTDEKRWAILSRLIEEEDEERLDTWLRTEHGLDAEQARAVAGARLPAGFGRFGETATRRLIAALQAEVIVYSEAVVAAGLGHHSDMRTGEVLAELPYYGMTLERHLLPGTGDKADPEELRIGRLTNPTVHIALNRLRRIVNRLIKTYGRPEQIAIELGRELKLTDEDKQRLSRQNNRNRADAEARSKKLAELGQADNGANRARLKLWEELNRENALDRRCIYSGQQISIAMLFSDAVEVDHILPFDATLDDSNNNRILCLREWNRRKRKQSPYEAWGHTDYWPDIAARAARLPKEKRWRFEPDAMQRFSAEDRFIARHLVDTQYMSRLAREYLEALYPEKGEGSGHVWVSPGRLTELIRRKLGLNELLPDHNFAGVKNRLDHRHHTIDAFVVAVTDRSLLQGISRASALEGEEGRERVIVPEPWDGFREALRTTLNTITVWHRQDHGTASKAGLAQGRDQTAGKLHNDTAYGLTGRQDTKGNDLVVSRKPLMSLKPADIEPVPDVAPITKGVRDRDLRKALAHFTQATEGKGFLQALERFTRLGPLHFRGIRRVRLIQPLAVIPIKGPGGVPYKGYLGGENFRCDVWEMPDGAWKPEVTSMFQAHQPGWTSAIRAACPTARKVLSLHKRDMIAIEREEGVRTLMVVAQIWSNGQVTLVEPHEAGDLNKRNKSEDDPFGYFMPTAGGLKRLKARQVRVDELGRVQDPGFPARKARRRTRPKQVD

SEQ ID NO: 7393 - protein, 1089 aa, synthetic construct
  REGION 1..1089: note = Synthetic
MPWRLGLDLGSGSLGWCALALDQSGAPVQILGAGSRIFGDGRAPSRGNLQGTPLAVERRAARAMRRRRDRFKRRQAALLKYLNLDGLLPEDPTERNAVERLDPFALRARALDEALPLHQIGRAIFHLNQRRGFKSNRKTDRGRDDDVGKIAIGIDRLREKIEETGARTFGELLHLRRAGASDPNSIPSVRSRLRPEPDDARTGDGYDFYPGRDLITEEFEAIWSAQARHHPEQLTPEVHDRLFEIVFHQRPLKRPKVGSCTLVSGECRLPRAHPLFQHRRLLEEVNALTIVHPGEAPVRLTMEQRNALLLRLKVSNKVSFESLRKLLKIDPDARFNKETLNRKELKGNEVAAELSAKARFGKRWFHLSHEEQWAIISRLLEEEQDSVLHQWLVDSWELTDDQAKAVAKARLPQGYGRFGHTATIKLIAALEADVVVYSQAVEAAGLGHHSDLRTGASFLKLPYYGVTLERHLLPGTAEPSDPEEMRIGRLTNPTVHIALNQLRRVVNRLIRRYGMPAEIAVEIARDLKSTDDDRKRFERENRANRLAAESRSRKLREIGQRDTGANRQLLKLWEELNAENSLDRRCIYSGRQISVDMLFNGTTEVDHILPFEETWDDSNANKTLCLREANRAKGKRSPHDAFGHTADWDAISARAARLPDGKRWRFQPDAMRRFDLEGGFLARHLVDTQYLSRLAHLYLSALYSERGEGSGHVWVSPGRLTELVRRKLGLNDLLPDHNVKTAAEHSKNRLDHRHHAIDAAVVAIVDRRMLQAISRASGQEGAEGSARIRIPNPWDGFRDELRRTVNDIVVSHRADHGLKPKAALKQMPPPHSTAGRLHNDTAYGITEAIDENGNTVVVHRIPLIALKPADVETGGKRRVADDTLRTALADFTRGKDFDRTLKDFPKLGPLHFRGIRRVRVLEPLTVIPIRDEKGRVYKGYKGDSNYRYDVWELKDGKWEHEVVSMFDIHQPGWSSRIRDANPTARKVLSLHQSDLVAIEPEGGERKLMRVVKFGQNGQITLAEPHESGDLKRRDAVPVEEDPFKYIAPTAGGLKKLRTRQVRIDEVGRVFDPGFPARKRRGTFSPAPER

SEQ ID NO: 7394 - protein, 1089 aa, synthetic construct
  REGION 1..1089: note = Synthetic
MRWRLGADLGTNSLGWAVIELNEDDSPIGIVTAGARIFSDGRDPKSGASLAFDRRAARAMRRRRDRFKQRQAALLKYLTEAGFLSAAEVERKALEGLDPFELRARALREKLPLHHLGRALFHLNQRRGFKSNRKADRGKNDDSGKIRVGVARLHEAMRDAGAETFGDYLHGLRAASSDPNAIASVRTRLRPETGEGARGDGYDFYPDRQMLEEEFNLIWQRQAQYYPETLTPENEKRFFEIIFHQRPLKEPKIGTCTLVPGEPRLPKAHPLFQRRRLLEEINALRIVTAGANPASLKLQQREVLYLKLKDKKAVSFETLRKALKLDPDARFNKEGENRKELKGDEVAAELGAKTRFGTLWQHLSDEAQWEVVSHIREQESDEDEAMLVAWLEETHKLTPEQAHATAGARLPEGFGRFGETATKKLIAALKAAVVVYSEAVEKAGLGHHSDFRTGEVLDELPYYGAVLERHIMPGTGDPADPEEQRVGRLTNPTVHIGLNQLRRVLNRLIKRYGPPEQIAIELARELKLDEERKREINAKNRQNREAAVKRSEKLGEIGIADKGANRALLKLWEELNPGNVLDRRCVYTGKLISVDMLFSGAVEVDHILPFSATLDDSNGNRLLCMREANREKRKRSPYEAFGHRDDWEDIAARAARLPREKRWRFEPDAMSRFDAQGGFIARQLVDTQYLSRLAREYLSSLYPGSGEGSGHVWVSPGRLTEMLRRSWGLNSALPDHNFGGGADQPKNRKDHRHHAVDAVVIGVTDRRLLMKIAREAGLRGHEAANRVTADLAEPWEDFSDDVRDVVRTIVVSHRPDHGTASKAGLPKGHDATAGRLHNETAYGLTGEKDEKGNDLVVHRIPFHALKKTADIDALRDADLRAALHEWTFGLDGKDFEARLRKFPELGPLQFRRVRRARVIEPLSVIPIRDRSGRAYKGYKGDSNYRYDVWEMKDGKWQAEVVSMFDAHKPGWTSKIRKENPIAKKVLSLHQDDVLAIEQDGGTRKLVRVVKFGQNGQITLAEPQEAGDLKKRDAVSTDIDPFKYFSPTPGGLKRARARQVRVDELGRVSDPGFPARKAARRRPSKRAAAE

SEQ ID NO: 7395 - protein, 1085 aa, synthetic construct
  REGION 1..1085: note = Synthetic
MKGGTMRWRFGADLGTGSLGWAAIELDADNVPIRLIAAGSRIFGAGRDPKSGASLAVDRRAARAMRRRRDRFKRRQAALLKHLEMAGLFPANAAERAALAILDPFELRAKALREPLPPHHIGRALFHLNQRRGFKSNRKADRGKDAEDGKIKLGVNRLYEAMRDKGAETLGEFLHERRAAASDANTIPGVRTRLRPEPGEGKRGDGYDFYPDRRMLEEEFDLIWERQAVHHPAVLTLENRKRLFEVIFHQRPLKQPKVGTCTLVVGEERLPKAHPLFQRRRLLEELNALRVVRPGASAEPLTREQRDLLYLKLKDKRSVTFESLRKLLGLEPEARFNKESENRREIKGNEVAAELGAKTRFGKRWAFLSDEAQWEIISKIRELESDEDEARLLAWLRDTYELEPEQSRSTAGARLPEGFGRFGLTATTRLIAALQSDVTIYSEAVKKAGFAHHSDFRTGEAFDELPYYGVVLERHIMPGTADPTDPEELRIGRLTNPTVHIGLNQLRHVINRLIKCYGRPEQVAIELARELKLDDERKREINKRNLQNREDATKRSEKLVNIGVADKGGNRALLKLWEELNLDNALDRRCVYTGRQISIEMLFSGAVEVDHILPFGATLDDSNDNRLLCMREANREKRKRSPYEAFGNRPDWAEIAARAARLPRGKRWRFEPDAMSRFDNQGGFIARQLVDTQYLSRLAREYLAGLFPDVGEGSGRVWVSPGRLTEMLRRSWGLNSLLPDHNFGGGADQPKNRRDHRHHAIDAIVVAVTDRHLLQSISREAGRRGAEAANRMTADLPMPWEAFRDQVGEVVSRIVVSHRADHGTTAKKALPKGRDATAGRLHNDTAYGLTGQKDAKQNDLVVHRVPLDGLTKAADIESVRDPELRKALLVWTRGLEGKAFETKLLKFPELGPLQFRGIRRYRKVEPLSVIAIRDKDGRAYKGYKGDSNYRYDVWELKDGKWIAEVVSMFDVHQPGWSSKARHENHNAKKVLSLRQDDMLAIEPDANGRKLVRVVKFDQKGQVTLAEAHEAGDLKRRNDSPVDIDPFKYFAPTPGGLKRIKARQVRVDELGRVLDPGPRASPEAGG

SEQ ID NO: 7396 - protein, 1082 aa, synthetic construct
  REGION 1..1082: note = Synthetic
MNWRLGLDLGAGSLGWCALALGEEGQPAGILAAGSRIFGDGRAPARGEQAGTPLAVERRTARAMRRRRDRYQRRRTGLLRQLTTDGLFPEEPEARLALQGLDPFELRARALDQPLSPHEIGRAFFHLNQRRGFKSNRKADRGTDKETGKIAVGIDRLRTAIEASGARTFGEFLHLRRRNAPDQNRIPSVRTRLRPEPGEGAKGDGYDFYPGRALIEEEFEAIWEAQRQFHPDRLTEAVHDRLHEIVFHQRPLKEPKVGTCTLVPGETRLRKAHPLFQKRRLLEEVNALLLVRTGETAQRLTREQRDLLYLRLKDKQKVSFETLRTRVLKLDPSTRFNKESESRSDLKGDEVAALLGDRKRFGTAWAHLPAERQWAVVERLLDVETDEEAAALQAWLQQEHDLPAERAAAVVAAAGRLPQGYGRFGETATRGLIAALEAEVIVYSEAVVKAGFGHHSDFRDGEVHAELPYYGAILERHILPGTGDPADPEELRVGRLTNPTVHIGLNQLRRVVNALIRTHGRPAEIAIELARELKLDADEKARRSRENAKNRIEAEKRSQKLQEIGQRDTGANRNLLKLWEELNPDNVLDRRCVYSGRQISIDMLFNGSTEVDHILPFDATLDDSNGNRILCLREANRDKRKRSPFEAWGHTDRWPEIAERAARLPREKRWRFEPDAMKRFADLGGFHARHLTDTQYLSRLSREYLSALYPEKGEGSSHVWVSPGRLTEMVRRKLGLNDLLPDHNIGGGAEHAKNRLDHRHHTIDAAVVAVVDRGLLNEMARASGQEGRDGAERVIVPEPWPGFREDLRRAVNAIVVSHRPDHGTASKAGLPRGRDQTAGKLHNDTAYGLTGEADGRDNQLVVHRVPLGALKPGDLDRVRDCKLRKALQAFTAGREGKEFERAVARFAEVAPPPFRGLRRVRVLEPLSVIPIRDADGRAYKGYKGDSNYRYDVWELPDGRWVAEVVSMFDAHQPGWTSAIRADCPTARKVLRLHRDDVLAIERTGERELVRVVKFRQTGQLTLAAPEEAGDLKKRDAASDQSDPFKYLYAAAGTLRAWKARQVRLDELGRVFDPGPRSRVETA

SEQ ID NO: 7397 - protein, 1082 aa, synthetic construct
  REGION 1..1082: note = Synthetic
MALNYRIGVDLGTASLGWAIVELNRDDVPIRLIAAGSRIFSDGRDPKSEASLAVDRRAARAMRRRRDRFKQRQAALLKHLAGVGLFPADEAARRELAGLDPYELRARALHEALPLNHIGRALFHLNQRRGFKSNRKTDRGKADDEGKIRLGVARLQEAMHEKGSATLGEFLHGRRAAATDPNQIPSVRTRLRAESGEGARGDGYDFYPDRRMLEDEFEAIWESQQVHHPAVLTDEIKQRFFEVIFYQRPLKQPEIGTCTLVAGERRLPKAHPLFQKRRLLEELNALRIVWPGVQAELLSREQRDLAYLKLKDKRAVRFESLRKALKLDPDARFNKESENRSELKGDEVAAELGAKSRFGGRWGHTAPADQWEIVSRIQALESDDDEAQFCVWLSERYGLDSEQARAVAAARLPQGFGRFGLTATTRLIKALQDEVIVYSEAVQKTGLGHHSDFRNGEVLAELPYYGIALERHIMPGTGDPGDSDEMRVGRVTNPTVHIGLNQLRRVVNRLIKRYGPPRQIAVELARELKLDDQHKREINGRNRQNREAAERRSQKLVDIGIADKGANRALLKLWEELNPDNALDRRCVYTGRQISIEMLFSGAVEVDHILPFAATLDDSNANKLLCLREANRNKRRRSPFEAFGQGADWEEIAARAARLPREKRWRFEPDAMARFDTEEKFLARQLVDTQYLSRLAREYLGVLFPDKGEGSGRVWVSPGRLTEMLRRSWGLNHLLPDHNLGGGADQPKNRRDHRHHAIDAIVVAVTDRHLLQAIAREAGQRGHEAANRMTADLPVPWPDFDRDVGQVIRQVVVSHRADHGTVSKAGAAKGQDSTAGRLHNDTAYGLTGQTDEKGNTIVVRRVPLTALKKPTSIEAVRDDELRKALSVWTRGYDGKAFEARLSRFPELGPLQFRGIRRVRVVEPLTVIPIRDSSGRVYKGYKGDSNYRYDVWELKDGKWVAEVVSMFDAHQSSWTSPVRRENPTARKVLSLQQNDIVAIEPEGKERELMRVAQLRQGGQITLAACHEAGDLKRRDAESNEVDPFKYFSPTAGGLKRVRARQVRVDELGRVLDPGSRDRERGAA

SEQ ID NO: 7398 - protein, 1082 aa, synthetic construct
  REGION 1..1082: note = Synthetic
MAWRLGCDLGTNSLGWCALRLENGKPVGILAMGSRIFNDGRDPKSKDSLAVDRRTARSMRRRRDRFVQRQEALLKHLAQDGLFPATPEEAQALQSLDPYLLRAAALDVKIPPHHLGRAFFHLNQRRGFKSNRKTDRRAGDDTGKIAIGVDRLRDAIGASGARTYGEFLHLRRSAARDANTIPSVRARLRPESGETAKGDGYDFYPGRALIEEEFEALWQAQRPHYPEILTPEVHNRLYEIIFNQRKLKAPRIGTCTLVAGEQRLAKAHPLFQRRRLLEEVNALLIAPPGEEPKRLTLEQRNLLLLKLQDKRKVGFASLRKALRLPEETRFNKERDHRADMPGDEVTAELGGKTRFGNLWRHFSWERQWEIVQKLKEEEDPATLRHWLEEQFPDLSDDQKTAIAAARLPEGYGRFGLTATLKLIEALQSGVRVYSEAVAAAGLGHHSDRRTGEIFTDKKGRIALPYYGVALEQHIMPGTANPDDPEELAIGRLTNPTVHIGLNQLRRVVNSLIRAHGLPEEICIELARDLKFTEERKKELTAQNAKNQQEAIRRGEKLREIGQADTGANRALLRLWEELNPNVLDRRCIYTGWQISIDMLFNGSVEVDHILPFAATLDDSNDNKILCLREANRFKRKRSPYEAWGSTPEWEGIAQRAAHLPRGKQWRFQPNALQQFEESGGFQARQLVDTQYLSKLAHEYLQVLYPEKGVGSRHVRVSPGRLTELVRRKLGLNTLLPDHNFAGGADHPKNRLDHRHHAIDAAVVAVIDTALLNEMSRASAQDGTEGRERVIVPDPWPTFRDDLRQAVEKIIVSHRPDHGSTGKSGLKPGQDQTAGKLHNDTAYGLTGQKDAKGKEQVVHRVPLTSLEAKDFPQVRDEKLRQALESFTRGLTDKKAFEARLRDFSRLGPLPYRGIRRVRLLETLTVIPVRDAQGRAYKGYKGDSNNRYEVWELPNGKWVSEVVSMFQAHQQDYQSPIRAARPTARKILRLHQNDLLAVEQDSGTRQLMRVVKFSQKGELILAPPHEGGALKARDADQDDPFKYLNTSASGLKKLKARQVRIDEVGRVCDPGFPPRTARRKTRTA

SEQ ID NO: 7399 - protein, 864 aa, synthetic construct
  REGION 1..864: note = Synthetic
VLTNDVHDRLHEIIFYQRPLKAPQIGMCTLIAGDPRLPKAHPLFQRRRLLEELNALMIVRTGEVAQRLTREERDILFLKLKDKGKVSFATLRKTLKLDPDARFNKESENRTDLKGDEVAAAMGAKTRFGNRWAHLSAEEQWEVIARLEEVESDADDATFRAWLTEAYALTPEQARAVANAPLPPGYGRFGEVATRRLVDALRDGEKDGRVLVYSEAVIAAGFDHHSDLRTGEIFEDAQGRPQLPYYGVALERHIMPGTGDPSHSDEMRVGRLTNPTVHIGLNQLRRIVNTLIRAYGPPAEIAIELARELKLTDDDKKRINKENNDNRLAAERRGLKLEQLGQRNSGANRALLKLWEEINSENVLSRPCVYCGENIGIETLFSNSVNVDHILPFALTLDDSNGNKIVCHTRCNQAKRRQSPFEAWGHTPRWEGISARAAQLPKNKRWRFEPDAMEKFKDESGFQARHLVDTQYLARLSREYLATLYPDKGEGTGHIWVSPGRLTEMVRRKLGLNDLLPDHNFGGGADQAKNRLDHRHHAIDAVVVAIIDRSMLNAIAKASGEEGAEGRERIIIPEPWDGFRDDLRTAVNAITVSHRTDHGTASKAGLPKGQDATAGRLHNDTAYGFTGETDAKGNSIVVRRVPLSSLKKLADLDRIRDTDLKAALHQHLDGLEGKAFEKAVADFPDREWHPFGGIRRVRVTEALSVIPISDRNGHIYKGYKGDSNYRYDVWELPGGKWEAEVVSTFDAHQPGWISNVRNLSPTARKVLSLQQNDVVAATSPEQERLLLRVVKFGQDGRLYLAEPQEGGPLKSRDADKGDPFSYFSFFPAKQKAWSFRKVRIDEIGRVLDPGFPARTARRKTRKTI

SEQ ID NO: 7400 - protein, 768 aa, synthetic construct
  REGION 1..768: note = Synthetic
MTGKKHIYWRLGADLGANSLGWAAIELDAPTDGKPIGILAAGSRIFSDGRDPKSGASLAVDRRDARAMRRRRDRFQQRQRALLKYLVADGLFPEDESERKALAALDPYALRARALDEALSLHELGRALFHLNQRRGFKSNRKADRKADDDAGKIAIGVDRAREAMAENGARTYGEWLHQRRASATDANAIPPVRTRLRPESGEDAKGDGYDFYPGRDLLEEEFAAIWEAQAAHHPDVLTDDVYERLFEIVFYQRPLKAPQIGMCTLIAGDRRLPKAHPLFQRRRLLEELNALMIVRPGEVAQRLTREERDTLFLKLKDRNKVSFESLRKTLKLDPDARFNKESENRTELKGDEVAAVIGSKTRFGNRWVHLSIEEQWAVIERLGDVESDAQDDAFRSWLAERYALTPEQTRAVTNAPLPQGYGRFGETATRKLIDALRDGEKDGRVLVYSEAVTAAGLGHHSDRRTGEVFEDEEGRPQLPYYGVALERHIMPGTGDPSDSDEMRVGRLTNPTVHIGLNQLRRIVNRLIRAYGPPAEIAIELARELKLTDEDKKRINKENNSNRLDAEKRSEKLLAIGKPDTGANRALLKLWEELNPANVLDRRCIYSGVQISIDMLFSAAVEVDHILPFTATLDDSNGNKIVCTREANREKRKRSPYEAWGHSARWEEIAARAAQLPRNKRWRFEPDAMEKFKDDGGFLARHLVDTQYLARLSREYLATLYPDKGEGTGHIWVSPGRLTEMVRRKLGLNDLLPDHNFGGGADGGARHR

SEQ ID NO: 7401 - protein, 744 aa, synthetic construct
  REGION 1..744: note = Synthetic
MDWRLGLDLGANSLGWAALRLDRAGDPIGILAMGSRIFSDGRDPKSGASLAVDRRAARAMRRRRDRFKQRQAALLKYLIRDGLFPADQADRQRLADEDPYALRARALDEELSLFEIGRALFHLNQRRGFQSNRKADRGQDDEAGKIAVGVDRLNQQMEEQGARTLGEFLHQRRRAATDANHIPSVRTRLRPETGEGAKGDGYDFYPSRALIAEEFEEIWAAQAPHYPDTLTQQVHDRLYEIIFHQRPLRAPQVGQCTLVAGETRLPKAHPLFQKRRLLEEINALMIVRPGEIAQRLTPEERDTLYLKLKDKRTVSFATLRKTLKLDSAARFNKESENRTELKGDEVAAELGAKTRLGTRWQHLSGDQQWEVVHRLMALESQADEAAFRDWISQTYDLLPEQAAAVLGARLPQGHGRFGPTATTTLIDSLLHDRTEDGRVVVYSEAVQRSGLGHHSDLRHDRDDEDVTELPYYGVALERHIMPGTAEPTDPEEMRIGRLTNPTVHIGLNQLRHVVNRLIRAYGPPKEIAIELARELKLSEDEKKKRNSENRDNRLAAEGRSKKLEEIRQRDTGANRALLKLWEELNPGNVLDRRCIYTGEQISIDMLFSDRVEVDHILPFAQTLDDSNGNKLLCLREANREKRRRSPYEAWGHTDRWPDIAERASRLPKPKRWRFEPDAMQRFATEDGFLARHLVDTQYLGRLAREYLSWLYPGRGEDRAMSGFHPVGSRKWSGANWAERPAARP

SEQ ID NO: 7402 - protein, 694 aa, synthetic construct
  REGION 1..694: note = Synthetic
MMAEQKKPVWRLGADLGANSLGWAAIELSAAVNGKPLSILAAGSRIFSDGRDPKSGASLAVDRRDARAMRRRRDRFQQRQKALIKYLIADGLFPADEAARKAMAAIDPYAVRARALDEALSLPELGRALFHLNQRRGFKSNRKADRKADDDAGKIAIGIDRTRDAIAEDEAAAGAEPGSWTFGKWLHERRTKGQSVRTRLRPESGEAAKGDGYDFYPGRALMEEEFDAIWAAQAPHHPDVLTNDVHDRLHEIIFYQRPLKAPQVGMCTLIPGDRRLPKAHPLFQRRRLLEELNALMIVRPGEVAQRLTREERDILFLKLKDKNKVSFASLRKALKLDPDARFNKESENRTDLKGDEVAAVMGSKTRFGNRWVHLSVEAQWDVLARLDDVESEAEDAAFRAWLSETYALTPEEARAVANAPLPPGYGRFGETATCKLIEALRDGKKDGRVLVYSEAVTDAGLGHHSDRRTGEVFEDAKGRPQLPYYGVALERHIMPGTGDPSDPEEMRVGRLTNPTVHIGLNQLRRIVNSLIRAYGPPAEIAIELARELKLTDDDKKRINRENNENRLNAQRRSEKLLAIGQADTGANRALLKLWEELNPANVLDRRMLNAIARASGQEGAEGRERIIIPEAKRAFAGLIALDLPGPSGTTTVAGAANRAAQSLARAFESGQAGDIILPSPPSALELAGLDALLP

SEQ ID NO: 7403 - protein, 1093 aa, synthetic construct
  REGION 1..1093: note = Synthetic
MAGGDVTNWRLGIDLGTNSLGWAALRLGADGRPAGIIAAGSRIFSDGRDPKSGASLAVDRREARAMRRRRDRFQQRQRALMKYLVADGLFPAEREERRGLETLDPFMLRATALDEALPLHHLGRAIWHLNQRRGFRSNRKTDRPDDDSGKIKVAVGRLRDAMDAAGARTFGEWLHQRRQPSEDHPDGLPVRTRLRAEPGDNAKGTGYDFYPDRALLEDEFDAIWSAQAEHHPDVLTPEVHDRLYEIVFHQRPLKTPQVGTCTFGSGEPRLPKAHPLFQRRRLLEELNALRIVRAGQVAERLTPEQRDLLLLKLKSKGKVSFESLRKVLKLDPDARFNKESENRTELKGDEVAAAMLTKTRLGNRWEHLSPDEQWEVIERLESAESDEQVEAFRAWVATRFDLSGEQAVAISAARLPQGHGRFGETATRGLIDALTHDRDPDGRVIVYSEAVARLGYHHSDFRTDQTYDELPPYPEILERHLMPGSGDPAEKDIFKRLGRLTNPTVHIGLNQLRRTVNRLIAHHGRPAEIAIELARELKLTEDEKKELGRRNRQNREEAERRSRALLGMDTDGNRIGRPVADDTGANRALLKLWEELDRDNVAGRQCIYTGKQIGIHMLFNGEVEIDHILPLSSTLDDSNANKLLCLREANRFKQKRSPWEAWGHTDQWDEIAERAARLPRNKRWRFEPDAMTRHQEEGGFLARHLADTQYLARLAHEYLGSLYSDRGEGSGRIWVSPGRLTEMVRRKLGLNDLLPDHNFAGGADQPKNRLDHRHHAIDAIVIAIVDRAMLQAISRVSGQEGEAGRERLTVRPPWDGFRDEVATVVRGIVVSHRTDHGTAGHGTGSTAGRLHNDTAYRLTGETDARGVPIVVRRKPLAGLKPAEIGTVRDPDLRAALLEWTAGKDGKALDAALARFATHGPLPFRGIRRARVTETLTVIPIRDREGRVYKGYKGDSNYRYDIWEMPDGRWRAAVISMFDAHQPGERPRPHPAAKRIMRLHRDDVLAIERDGGPRELMRIVKFSERAFVIAPPHEGGALKARDADKGDPFKYVYPSPNTLKSWRARKVDVDEAGRVRDPGFPMRTARRPTRTAAA

SEQ ID NO: 7404 - protein, 1126 aa, synthetic construct
  REGION 1..1126: note = Synthetic
MTDMMNERGMAWRLGLDLGTNSLGWIALQLEGGKPAGIMAIGSRIISSSESAGRDPQSKQSLAVNRRDKRAMRRRRDRFKRRQAALLRYLVKDGLFPADQAARQALETRDPYELRARALDERLEPSEIARALFHLNQRRGFKSNRKTDRTGDKDDESGKVAFGIAGLKDKIAAAEEAAGAEPGSWTFGKFLCERRAAADDLNALPPTRARAHAAPPENKNDVYDFYPSRDIIEAEFEAIWEAQAAHHPDLLTDEVRHRLYEIIFYQRPLKAPKIGLCTLVNGETRLAKAHPLFQQRRLLEEINALQLIRTGEAPRRLMPDERDRILMKFQGKPSLTFVALRKELKLDSTVRFNKESENRPKLLGDEMAARMGDKKRFGTHWRHLSVDQQWEVIQRRQNLESDADEAAFVAWLAERYSLTSEQAAAVASVELPMGFGRIGLTATTKLIEALTNGRTEGGEVLVYSEAVDAAGLGHHSDRRSDTRYSDAKGQPILPYYGLPLEHHLLPGTGDPSDPEDMRVGRLTNPTVHIGLNQLARVVNALIRRFGRPTEIALELARDLKLSDEEKQRRNKENNRNRIEAEKRSIKLREIGKPDTGENRARLKLWEELGEDCLDRRCVYTGERIGIEKLFSDAVEIDHILPFSITLDDSNANKIVCMRDANRRKGNRSPHDAWGHGEDWPDIAARASRLPANKRWRFDPDALARFTEERDFQPRQLVDTQYLGRLAREYLTSLYPERGQGSSKVWVSPGQMTELVRRKLGLNPMLGDDNILGSVNQPKNRLDHRHHSIDAFVVAVIDRAMLAEIARISGETGRDGTEKICIPDPWPNFRDELHAALRGIVVSHRPDHGTASKKGLKPGHDQTAGRLHNDTAYGFTGTTDAKGKPIVVRRIALTDLKSAADLNAIRDPHLRQALRDHTAHQDGKAFEERIKAFPPFTLKKVYGGIRHVRVTEALSVIPIRDASGRAYKAYKGDSNYRYDVWEMPDGKWITRWQAADGTERSSIVSMFDAHQPREQDRPHPAARKVLSVHQNDLLAIEPPGEARRLGRVVKFGQDGRLYLADPKEGGALKARDADKEDAFRYDSLFPAKQKLWKARQVRIDELGRVLDPGFPARKSVRRTRPRTAPVD

SEQ ID NO: 7405 - protein, 1101 aa, synthetic construct
  REGION 1..1101: note = Synthetic
MAEQKKPVWRLGADLGANSLGWAAIELSAAVNGKPLSILAAGSRIFSDGRDPKSGASLAVDRRDARAMRRRRDRFQQRQKALIKYLIADGLFPADEAARKAMAAIDPYAVRARALDEALSLPELGRALFHLNQRRGFKSNRKADRKADDDAGKIAIGIDRTRDAIAEDETAAGAEPGSWTFGKWLYERQLKGQSVRTRSRPESGEDAKGDGYDFYPGRALMEEEFDVIWAAQAPHHPDVLTNDVHDRLHEIIFYQRPLKAPQVGMCTLIPGDRRLPKAHPLFQRRRLLEELNALMIVRPGEVAQRLTREERDILFLKLKDKNKVSFASLRKALKLDPDARFNKESENRTDLKGDEEAAVMGSKTRFGNHWVHLSVEAQWDVLARLDDVESEAEDAAFRAWLSETYALTPEEARAVANAPLPPGYGRFGETATCKLIEALRDGKKDGCVLVYSEAVTDAGLGHHSDRRTGEVFEDAKGRPQLPYYGVALERHIMPGTGDPSDPEEMRVGRLTNPTVHIGLNQLRRIVNSLIRAYGPPAEIAIELARELKLTDDDKKRINRENNENRLNAQRRSEKLLAIGQADTGANRALLKLWEELNPANVLDRRCIYSGQQISIDMLFSAAVEVDHILPFSATLDDSNGNKIVCLREANREKRKRSPYEAWGHNARWDEIAARAAQLPRNKRWRFEPDAMDKFSDEGGFQARHLVDTQYLARLSREYLATLYPEKGEGSGHIWVSPGRLTEMVRRKLGLNDLLPDHNFGGGADQAKNRLDHRHHAIDAVVVAIVDRGMLNAIARASGQEGAEGRERIIIPEPWDGFRDALRETVNRITVSHRTDHGTASKAGLPKGKDATAGRLHNDTAYGLTGETDAKGNSIVVRRVPLSSFKKLADLDRIRDVDLKAALYRHLDGREGKAFEQAIAAFPDLEWHPFRGVRRVRVTEPLTVIPIKDRNGRIYKGYKGDSNYRYDVWELPDGKWVNEVVSMFDAHQPGWQSAIRSANPTARKIMSLHRDDVLAIERDGGGRELVRVVKFSEKQFAVAPPNEGGSLKVRDADKDDPFKYRYPSPNTLKAWRARQVRIDEIGRVLDPDFPARTARRKTRKQP

SEQ ID NO: 7406 - protein, 1120 aa, synthetic construct
  REGION 1..1120: note = Synthetic
MGQDNRPWRLGVDLGANSLGWVAIELDAPVDGKPVSILAAGSRIFSSGANGAGRDAKSGESLAVARRDARAMRRRRDRFQQRQRGLLKYLVADGLFPAEEEERKALAALDPYALRARALDEALTLPELGRALFHLNQRRGFKSNRKADRKADDDAGKIAVGIDRTREAIAEAEEKAGAEPGSWTYGKWLHERRASASDANAIPSVRTRLRPETGEGAKGDGYDFYPGRALIAEEFDAIWQAQAPHHPDVLTDQVYARLHEIVFDQRPLKAPQIGMCTLIAGDRRLPKAHPLFQRRRLLEEINALMIVRPGEVAQRLTREERDRLYLKLKDKAKVTFLSLRKELKLDPDARFNKESENRPDLKGDEVAAVMQAKTRFGTRWLHLSVEEQWAVIEAREQVESDAEDATFREWLAATYDLTPEQARAIANAPRPQGYGRFGQTATERLIDALRDGERDGRVLVYSEAVAEAGLGHHSDHRTGEVFEDGQGRPQLPYYGVALERHIMPGTGDPTDPEEMRIGRLTNPTVHIGLNQLRRVVNRLIRAYGPPAEIAIELARELKLTDDDKQRQNRENNTNRIASERRSEKLIAIGQPDTGGNRALLKLWEELNADNVLDRRCVYSGVRISIDMLFSAAVEVDHILPFSATLDDSNGNKILCTREANRDKRKRSPYQAWGHTDRWDAIAARAAQLPRNKRWRFEPDAMEKFADASGFQARHLVDTQYLARLSREYLATLYPGKGEGSGHVWVSPGRLTEMVRRKLGLNDLLPDHNYAGGADQAKNRRDHRHHAIDAAVVAIVDRGLLNEMSRVSGQLGAEGRERIEVPLPWPSFRDDLRDAINAITVSHRTDHGTVSKAGLAKGKDATAGRLHNDTAYGLTGETDAKGNSIVVRRVPLASFKKLADLDRIRDTDLRAALYRQLEGLEGKAFERALAEFPDRDWHPYGRIRRVRVVEPLAVIPIRDRNGHIYKGYKGDSNYRYDVWELPDGKWVTSWKDREGKAVSSVVSMFDAHQSADQPRPHPAARKVLSLHQNDLLAIERDGEARRLMRVVKFGQNGQITLAEPQQAGDLKRRDAASNDDDPFKYIAPTCGGLKSARARQVRVDELGRVLDPGFPARTARRASRG

SEQ ID NO: 7407 - protein, 1110 aa, synthetic construct
  REGION 1..1110: note = Synthetic
MAEGKKRIWRLGADLGANSLGWAAIELSAPVNGKPIAILAAGSRIFSDGRDPKSGASLAVDRRDARAMRRRRDRFKQRQKALIKYLIADGLFPADEAARNAMAAIDPYAVRARALDEALSLPELGRALFHLNQRRGFKSNRKADRKADDDAGKIAIGIDRTRDAIAEDEADAGAEPGSWTFGKWLHERRLKGQSVRTRLRPESGEDAKGDGYDFYPDRALMEEEFDAIWAAQAPHHPDVLTNDVHDRLHEIIFYQRPLKAPQVGMCSLIPGDRRLPKAHPLFQRRRLLEELNALMIVRPGEVAQRLTREERDILLLKLKDKNKVSFATLRKALKLDPDARFNKESEDRTDLKGDEVAAVMGSKTRFGNLWVHLSIEAQWDVLARLDAVESDAEDAAFCAWLVETYALTPEQARAVANAPLPPGYGRFGETATRKLIEALRDGKKDDRVLVYSEAVTEAGLGHHSDRRTGEVFEDAKGRPQLPYYGVALERHIMPGTGDPSDPEEMRVGRLTNPTVHIGLNQLRRILNVLIRAYGPPAEIAIELARELKLTDEDKKRINRENNDNRIAAERRSEKLLAIGQADSGANRALLKLWEELNPANVLDRRCIYSGRQISIDMLFSAAVEVDHILPFAATLDDSNGNKIVCLREANREKRKRSPHDAWGHSARWDEIAARAAQLPRNKRWRFEPDAMDKFRDEGGFQARHLVDTQYLARLSREYLATLYPEKGEGSGHIWVSPGRLTEMVRRKLGLNDLLPDHNFGGGADQAKNRLDHRHHAIDAVVVAIVDRGMLNAIARASGQEGAEGRERIIIPEPWDGFRDALRETVNRITVSHRTDHGTASKAGLPKGKDATAGRLHNDTAYGFTGDTDAKGNSIVVRRVPLSSFKKLADLDRIRDADLKAALYQHLNGLEGKAFEKALAEFHKLEWHNFGGVRRVRVTEPLTVIPIKDRNGRIYKGYKGDSNYRYDVWELPDGKWVTNWKNEAGEAMSSVISMFDAHQSSEPPRPHPAARKILSLHQNDLLAIEREGEDRKLMRVVKFGQSGQITLAEHQQAGDLKKRDAVSNDDDPFKYFAPTSGGLKKVKARQVRIDEIGRVLDPGFPARTARRKTRG

SEQ ID NO: 7408 - protein, 1454 aa, synthetic construct
  REGION 1..1454: note = Synthetic
MARMGRGAPRPPPRALGSLRASGGAHQRRHGAQADREEQEQPRHPHQQPAQLLIGERRHPPGRGRQQVRREQRRGREREHRAQQPHPDRRRRARQERAPGLLGTRVEQRRPQPQRAAEQRQVHRPVERIARKARRIRRRQMPNPHRQRERRRRGERPPRPRQRARNERRGDEQQDHMLRHPRREQRHRQRAQRRHQRRRGHRPAASRRRHRAPAPPQDDKVNPRRERKRDQQHRVEIEPPSQRPRQRRRSAIREGDHRRAPACSRGDALTVRAPGVETGQVEAVDAIRSDSKKASAVALALSGAYLTLVNRQTAISEVPRLADFLQSSSRENSWRSRTPMWIILRLSPAASRRWWLENGGIRVVDWRLGVDLGTNSLGWAAIGLTKRGDDLEPTSIIAAGSRIFSDGRDPKSGASLAVDRRDARAMRRRRDRLQQRQRALMKYLVDDDLFPADVAERKKLETLDPFELRARALDEALPLPHLGRAIWHLNQRRGFKSNRKTDKPDDDAGKIKTGVGRLRERMEADGARTFGEWLHMRRRPTEDHPDGLSVRTRLRPEQGEDAKGTGYDFYPGRDLLEDEFNEIWNAQAPHHPDVLTPEVHDRLYEIVFHQRPLKQPQIGTCTFGNGEPRLAKAHPLFQRRRLLEEVNALKIVRAGQVAERLTPEQRDILVLKLKDKAKVAFASLRKALRLDEDARFNKESENRTDLKGDEVAAVMGAKTRFDTRWQHLTPDEQWKVVFGLEAVESDDQLTAFRTWVAELYGLTPEQAAAVSNARLPQGYGRFGKTVTRGLIDALTHERDADGRVIVYSEAVERLGLHHSDFRTGEIRDELPYYGEVLDRHIMPGSGDASETDMIKRVGRLTNPTVHIGLNQLRRTVNALITRYGPPAEIAIELARELKLTDEEKKKRNRENNDNRLAAEKRSQKLLGVDDRGEQIGCKIADDTGANRALLKLWEELNPGNIADRRCIYTGRQISIDMLFNGEVEVDHILPFTATLDDSNANKIVCTREANRLKRKRSPFEAWGHTEEWEEIASRAARLPRNKRWRFEPDAMTQQQEKGDFLARQLVDTQYLSRLAREYLASLYPDKGEGSSNVWVSPGRLTEMVRRKLGLNDLLPDHNFAGGADQPKNRLDHRHHAIDAIVIAIVDRSMLQKIARESGLEGETGRERIKIPEPWHGFRNGVADAVRAIVVSHRPDHGTAGHGAGSTAGRLHNDTAYGLTGSTDPKGNTIVVRRKSFESLTPADVPCIRDPDLRAALHAAINGLDGKALASALADFRRKGPAQFRGVRRVRVTEPLTVIPIRDREGRVYKGYKGDSNYRYDIWEMPDGKWRASVVSMFDAHQPGEQPRPHPAARRIMGLHRDDMLAIERDGSPRELVRIVKFSEKQFAVAPPNEGGALKARDADKSDPFKYTYPSPNTLKAWRARKVGIDEIGQVRDPGFGARTRRRPTRPKAAE

SEQ ID NO: 7409 - protein, 1094 aa, synthetic construct
  REGION 1..1094: note = Synthetic
MKWRLGGDLGTNSFGWAAIGLDEEGKPCTILAAGSRIFSDGRDPKSGASLAVDRRDARAMRRRRDRFKQRQRALLDHLTRDGLFPADIAGRKTLERLDPFELRARALDEALPLHHIGRAFFHLNQRRGFKSNRKTDRRADDDAGKIAIGIDRLRDAIVESGARTFGEFLHRRRAAASDPNAIPSVRARLRPETGEGAKGDGYDFYPGRTLIEHEFREIWDAQAPHHPDILTRDVYKRLFEIVFHQRPLKAPQVGTCTLVPGEKRLPKAHPLFQRRRLLEELNALMIVRPGEKAERLTREERDLLLLKLKDKGKVAFASLRKLLKLDPDARFNKESENRTDLKGDEVAALMGAKARFGNLWAHLSAEAQWEVVERLGAVESDEDDRVFREWLIAAHGLSPDQAKAVAAAHLPQGYGRFGLTATTRLIDALRDAANVDGRVIVYSEAVERAGLGHHSDFRTGAVHVELPYYGAVLERHIMPGTGEPSDPEEMRIGRLTNPTVHIGLNQLRRVVNRLIRIYGPPAEIAIELARDLKLTDDDKKRLNRENNENRLAAERRSEKLMAIGQPDTGANRALLRLWEELNPGNVLDRRCVYTGQQISIEMLFSGAVDIDHILPFSDTLDDSNANKIVCMREANRAKRKRSPYEAWGHMPQWEEIAARAAQLPRNKRWRFEPDAMERFRDGGGFLARHLVDTQYLARLAREYLASLYPETGEGSGHIWVSPGRLTEMVRRKLGLNDLLPDHNYAGGDQAKNRLDHRHHAIDAVVVAIVDRAMLQKIARASGQEGAEGRERIIIPEPWQGFRDDLRIAINSIIVSHRADHGTAAKAGLAKGLDATAGRLHNDIAYGLTGERDARGNNIVVHRVPLGSLKKPADIDRVRDPELRVALGDFARGLEGKLFERAIHEFSTRGPLPFRGIRRVRVVEPLTVIPIRDREGRIYKGYKGDSNYRYDVWELPDGKWVTNWKDKDGNSLSSIVSMFDAHQSQGQPRPHPAARKVLSLHQNDLLAIEREGEERKLMRVVKFGQNGQITLAEPQQAGDLKRRDAMPNDQDPFKYFAPTCGGLKRARARQVRVDELGRIVDPGFPARTARRRTRG

SEQ ID NO: 7410 - protein, 694 aa, synthetic construct
  REGION 1..694: note = Synthetic
MLRPRFRYRLGLDLGTNSLGWCALKLDGNNIPYGILATGSRIFSDGRDPKSGASLANDRRDARAMRRRRDRFLRRRTALIKHLTLAGFFPETEHGRKALQSLDPFALRARALDEKLNPHEIGRAFFHLNQRRGFKSNRKADKKDGEDGKIAIGIDRLRAAIEENGARTFGEFLHKRRAGAGSQSAIPAVRTRLREESGEGAKGDGYDFYPSRALLEEEFTDIWEAQAPHYPEVMTEEVYKRLFEVVFHQRPLRAPKIGQCTLLDGERLPRAHPLFQKRRLLEELNALRIVRTGQVAEPLTKEQRDLLFLKLKDQRKSAFTALRKELKLERTARFNKESENRKDLAGDEVAAEMGAKTRFANRWAHFSWRQQWEIVSRVRAVESEKDEAACLNWLMTTFALEEERAKAVLSAHLPQGYGRFGLEATERLIEALEAEVITYDKAVVAAGLGHHSDFRPGLVFEDAQGNPALPYYGVTLERHITPGTADPNDNGEASRVGRITNPTVHIGLNQLRRLVNALIRAYGPPAEIALELARELKLSEDEKKEVNARNTKNRREAEKRSEKLREIGQADNGANRALLKLWEELNPENVLDRRCVYTGQQISIEMLFSPGVEIDHILPFDATLDDSNANKIVCLREANRLKRKRSPYEAWGHTAEWEEIAARASRLPREKRWRFEPVTAPVTTRRTLVFAPGG

SEQ ID NO: 7411 - protein, 1157 aa, synthetic construct
  REGION 1..1157: note = Synthetic
MKRVLGLDIGVASIGFSLIDVLEKDGKTEFNNLTTNSIIFDVPELAEERRKGRSSRRLNDRKSRRKQHIRNLFFEHGLTDKSFVTEPSSYLNTLDVESDVYILREKALHQDLSKAEFIKALYSITTRRGYSNQFESTEQDENSAKENEKINGSISKNIQLIKEKGFILPTELLTYRRTQKEELGYQNIPVRNKGGNYTNSLNRKLHEDELKIVIFSQKDNRNIFASEEKCEKFYIAVRDVMMEQRPLKSFEDMVAYCSYFDKYHETPQKRMSLSSIYNIELTLKQSLSNYKTMDKKSGEIISLSKKQIDEVVAKWVNEPTSDKITFANIFTKTSLKNCKLNDVGGSAEVLNIKGFRELSAIFKQYNVDFYTEHRDFFEKALLILSYYKNISKRVEELQKSFTGKLEPKDEFINEVAKVSSIDGFGSFSVRFAKMVLEKMEQGNSFSEALESLGYFDKYLGMPAYDYLPPFNPTQADIKWLKENLSYFDTKHLYYKANSSKTVERIISVMRKLINDIIKKYGKIDEIAIEGGKELNSKKEEDKIKENQKDDKKINDEAKNLLKDKNIKDYDNPTKVRKAKMLIEQKYKCLYSNEPLTLKEALDEEECEIEHFIPRSHFWNNSQKNTILVLKKHNQNKTDVPPMEYLKQIGKWEDYKAAVHNSSMKESKKDWLTNEEKIEAIFDQDTNVFLANYLNDTRSSIKIIKNYLEHYLYPKTNRYGKDEQSNVRVVSAKAINELKHIWGIKELITSEDTGKKDRTTNYHHSIDALTVALCDKKGMFALHNFFKQKENKFKTKAMKENVSKNVPFTSEGETLHSFCSHLVEKYKNNELYVCPYNKIKTNKKGFKDGNKKLVVAQNSKGVKQLQELKNISLLPYDLLQEKKQLKVTDRTDEGVRMCVQEIVSQLDIFKQKGIREALPKYGEFLIAKRAEEEKFSVLEKELVNKQKADKKKEDVELSKQIDEIKSQLQSVRDEIAFSNCYFVTKNGTKQIVKGVKNLSDSETKASTVLIQNGNSILMEKLNIETFKQAQEEGHPFVCKENDYTVSVDIYSSSKHQIIGLKYFRSIENDIEPNFKESFQNIDKQYEFSIHKGEVVVILDEKEKVQYLAVANGGGQIAGTNHKIQIENINTNGVVAVTINKKTIIKKAKIDFYGNFQIG

SEQ ID NO: 7412 - protein, 1043 aa, synthetic construct
  REGION 1..1043: note = Synthetic
MARILGLDIGIGSCGWAVIDSETVNPATGEVGDTRVIACGARCFDVPEEPKTKELRNKKRRQLRGQRRVMRRRAQRIAELRRLLVEHGLPGTPGPLPKGTPSGLVWKLRAEGLDRVLTPEELSRVLIHLAKHRGFKSNSRRQQANDSSDDGKMLKAVTELDRKSAGWRTVGEMLARDTAFVGRKRNSGGDYSHTLLRQRIEEETTRLLEAQRRLGNPAVTEATARKVADVAFFQRPLRSSIGMVGQCRFEPAEIRAARHAPSFERFRFLSRLNNLRLLQRGRAPAALDEEQRRRVLALIGSKQRLLFKDLRKALALPEPITFDGLPATKDPEGAGFADFTGSVKLAQALGRPGFETLLARSPDILDAAMSAIVFHETDEEVDTKLGEAGLAATDRAAIMTAIGSFAGLGGAGHISARACRNLLPHLAQGLVYSEACRLADYDHTALAEIALDKIPNPVVRKVIGETLKQVKAVFRGHGEPDLVHIEMARSLGKSVKDRTEIYRAGQERGADRERHKKEYAEAHGGREPNDEELERYELWKEQDHRCLYSGDYISPSQLVAGDNSIQVDHILPYSRSGDDSFRNKALVTARANQDKRNQTLWEWFGEGDPARWEELEIRLRTLQGLHHQKRKKLLLKSFAEREIAYRDRHLQDTRYIIRIFALLLQQHWPSLATEIGGARRIRTRAGSVTAMVRRGLGLDRYKKSGELGDRDHALDALILAWTTESLVYQLLADAKRMEETAKHRHIPSLIADQTDKERLRQLFLGAVESVFVSRPEVRRGRGPAHDATLYGFERGDEGEIQYERKAVIDLKPADLERLKGDPARTARLREALSAWLAKAERQGIKPPKLFALDPPRMPSAGGDGPVIRHVQLRRRSTQSGIKIRRGSEQPEAHADLATMVRVDVFEKGRKNYLVPVYAYQVADRDGWPDPPVRAVKGARGEEAWHVVDGSFRFRFSLYSSSLVGWPGGDGYRFGYFRALDRNTGAIKVAPHDRSDSAEQLKISPMTIAGFNKYNIDRLGSRHLIEREPREWRGEVCMSASAVG

SEQ ID NO: 7413 - protein, 1553 aa, synthetic construct
  REGION 1..1553: note = Synthetic
MTKILGLDLGTNSIGWAIREDENEGVNQIIDKGVRIFSEGVKSENGKEISRAAERTAYRSARKIKYRRKLRKYETLKVLSINGMCPLSVEEVEQWKKSGFKEYPLNPEFLNWLRTNEDKNINPYLFRDKASKQKVTLYELGRALYHIAQRRGFLSNRLDQSAEGVFEEHNPQIQNLIEDLDSSNAILNELKEYYINLGIIDESEKSGFKKDLDEGEKNLKKLYTSLVSITKKNANDIETCKQELIARLNKKADLGKVKGEIKDISQAMLDGNFKTLGQYFFSLYNKTRIRNQYTSREEHYLEEFIVICQTQGIEGINTNEKLPEKKFTGLAKDLYRAIFFQRPLKSQKGLIGKCSFEKNKSRCAVSHPDYEEFRMWSYLNTIKIGTQSESTLRFLTLEEKLKLVPKFYRKNDFNFEVLAKELVEKGASFGYYKSSKKNEFFYWFNYKSTDSVSACVVSASLENAIGKDWKIKTFEYQTRNTEKKEVTKSVNYKDLWHLLSVATSDTYLYDFAIEKLKLEPKNAKAFSKTKLKKDFASLSLAAIAKILPYLKQGLLYSHAVFMANIENIVDADIWKDKEQQKFIQSEIVDLIDNYLVEKSKLEIINGLLKIYNTEDIEGRKVYYSKEAESLFEADLRKKLVPFYKANTINEEQEQEIIFKDLFPVLIEQLKKQEFIKIVRLDKKIEAFLKGENEEGQIFCNYPEKFKKLYHPSDIEVFKKKIIKDEWGNEKVVLGSPLTTSIKNPMAMRALHQLRKVLNTLILDGQIDEKTRIHIEMARELNDANKRKGIQDFQKEREELYKIYEAKIKELYQVKTGKELLHVTDEDLQKFEWALEQTKDGRIITKEELIKYKIWEEQNHICIYTGKTISIDSFLGGNPKFDIEHTIPRSISQDNSLMNKTLCDKDFNRSVKGKKMPVELSNYNEILPRIAHWKKQAEELTRQIETISRSIKSAATKVAKDKNIRKRHYLTLKRDYIQGKYDRFTWEEPKVGFKNSQIPDTGIITKYAQAYLKSYFKRVESVKGGAVAEFRKLWGIQESFIDENGFKHFKEKDRSKHTHHTIDAITIACMPKDKYDLLAHAWRLEDEQNKKAAKALIEQAKPWKTFKEDIEKIETEILVSHFTPDNVKKQAKKILRIRGKKQYVAEIERSANGKAIPKKDASGKIIYKLNEKGNKIPILQQGDTIRGSLHQDSIYGAIKNPLNTNEIRYVIRKDLESLKANDIENIVDENVKAKVKEAVANKILLISSNPKQKNKFAEGKKVWMNEEKKIPINKVRIYANSVKNPIEIKKHSPLSKSKHEHKQTVYGQNDENYAMAIYEGLDIKGKSERAFELINYLDAGFYYKSKNINERKNAIISLVPEKHLETGFNLLKSNGKPIILKKGLNVILYKEKKEEIDFNNNSVIKRLYKISGLDKDGIKLTYAVSAIGSTENIAYMNNVINKQKLFQFKKDIEEIGIWESIYSDFKNENIKKSIFFKKLNDLLNEHYSKNDIYDSAGIIKKIKIKESGLTTPKGGNVIDNFNDFPYIKFKASNFNALIEGIDFKVLPSGKIQKL

SEQ ID NO: 7414 - protein, 1535 aa, synthetic construct
  REGION 1..1535: note = Synthetic
MTKILGLDLGTNSIGWAIRDTENEGINQILDKGARIFSEGVKSENGKEISRAAERTAYRSARKIKYRRKLRKYETLKVLSINGMCPLSVEEVEQWKKSGFKEYPLNPEFLDWLRTNEDKNINPYLFRDKASKQKVTLFELGRALYHIAQRRGFLSNRLDQSAEGVFEEHNPQIQNLIEDLDNSNAILNELKEYYINLGIIDETEKSGFKKDLDEGEKKLKSLYNSLVAITKKNANDIETCKQELIARLNKKEDLGKVKGKIKDISQAMLDGNFKTLGQYFFSLYNKTRIRNQYTSREEHYLEEFIIICQTQGIEEINTNEKLPEKKFTGLAKDLYRAIFFQRPLKSQKGLIGKCSFEKNKSRCAVSHPDYEEFRMWSYLNTIKIGTQSEKTLRFLTLEEKLKLVPKFYRKSDFNFEVLAKELVEKGASFGYYKSSKKNEFFYWFNYKPTDSVSACVVSASLENAIGKDWKIKTFEYQTRNTEKNEVTKSVDYKDLWHLLSVATSDTYLYDFAIEKLKLEPKNAKAFSKTKLKKDFASLSLAAIAKILPYLKQGLLYSHAVFMANIENIVDADIWKDEEQQKFIQSKIVELVDNYIVEKSKLELINGLLKIYNTEDKEGRKVYYSKEAESLFEADLRKKLVPFYKANIIIEEHEQEIIFQDLFPILMDQLKKQEFIKIGRLDKQIETFLKGENEEGQIFCNHPDKLKKLYHPSDIEVFKKKIIKDEWGNEKVVLGSPLTTSIKNPMAMRALHQLRKVLNTLIANDQIDEDTRIHIEMARELNDANKRKGIQDFQNENKKFKEDAIKEIKKLYLEQCHKEVNPTEDDILRYQLWLEQGKCEIYEEGNNISICDIIGSNPSYDIEHTIPRSISQDNSQMNKTLCSQRFNRDIKKQKMPVELSNYNEILPRITHWKKEAEELTRQIETISKSIKSAATKEAKDKNIRKRHYLTLKRDYIQGKYDRFTWEEPKVGFKNSQIPDTGIITKYAQAYLKSYFKRVESVKGGAVAEFRKLWGIQESFIDENGWKHYKEKDKSKHTHHTIDAITIACMPKDKYDLLAHAWRLEDEQDKKAAKTLIEEAKPWKTFKEDIEKIETEILVSHFTPDNVKKQSKSIIKNRGKKVYVLKNELPVNFKNKIEGKDYFKLKFDSKILYKIPKKKEKQTDTFYEELPKNYLNGVEGKDYFKINTTGKTFYKIPIFNQGDTIRGSLHQETTYGAIKLPDIDIETKKTLHTDKGAFILKKDIKGNEIVFYVVRKELSKLSENDVQNIVDNVVRKKIENAIANSLITFKIVKKKKVAVIKEGVTIWMREPNIEKGIEGIPIKKVRIITNSVKNPIEIKKHSTLSKSKHEHKQTVYGQNDENYAMAIYELDGKREFELINNFNLAKLLKQSQSYYPLHKEKEIKGKKILVPIEKRNNKDVILKRGQQVVFYDRTIENPKDISEIIDFRERIYIIEGLTIQRQKDKKTSKVNEYGIIQLRHFKEARKSEEISKDNFKPDGEFKINENKPTRKMNHNQFTAFVEGIDFKVLPSGKFQKI

SEQ ID NO: 7415 - protein, 1527 aa, synthetic construct
  REGION 1..1527: note = Synthetic
MAKILGLDLGTNSIGWAIVEKDGNDFSLVDKGVRIFSEGVKSEKGIESSRAAERTGYRSARKIKYRRKLRKYETLKVLSLNGMCPLSIEEVEEWKKSGFKEYPLNPEFLEWLRTSDDENINPYFFRDKASKQKVTLFEVGRAFYHIAQRRGFLSNRLDQSAEGILEEHCPKIEALVEDLNSTDEILTSLKDYFFDTGILDANEKGGFAKDLDEGDKKLVSLYRSIQAIVKKNDTDFEKGKAEIIERLNKKDVLGKVKGKIKDISQAMLEGNFKTLGQYFFSLYNKERIRNQYTSREDHYLEEFKIICKFQGIGSINQNEKLPEKKFEGLAKELYKAIFFQRPLKSQKGLIGKCSFEKSKSRCAISHPDFEEKRMWEYLNTIKIGTQSEKVLRFLSQEEKLNLIPKFLRKKDNFNFEDLAKELIEKGATFGFYKSSKRDSFHYWFNYKPTDTVSGCPVSASLKSVVGEDWKTKSFIYKTTNSKGIEVSRTVNYKDLWHLLSVSTSDIYLYEYAKNKLGLEDKNAKAFSKIKLKKDFGNLSLNAINKILPYMREGLLYSHAVFMANIESIVDEVIWNDLGQRKYIQDKIAAIIANNIVDNGLLEVVNGLIKECKVDGAYYSKEAADTYRKDLSKKLVSFFKFHHIDDGIKQETILNELFPVFIEQLKAHEFIKVKRLDEKVLEFLKGENQDGEVFCNNAKQLKKLYHPSDIEVFKKQIVKDKDGTETGQLILGSPLTSSIKNPMAMRALHQLRKVLNTLIVEEQVDSSTRIHIEMARELNDANKRKGIQDYQNENKKEREKYRDEIKKLYLAECNKEIEPTVDDLLRYQLWIEQDRKEIYENGNSISICDIIGDNPAYDIEHTVPRSISQDNSQMNKTLCSQKFNRDVKKQKMPFELGNHLEILPRIAHWKEEADNLSREIEMIIRSTKTAATKEAKDKKIRRRHYLTLRRDYLQGKYDRFIWTEPKVGFKNSQIPDTGIITRYAQAYLKSYFNRVESVKGGMVAEFRKIWGIQESYQENGKKYFKEKDRSKHTHHTIDAITIACMTKDKYDVLAHAWTLEDKEQITEARKIVAESKPWKTFKEDLKKIEEGILVSHYTPDNVKKQSKKIVRVRGRKQYVAEIERDVNGKAVAKKDISGKVIYKLDKDGKKLPRLQQGDTIRGSLHQDSIYGAIKNPLKTEEIRYVIRKDLESIKASDVDNIVDEMVKEKVKEAIASKVLILSSNPQQKNKIDGKVWMNEEKGIPINKVRLYANSVKNPLEIKEHSSLSKSRHEHKQKVYGQNDENFAMAIYEGLDKKGKTERAFELINYMDAGYYYKLKNKNERKKDIISLVPEKHIETGFNLLRSNKIPIILKKGLNVILYKNEKEEIDFNNPNSIIKRLYKISGLDKDGIKLMYCISAKGSTENIAYMNDVINKQKLFELKSEMEKLGLWDKVFSDFKNDNLKKSDFFKKLNDLLNKHYFENNVCDSIGSIKKVKIKESGLTTPKGGDVIDNFKDFPYIKFKVSNFNALIEGIDFKISPTGKFVQI

SEQ ID NO: 7416 - protein, 1486 aa, synthetic construct
  REGION 1..1486: note = Synthetic
MTKILGLDLGTNSIGWAIREDENEGVNQIIDKGVRIFSEGVKSENGKEISRAAERTAYRSARKIKYRRKLRKYETLKVLSVNGMCPLSVEEVEQWKKSGFKEYPLNPEFLNWLRTNEDKNINPYFFRDKASKQKVTLFELGRALYHIAQRRGFLSNRLDQSAEGVFEEHNPQIQNLIEDLDSSNTILNELKEYYINLGIIDESEKSGFKKDLDEGEKNLKKLYTSLVSITKKNANDIETCKQELIARLNKKEDLGKVKGEIKDISQAMLDGNFKTLGQYFFSLYNKTRIRNQYTSREEHYLEEFIIICQTQGIEEINTNEKLPEKKFTGLAKDLYRAIFFQRPLKSQKGLIGKCSFEKNKSRCAVSHPDYEEFRMWSYLNTIKIGTQSEKTLRFLTLEEKLKLVPKFYRKNDFNFEVLAKELVEKGASFGYYKSSKKNEFFYWFNYKPTDSVSACVVSASLENAIGKDWKTKTFEYQTSNTKKEEVTKSVNYKDLWHLLSVATSDTYLYDFAIEKLKLEPKNAKAFSKTKLKKDFASLSLAAIAKILPYLKQGLLYSHAVFIANIENIVDADIWKDKEQQKFIQSKIVDLIDNYLVEKSKLEIINCLLKIYNTEDIEGRKVYYSKEAESLFEADLRKKLVPFYKANTISEQQEQEIIFKDLFPVLIEQLKKQEFIKIVRLDKKIEAFLKGENEEGQIFCNYPEKFKKLYHPSDIEVFKKKIIKDEWGNEKVVLGSPLTTSIKNPMAMRALHQLRKVLNTLILDGQIDEKTRIHIEMARELNDANKRKGIQDFQKEREELYKIYEAKIKELYQVKTGKELLHVTDEDLQKFEWALEQTKDGRIITKEELIKYKIWEEQNHICIYTGKTISIDSFLGGNPKFDIEHTIPRSISQDNSLMNKTLCDKDFNRSVKGKKMPVELSNYNEILPRIAHWKKQAEELTRQIETISRSIKSAATKVAKDKNIRKRHYLTLKRDYIQGKYDRFTWGEPKVGFKNSQIPDTGIITKYAQAYLKSYFKRVESVKGGAVAEFRKLWGIQESFIDENGFKHFKEKDRSKHTHHTIDAITIACMPKDKYDLLAHAWRLEDEQNKKAAKALIEQAKPWKTFKEDIEKIEAEILVSHFTPDNVKKQAKKILRVRGKKQYVAEIERNANGKAIPKKDASGKIIYKLNERGNKIPILQQGDTIRGSLHQDSIYGAIKNPLNTNEIRYVIRKDLESLKANDIENIVDENVKAKVKEAVANKILLISSNPQQKNKFAEGKNVWMNEEKKIPINKVRIYANSVKNPIEIKKHSTLSKSKHEHKQTVYGQNDENYAMALYELDGKREFELINNFNLAKLLKQGQGYYPLHKEKEIKGKKVLIPIEKRNNRDVVLKRGQQVVFYDKTVENSKDISEIVDFRGRVYLIEGLTIQRQKDKKTGKVNEYGIIQLRYFKEARKSEEISKDSFKPDGEFKINENKPTRKMNHNQFTAFVEGIDFKVLPSGKFQKI

SEQ ID NO: 7417 - protein, 1482 aa, synthetic construct
  REGION 1..1482: note = Synthetic
MNNYFNCTLQYSYKTHSSMAKILGLDLGTNSIGWAIVDKDGNEFSLVDKGVRIFSEGVKSEKGIESSRAAERTAFRSARKLKYRRKLRKYETLKVLSKNNMCPLSIEEVEEWRKSGFKKYPMNPEFLKWLRTDENENINPYVFRDKASKQKVSLFELGRALYHIAQRRGFLSNRLDQSAEGILEEHCPKIQASIEDLSSKEEIISELKEYFLETGIFDANEKTGFAKDLDEGDKKLVSLYKSMLAIIKNNENNFEKGKEEIIARLNKKDALGAVKGKIKDISQAMIDGNFETLGQYFFSLYNKSKIRNQYTSREEHYLEEFNIICQIQGIGEIIVDELLPEKKYNGLAKDLYKAIFFQRPLKSQKGLIGKCSFEKSKTRCAISHPDFEEYRMWTYLNTIKIGTQSDKTLRFLSQDEKQSLISKFLRKKDNFNFEDLAKELIPKGATFNFYKSSKANEVNYLFNYKPYDTVTASPVSASLKNIFGEDWKTKTISYKTKNSKGIEVNRTVDYKDLWHLLSVSTSDIYLFQYAKEKLGLDDKNAKSFSKIRLKKDFASLSLNAITKILPYVREGLLYSHAVFMANIESIVDESIWNDSNQRKFIQDKIAEIIENHTFENGKLEVINSLIKECKAVGAFYSKEAENIYKSDLDKKLIPFVKFHKIESDKESILSELFPVLIEQLKKYEYIKINRLDEKVLDFIKGKNDDGEIFCTKEKRINKLYHPSDIEVFKKKIIKDEFRNEKVVLGSPLTSSIKNPMAMRALYQLRKVLNTLIFEGLVDEKTIIHIEMARELNDANKRKGIQDYQNENKKNREEYAKDIRKLYFDECKKEIEPTEDDLLRYQLWLEQNRQEIYEDGRNISICDIIGTDPKYDFEHTIPRSRSQDNSQMNKTLCSQKFNREIKGNKMPFELSNYLEILPRIAHWKEESDNLTREIEIISRSIKAAATKELKDKKIRRRHYLTLKRDYLKGKYDRFIWEEPKVGFKNSQIPDTGIITKYSQAYLKSYFKRVESVKGGMVAEFRKIWGIQESFQENDKKYFHEKDRSKHTHHTIDAITIACMTKEKYDALANAWTHEDKGQLGEARKLLADSKPWKTFKEDLKKIEEEILVSHYTPDNVKKQSKKIVRIRGKKQFRDENLLDKRGNTIPIFGKRLNEEEVLSKVEGKDYFKIQKNSETLYYEYLFDKSGNIIYKKIPIFKQGDTIRGSLHQDSIYGAIKNPLNTEEIRYVIRKDLESIKASDIENIVDEMVKEKVKDAIGNKVLLISSNAQQKNKLDGTVWMNEEKGIPINKVRLYANSVKNPLEIKEHSSLSKSRHEHKQKIYAQNDENFAIAIYEDFDKKGKIKRSFEMINNIDAGSYYKLSNGENKMNYDIVTNPHDKTGLPLKYILKKGLMVLFFKENQQEILELPINDLHNRLYKLAKFDAQGRLTFRTHFEARQASDLKEIYNVDFENPFEQIRLQVSKLNMLVEGYEFVLSSSGKITFI

SEQ ID NO: 7418 - protein, 1480 aa, synthetic construct
  REGION 1..1480: note = Synthetic
MAKILGLDLGTNSIGWAIVDKDGSEFSLVDKGVRIFSEGVKSEKGIESSRAAERTGFRSARKIKFRRKLRKYETLKVLSENNMCPLSVEEVIEWRKSGFKKYPLNPEFIAWLRTDDDKNINPYYFRDKSSKQKASLLEVGRAFYHIAQRRGFLSNRLDPSAEGVIEQHKPDLEDIIENASTITELQIELTDYFQNRDLIERKAIDLDEGEKKLKTLYNSFLKTIKDYHKDFDKTKSLLTERLNKKDDLGVVKQKIGEISQAMKDGNFKTLGQYFYSIYNKGKIRNQYTAREEHYLSEFEVICLAQGIDGILTSEKLPEKRYLGLAKELYRAIFFQRPLKSQKGLIGKCTFEKSKSRCAISHPDFEVYRMWCFINTIKIKTPDDESLRFLTNEERLKIIPKFLRKKDNFNFEDLAKELVPSGSKYAFYKSSTAASVNYLFNYSLNSSVSGCVVSTSFKNALGEDWKTKIYSYETLNKNGESVTRNVDYTDLWHLISVSTSDLYLEEFAKDKLKLDAKKAVLFSKTKLKKDFASLSLTAINKINPFLREGLLYSHAVFMANIENIVDVDIWKNLDDRKYIQTKIAELIATNTFDNNLLEIINGLIKECKVGGCYYSKEAEGSYKLDLEKKVNSYVKSNKIEDQKEIIIGLLFPIFIEQLKKYEFIAIKRLDEKVFDFLDGQNDDGQVFCNSKNKLKKLYHPSDIDVFRKQIAKDGNGNEKLVLGSPLISSIKNPMAMRALHQLRKVLNALIVEGQVDEKTRIHIEMARELNDANKRKGIQDFQRDIEKNRKDYIEEIKKDYKAAKGIDIEPTEDDVLRYQLWIEQDKKTIYEEQCTNIGISQIIGIDPDYDIEHTIPRSRSQDNSQMNKTLCSKRYNREIKKNKMPIELSNHRDILDRVEPWRKKYLVLEYDIIVISRAIKAATTREQKDRKIRLRHKLNLEKEYFKGKYERFTYKEPKVGFKNSQIPDTGIITKYASAYLKSYFGRVEAVKGGIVAEFRKAWGIQESYIKDGKKYYQVKDRSKHTHHCIDAITIACMTKDKYDVMAHAWDLEDDLDKNQYKLMKSVLEQSKPWKTFTEDLKKIEDEILVSHNTPDNVKKQSKKIIRVRGKKQFVAEMETDINGKNSPRKDSNNKIIFKKNLNGENTARFHQGDTIRGSLHQDSIYGAIKQPEIDDNTNKPKHTTKGAFVIKKDEKGIDEINFVIRKALSKLSENDIKNIIDPIVCQKIQRAVIDGMITFKTVQGKKVAVVKEGTTIWMREPNKEKDLVGIPINKVRIFTGLKNPLEIKEHSTLSKSRFEHKQKVYAQNDENFAMAIYEGIDKKGNVKRSFESVNYMDAGNYFKLSNRNNNANSLVPLIHLKTQLPLKYEVKKGDLVLFYKENKEELNEISNKDLTKRLYKVIAFEGDGRIQFRYHKTAMQQSSSNKEELTIVKFMADNNLKNSQVDFENPVPWLRLRVSNCNFLLIKKEFEITPTGRIDIL

SEQ ID NO: 7419 - protein, 1478 aa, synthetic construct
  REGION 1..1478: note = Synthetic
VENRNVANYFSCIFENSYKKRIDMAKILGLDLGTNSIGWAIVDKDGSDFSLVDQGVRIFPEGVKTEKGIESSKAAERTAYRNARKIKFRRKLRKYETLRVLSENNMCPLSVEEIIEWRKSGFKKYPLNPEFISWLRTDDDKNINPYYFRDKSSKQKATLLELGRAFYHIAQRRGFLSNRLDQSLEGIIEQHRSGLEDIIDNASSFTELQIELTDYFQDRDLIERKASNLDEGEKKLKTTYNSFLKIITDNIKDFDKTKSLLIERLNKKEDLGVVKQKIGEISLAMQSGNFTTLGQYFFSLYNKGKIRNQYTAREEHYLSEFEIICLAQGIEGIIASEKLPEKKYFGLAKELYRAIFFQRPLKSQKASIGKCTFEKNKSRCAVSHPDFEEYRMLQYINTIKIKTPNDERLRFLSNAERLKIMPKFLRKKDNFNFEELVKELVPSESKYAFYKSSSAPTANYLFNFNLNSSVSGCVVSASFKNVLGEDWKTKEYSYQTINKKAEIVTRNVDYNDLWHLISVSTSALYLQEFAKDKLKLDDKRAISFSKIKLKKDFASLSLKAINKINPFLREGLLYSHAVFMANIENIVDVDIWNDPNDRKYIQIKIAELIATNSFDNNLLDIINDLIKECKTEGCYYSKEAEATYKSDLDKKLSSFLRSNKIEDQKEAITNELLPLFIEQLKKYEFITIKRLDEKVFGFLNGQNDDGQVFCNNKNKLKKLYHPSDIDVFRKEITKDGNGNEKLVLGSPLISSIKNPMAMRALHQLRKVLNALIIEGQVDEKTRIHIEMARELNVANKRKGIQDYQRGIEKNRKEYIEEIKKDYKAASGLDIEPTEDDILRYQLWIEQDRKTIYEEECTNIRISQIIGSDPDYDIEHTIPRSRSLDNSKMNKTLCSKLYNRKIKKNKIPVELSNYSDILDRIKPWQKKYLALEYEIISVSRAIKAATTKEQKDRKIRLRHKLNLQKDYFKGKHERFTYTEPKVGFKNSQIPDAGIITKYANDYLKSYFGRVEAVKGGMVAEFRKAWGIQESYIKDGKKYYEVKDCSKHTHHCIDAITIACMTKDKYDVMAHAWDLEDDVEKNQDKLMKSVLEQSKPWKTFTEDLKKIEDEILVSHHTPDNIKKQSKKIIRIRGKKQFVAEMEIDVNGKKIPKTDSNNKIIFKKGFKGEKIARFQQGDTIRGSLHQDSIYGAIKNPLNNEEIRYVIRKDLESIKTSDVEYIVDEIVKQKVKEAILNKVLLLSSNAQQQNKFADNQKVWMNEEKGIAINKVRLYANSVKNPLHVKEHALLSKSKQEHKQKVYAQNDENYCMAIYEKDGRKDFELINNFNLAKLEKQGKGYYSLFKEKTNNGKTIQMPIAKRNNRDLVLKRGQQVIFYDLGTENPDDVNDLIDLKGRIYIIEGLSIQRIVRPSGKVDEYGIIMFRYFKEARKADDLKSDKYKPDGVFKLEEIKPTRKMNHNQFTAFVEGIDFKVMPSGKFEKL

SEQ ID NO: 7420 - protein, 1476 aa, synthetic construct
  REGION 1..1476: note = Synthetic
MAKILGLDLGTNSIGWAIVDKEGNEFSLVDKGVRIFSEGVKSEKGIESSRAAERTAYRSARKIKYRRKLRKYETLKILSLNGMCPLSIEEVEDWKKSGFKKHPLNPEFLKWLRTDEVEIKNPYVFRDRASKQKVALFELGRAFYHIAQRRGFLSNRLDQSAEGVFEEHNPQIQALIEDLDNTNLILEELNGYYLNIGIIELTEKVVFKKDLDEGEKKLKTLYNSLVAITKKNEGDIEKCKEELIARLNKKEDLGKVKGEIKDISQAMLDGDFKTLGQYFYSLYNKEKIRNQYTSREEHYLKEFEIICEVQGIEGIDNTEKLPEKKFTGLAKDLYKAIFFQRPLKSQKGLIGKCSFEKSKSRCAISHPDFEEYRMWTYLNTIKIGTQSEKTLRFLTQEEKLKLIPKFYRKNDFNFEVLAKELVEKGASFGYYKSSKKNEFFYWFNYKPTDSVSACQVSAALKNTVGDDWKTKTFTYQTLNAKKEEVTKTVDYNDLWHLLSVSTSDIFLYEYAKEKLGLDDKSAKAFSKIKLKKDFASLSLSAITKILPYVKEGLLYSHAVFMANIENIVDAEIWKDESQRKYIKTQIAEIVENYTFEKSLLEVINGLMKEYKTEKEDEKKVYYSKEAEPEFGTDLKKKLIGFYKSNKIEDEREQQVIFNHLLPILIDQLKKYEFIKIKRLDEKVLEFLKGENETGQVFCSEEKGTDQEKEKKINNRLKKLYHPSDIEVFKKQKAKDKDGNETGQLILGSPLTSSIKNPMAMRALHQLRKVLNTLILEGEVDENTRIHIEMARELNDANRRKGIQDYQKENKDFRDNAIKEIKKLYLDECGKEVEPTEDDILRYQLWIEQDKCEIYEQGKNIRICDIIGSNPAYDIEHTIPRSISQDNSQMNKTLCSQRFNREIKKQKMPIELNNHLEILPRIAHWKEEADNLSREIEIISRSIKAASTKEIKDKKIRRRHYLTLKRDYLQGKYDRFIWKEPKVGFKNSQIPDTGIITKYAQAYLKSYFKRVESVKGGMVAEFRKQWGIQESYIDENGFKQYKEKDRSKHTHHTIDAITIACMTKDKYDVLAHAWKLEDEQNKKEAKAIIEQAKPWKTFKEDLLKIEEEILVSHFTPDNVKKQSKKIVRVRGKKQYVAEIERDAKGKAIPKRDANGKVIYKLNEKGEKIPRLHQGDTIRGSLHQDSIYGAIKNPLNTDEIRYVIRKDLESLKANDIENIVDETVKEKVKEAIANKVLLLSSNAQQKNKIAENKKVWMNEEKQVPIKKVRIYANSVKNPLHIKEHGLLSKSRHEHKQKVYGQNDENYAMAIYELEGKREFELINNFNVAKLLRQGQGIYPLNKEKEIKGKKILYPIAKSNNRDVVLKKGQQVVFYDKSVEMPKDITEIIDFVGRVYIIEGLSINRVKSGNNFYEFGVIQLRYFKEARKSDDIKKDNFKPDGDFKLGENKPTRKMSPGQFTAFVEGIDFRVLSSGKLEKI

SEQ ID NO: 7421 - protein, 1473 aa, synthetic construct
  REGION 1..1473: note = Synthetic
MAKILGLDLGTNSIGWAVVERENIDFSLIDKGVRIFSEGVKSEKGIESSRAAERTGYRSARKIKYRRKLRKYETLKVLSLNRMCPLSIEEVEEWKKSGFKDYPLNPEFLKWLSTDEESNVNPYFFRDRASKHKVSLFELGRAFYHIAQRRGFLSNRLDQSAEGILEEHCPKIEAIVEDLISIDEISTNITDYFFETGILDSNEKNGYAKDLDEGDKKLVSLYKSLLAILKKNESDFENCKSEIIERLNKKDVLGKVKGKIKDISQAMLDGNYKTLGQYFYSLYSKEKIRNQYTSREEHYLSEFITICKVQGIDQINEEEKINEKKFDGLAKDLYKAIFFQRPLKSQKGLIGKCSFEKSKSRCAISHPDFEEYRMWTYLNTIKIGTQSDKKLRFLTQDEKLKLVPKFYRKNDFNFDVLAKELIEKGSSFGFYKSSKKNDFFYWFNYKPTDTVAACQVAASLKNAIGEDWKTKSFKYQTINSNKEQVSRTVDYKDLWHLLTVATSDVYLYEFAIDKLGLDEKNAKAFSKTKLKKDFASLSLSAINKILPYLKEGLLYSHAVFVANIENIVDENIWKDEKQRDYIKTQISEIIENYTLEKSRFEIINGLLKEYKSENEDGKRVYYSKEAEQSFENDLKKKLVLFYKSNEIENKEQQETIFNELLPIFIQQLKDYEFIKIQRLDQKVLIFLKGKNETGQIFCTEEKGTAEEKEKKIKNRLKKLYHPSDIEKFKKKIIKDEFGNEKIVLGSPLTPSIKNPMAMRALHQLRKVLNALILEGQIDEKTIIHIEMARELNDANKRKGIQDYQNDNKKFREDAIKEIKKLYFEDCKKEVEPTEDDILRYQLWMEQNRSEIYEEGKNISICDIIGSNPAYDIEHTIPRSRSQDNSQMNKTLCSQRFNREVKKQSMPIELNNHLEILPRIAHWKEEADNLTREIEIISRSIKAAATKEIKDKKIRRRHYLTLKRDYLQGKYDRFIWEEPKVGFKNSQIPDTGIITKYAQAYLKSYFKKVESVKGGMVAEFRKIWGIQESFIDENGMKHYKVKDRSKHTHHTIDAITIACMTKEKYDVLAHAWTLEDQQNKKEARSIIEASKPWKTFKEDLLKIEEEILVSHYTPDNVKKQAKKIVRVRGKKQFVAEVERDVNGKAVPKKAASGKTIYKLDGEGKKLPRLQQGDTIRGSLHQDSIYGAIKNPLNTDEIKYVIRKDLESIKGSDVESIVDEVVKEKIKEAIANKVLLLSSNAQQKNKLVGTVWMNEEKRIAINKVRIYANSVKNPLHIKEHSLLSKSKHVHKQKVYGQNDENYAMAIYELDGKRDFELINIFNLAKLIKQGQGFYPLHKKKEIKGKIVFVPIEKRNKRDVVLKRGQQVVFYDKEVENPKDISEIVDFKGRIYIIEGLSIQRIVRPSGKVDEYGVIMLRYFKEARKADDIKQDNFKPDGVFKLGENKPTRKMNHNQFTAFVEGIDFKVLPSGKFEKI

SEQ ID NO: 7422 - protein, 1470 aa, synthetic construct
  REGION 1..1470: note = Synthetic
VIRLKIRIIFSHFKCNDKKEIKKYMARILGLDLGTNSIGWAIVDKNGTEFSLVDKGVRIFSEGVKSEKGIESSRAAERTNYRSARKIKFRRKLRKYETLKVLSQNGMCPLSVDEVNGWRKSGFKQYPLNPEFLKWLRTDDNQNINPYIFRDRASRQKVSLYELGRALYHIAQRRGFLSNRLDQSADGIIEQHAPNIESRIEEAQTVNDLMVEIEDYFDGLDILEKNSKDLDEGEKKLKSLYNALEKIIKSNDFEKAKAEVIARLNRKEDQGAVKQEIGEISKAMKDGNFGTLGQYFYSLYSKGKIRNHYTAREEHYLAEFEIICKAQGITEINENEKLPEKRYSGLAKELYRAIFFQRPLKSQKGLIGKCSFEKNKTRCAISHPDFEEYRMWSYLNTIKIKTPEDEKLRFLTLAEKQRLIPKFLRKKDNFNFEDLAKELIVKGTTFEFYKSSNAKSAHYLFNYKPKDTVPGSVVSASLKNIFGDDWNTKQWNYQTQNSKGETVTRTVYYKDIWHLLSVSTSDIYLEEYAKNKLGLDEKRAKSFSKIRLKKDFASLSLNAIAKITPYLKQGLLYSHAVFMANIENIVDEHIWNNPKERLYIQNKIAEIIDDNTLENSKLEIINGLIKECKADNCYYSKEAEHTYKNDLQKKVATIFRNNEDQDDIVEELFPIFIIQLQKHEYIPIKRLDEKVIEFLKGENEDGEIYCSNQNRLHKLYHPSDIEVFKKKIIKDEFGNEKVVLGSPLISSIKNPMAMRALHQLRKVLNTLILEGLVDEKTKVHIELARELNDANKRKAIQDFQKENQNKRQDLAKQIKEDYKAQTGKDIEPTEDDILRYQLWVEQNGMEIYEPTLNGGVSKKIGIHQIIGENPDYDIEHTIPRSISQDNSLMNKTLCSKRFNRDIKKNQMPIELNNYELLLPYIDHWRKEADKLTWEIEQIIKSTKAAATKEAKDKKIRRRHYLTLKRDYLKGKYERFVWKEAKVGFKNSQIPDTGIITKYSRAYLNSYFNRVESVKGGMVAEFRKIWGLQPSFIKDGKKYYEEKDRSKHTHHTIDAITIACMTKDKYDVLANAWTKEDNENGNEARKLLSESKPWPTFTEDLQKIEGEILVSHHTPDNVKKQSKKIVRVRGKKQYIAEIERDINGKAVAKKDGNGKIIYKLDCNGKKLPRIQQGDTIRGSLHQDSIYGAIKNPLNTTEIRYVIRKDLESLKANDIENIVDEIVKEKVKQAIANKVLLLSSNTQQKNKMSGTVWMNEEKQIPINKVRIYANSVKNPLEIKEHSLLSKSKHEHKQKVYGVNGENYAMAIYEGQDKKGNLKRGFELLNYMDAGNYYKLSNDSKNHNTIVPAIHLKLDLPLKYIIKKGDLVLFYEESREELSEVGDKEFMKRLYKVIGFEGDGRIQFRHHKTAMQQSSANKEELTIVKFMADNNLKNSQVDFDTPVPWLRLRVSNCDFLLNDKEFKINPLGKVAIL

SEQ ID NO: 7423 - protein, 1463 aa, synthetic construct
  REGION 1..1463: note = Synthetic
MTKILGLDLGTNSIGWAIRDTENEGVNQILDKGARIFSEGVKSENGKEISRAAERTAYRSARKIKYRRKLRKYETLKVLSINGMCPLSVEEVEQWKKSGFKEYPLNPEFLDWLRTNEDKNINPYLFRDKASKQKVTLFELGRALYHIAQRRGFLSNRLDQSAEGVFEEHNPQIQNLIEDLDSSNTILNELKEYYINLGIIDETEKSGFKKDLDEGEKNLKKLYTSLVSITKKNANDIETCKQELIARLNKKADLGKVKGKIKDISQAMLDGNFKTLGQYFFSLYNKTRIRNQYTSREEHYLEEFIIICQTQGIEGINTNEKLPEKKFTGLAKDLYRAIFFQRPLKSQKGLIGKCSFEKNKSRCAVSHPDYEEFRMWSYLNTIKIGTQSEKTLRFLTLEEKLKLVPKFYRKSDFNFEVLAKELVEKGASFGYYKSSKKNEFFYWFNYKPTDSVSACVVSASLENAIGKDWKIKTFEYQTRNTEKKEVTKSVNYKDLWHLLSVATSDTYLYDFAIDKLKLEPKNAKAFSKTKLKKDFASLSLAAIAKILPYLKQGLLYSHAVFMANIENIVDDDIWKDEEQQKFIQSKIVELVDNYIVEKSKLELINGLLKIYNTEDKEGRKVYYSKEAESLFEADLRKKLVPFYKANIIIEEHEQEIIFQDLFPILMDQLKKQEFIKIGRLDKQIEAFLEGENEEGQIFCNHPDKLKKLYHPSDIEVFKKKTIKDEWGNEKVVLGSPLTTSIKNPMAMRALHQLRKVLNTLIANDQIDEDTRIHIEMARELNDANKRKGIQDFQNENKKFKEDAIKEIKKLYLEQCHKEVNPTEDDILRYQLWLEQGKCEIYEEGNNISICDIIGSNPSYDIEHTIPRSISQDNSQMNKTLCSQRFNRDIKKQKMPIELSNYNDILPRIAHWKKEAEELTRQIETISKSIKSAATKEAKDKNIRKRHYLTLKRDYILGKYDRFTWEEPKVGFKNSQIPDTGIITKYAQAYLKSYFKRVESVKGGAVAEFRKLWGIQESFIDENGLKHFKEKDRSKHTHHTIDAITIACMPKDKYDLLAHAWRLEDEQDKKAAKVLIEQAKPWKTFKEDIEKIETEILVSHFTPDNVKKQTKKILRVRGKKQYVAEIERNANGKAIPKKDANGKIIYKLNEKGNKIPILQQGDTIRGSLHQDSIYGAIKNPLNTNEIRYVIRKDLESLKANDIENIVDENVKAKVKEAVTNKILLISSNPQQKNKFAEGKNVWMNEEKKIPINKVRIYANSVKNPIEIKKHSTLSKSKHEHKQTVYGQNDENYAMALYELDGKREFELINNFNLAKLLKQDQGYYPLHKEKEIKGKKVLIPIEKRNNRDVILKRGQQVVFYDKTVENPKDISEILDFRERVYLIEGLSIQRQIVSGKLYEFGIIMLRFFKEARKIDVIKKDNYKPDGPFKLGENKPTRKMNHNQFTAFLEGIDFKVLPSGKFEKI

SEQ ID NO: 7424 - protein, 1459 aa, synthetic construct
  REGION 1..1459: note = Synthetic
MARILGLDLGTNSVGWAVVERESGIFSLMDKGVRIFSEGVKSEKGIESSRAAERTGFRSARKLKYRRKLRKYETLKVLSKNGMCPLTVENVEDWKKSGFKDYPLNPEFLSWLRTSDDDKINPYIFRDRASRHKISLFDLGRAFYHIAQRRGFLSNRLDQSAEGIFEEHCPQIENSIEDLNFTEDILMELQDYFKTVGILDESVKGGFAKDLDEGEKKLKSLYNSLKGIIKKNEGDIDKCKEELIYRLNKKEDLGKVKGEIKDISQAMLEGGFKTLGQYFCSLYNKERIRNHYTSREEHYLEEFITICTVQGIETINENEKLPEKRFSGLAKELYRAIFFQRPLKSQKGLIGKCSFEKNKARCSVSHPDFEEYRMWSYLNIIKIGTQSEKTMRFLTDKEKSRLIPKFMRKKDHFNFEDLAKELIEKGASFGFYKSSRRNGFHYWFNFKPNDTVSGCPVSASLKNTLGEDWKIKSFKYKTLNSKSAQVDRTVGYRDLWHLLSVSTSDAYLYEYAKDKLGLDAKAAKAFSKIKLKKDFASVSLNAINKILPYLKRGLLYSHAVFMANIEKLVDEEIWENQEERLSIQNGIAKIIETNTFENGISGLINSIIKDCKQNGYFYSDESKHLYKKQLDEKLEPFIKGFKIENTEQRELIANEAFVRLLKQIKEFEYLKIKRLDEKVVEFILGNNENGVIYCSDEKRVNKLYHPSDIEVFKKKIIKDDNGNEKLVLGSPITSSVKNPMAMRALHQMRKVLNALILEGQVDEKTIIHIEMARELNNANRRKGIQDFQNENKRKREEAIKEIKKLYLEECHKEVEPTVDDVLRYQLWIEQNRCEIYERGNNISICDIIGANPKYDIEHTIPRSISQDNSQLNKTLCSREFNRDIKKNKMPIELSNHLEILPRIAHWKEEAENYDREIEIITRSIKSVATKEAKDKKIRRRHYLSLKRNYLQGKYERFIWEEPKVGFKNSQIPDTGIITRYAEAYLKSYFRRVESVKGGMVAEFRKQWGIQESFIDENGQKQYRPKDRSKHTHHTMDAITIACMTKDKYDVLAQAWKLEDEQNKTKARAIIEAAKPWKTFKEDMVKIEKEILVSHYTPDNVKKQSKKIVRIRGKKQFVAEIVRDDNDKAIPKKDSNGKVIYKLNPEGIKIPRYQQGDTIRGSLHQDSIYGAIKDPLNKKEIRYVIRKDLESIKASDVENIVDEAVKKKVREAILNKVLLISSNPQQKNKFAKNEKVWMNKDKEIPINKVRLYAKSVKNPLEIKDHSALSKSRHEHKQKIYGQNDENYCMAIYELDGKRDFELVNNFNLAKLIKQDEGFYPMSKQKKVKGKVVEMPIVKSNNRDLVLKRGQQVIFYDKKVENPKSITEISDFIGRMYIIEGLSIQRIVRPSKKIDEYGVIMLRYFKEARKADDIKKQKFKPDGEFNLNESKPLRKMNHNQFSAFVEGIDFKVLPTGKIEEL

SEQ ID NO: 7425 - protein, 1458 aa, synthetic construct
  REGION 1..1458: note = Synthetic
MARILGLDLGTNSIGWAIRDTENEGKEQIIDKGVRIFSEGVKSEKGIESSRAAERTGYRSARKIKYRRKLRKYETLKVLSVNGMCPLSIEEVEEWKKSGFKKYPLNPEFLKWLRTDEVENQNPYVFRDRASKQKVALFELGRAFYHIAQRRGFLSNRLDQSAEGVFEEHNPQIQALIEDLDNINLILEELNGYYLNIGIIELTEKVVFKKDLDEGEKKLKTLYNSLVAITKKNEGDIEKCKEELIARLNKKDDLGKVKGKIKDISQAMLDGNFKTLGQYFYSLYNKGKIRNQYTSREEHYLEEFITICKVQGIEGINNAEKLPEKKFTGLAKDLYKAIFFQRPLKSQKGLIGKCSFEKSKSRCAISHPDFEEYRMWTYLNTIKIGTQSEKTLRFLTQEEKLKLIPKFYRKNDFNFEVLAKELVEKGASFGYYKSSKKNEFFYWFNYKPTDSVSACQVSASLKNIVGDDWKTKTFTYQTLNAKKEEVTKTVNYNDLWHLLSVSTSDIYLYEYAKEKLGLDDKSAKAFSKIKLKKDFASLSLSAITKILPYLKEGLLYSHAVFMANISTIVDAEIWKDVEQRNYIQNKIAEIIENYTFEKGLLEVVNGLIKEYKTENEDGKKVYYSNEAEPEFANDLKKKLLGFYKSNKIEDEREQQAIFNHLLPIFNDQLKKYEFIKIKRLDEKVLEFLKGENETGQVFCSEEKGTDQEKEKKVNNRLKKLYHPSDIEVFKKKIIKDDFGNEKVVLGSPLTSSIKNPMAMRALHQLRKVLNTLILEGEVDENTRIHIEMARELNDANRRKGIQDYQKENKVFRDNAIKEIKKLYLDECGKEVEPTEDDILRYQLWIEQDKCEIYEQGKNIRICDIIGSNPAYDIEHTIPRSISQDNSQMNKTLCSQRFNREIKKQKMPIELSNHLEILPRIAHWKEKADNLSREIEIISRSIKAASTKEIKDKKIRRRHYLTLKRDYLQGKYDRFIWTEPRVGFKNSQIPDTGIITKYAQAYLKSYFKRVESVKGGMVAEFRKQWGIQESYIDENGFKQYKEKDRSKHTHHTIDAITIACMTKDKYDVLAHAWKLEDEQNKKEAKAIIEQAKPWKTFKEDLLKIEEEILVSHFTPDNVKKQSKKIVRVRGKKQYVAEIEHDAKGKAIPKKDVNGKIIYKVNDKGEKMPRLHQGDTVRGSLHQDSIYGAIKNPLKTDEIRYVIRKDLESLKANDIENIVDETVKEKVKEAIANKVLLLSSNAQQKNKIADNKKVWMNEEKQVTIKKVRIYANSVKNPLEIKEHSLLSKSRHEHKQKVYGLNDENYAIVIYEGIDKKGKVKRSFESINTKEAGQFYKLSNKEFAKSYDIVTNPHDKTDLPLKYILKKGMMVLFFKEEASELLELDVKDLNNRLYKLSKFDAQGRLTFRTHFEARQASELKEIYNVDFEKPFEQIRLQVSKLDMIVEDYEFKIAPTGKIIFL

SEQ ID NO: 7426 - protein, 1457 aa, synthetic construct
  REGION 1..1457: note = Synthetic
MAKILGLDLGTNSIGWAIVEKNNSDFTLIDKGVRIFSEGVKTEKGIESSRAAERTSYRSARKIKYRRKLRKYETLKVLSKNRMCPLQIEDVEAWKKSGFKDYPLIPEFLQWLRTNDYENVNPYFFRDKASRAKVSLWELGRAFYHIAQRRGFLSNRLDQSAEGILEEHNPQLQSLIEDLEETSTILNEIRDYYINLGLLDEVKGDFKKDLDEGEKKLKSLYNALIAIIKKNENDVQKCKDEIIKRLNKKEDLGKVKGKIKDISQAMLDGNFKTLGQYFYSLYNKGKIRNQYTSREEHYLQEFITICKVQGINGINDEEILPEKKFTGLAKDLYKAIFFQRPLKSQKGLIGKCSFEKNKSRCAISHPDFEEYRMWNYLNTIKFGTQNDKKLRFLTQEEKLKLIPKFYRKNDFNFEVLAKELIEKGATFGFYKSSRKNEFLYWFNYQPTDTVSACQFSAYLKNAIGEDWQTNVFTYKTLNSEKKEVIRTVDYRDLWHLLSVSTSDIYLYEYAKEKLGLEDKSAKTFSKIKLKKDFASLSLSAINKILPYIKEGLLYSHAVFMANIEKVVDEHIWKDVKERAIIQNEISKIIKSDVFEREVLNIVNGLIKNSKTEGENYAEESKNIFKTEFDKAIAKIFEKNNDIEFNQTFLDDTYLKYVEELKKFDKARSFLPVPRLDEKVIQFLLGNNKDGMVYCSDKNKTKKLYHPSDIEIFKKKIIKDELGNEKMVLGSPLTTSIKNPMVMRALHQLRKVLNTLILEEQIDENTRIHIEMARELNDANKRKGIQDYQNENKKFREEAIKEIKKLYFEECKKEVEPTEDDVLRYQLWIEQDKKEIYEQGKSIRISDIIGSNPAYDIEHTVPRSISQDNSLMNKILCTPRFNREIKKQKMPIELSNYEEILPRIEHWKKEAEELTRQIESISKSIKSASTKEAKDKNIRRRHYLTLKRDYLKGKYDRFIWEEPKVGFKNSQIPDTGIITKYAQAYLKSYFKRVESVKGGMVAEFRKQWGIQESYMDENGFKHYKEKDRSKHTHHTIDAITIACMTKDKYDVLAQAWTSEDEQDKQKAKILMSEAKPWKTFKEDIDKIEEEILVSHFTPDNVKKQSKKIVRVRGKKQYVAEIERDVNGKAMTKKDANGKIIYKLNEKGEKIPRLQQGNTIRGSLHQDSIYGAIKNPLNQEEIKYVIRKDLESLKANDVDNIVDETVKQKVKEAIENKILLLSSNAQQKNKLVDDVWLNKEKQVPIKKVRIYANSVKNPLEIKEHSLLSKSRKEHKQKVYGQNDENYAMAIYELDGKREFELINNFNLAKLIKQKEGFYPLNKEKEVKGKKVLYPIAKSNYRDVVLKRGQQVVFYDKEVENPKDISEVIDFKGRIYIIEGLSIQRIVRPSGKIDEYGVIMLRYFKEARKADEIKKDNYKPDGVFKLGENRPTRKMNHSQFTAFVEGIDFKVLPTGKFDKI

SEQ ID NO: 7427 - protein, 1455 aa, synthetic construct
  REGION 1..1455: note = Synthetic
MTKILGLDLGTNSIGWAIVNKDENNFNLLDKGVRIFSEGVKTEKGIESSRAAERTSYRSARKLNYRRKLRKYETLKVLSKNEMCPLSIEEVEDWKKSGFKNYPLNPEFLKWLRTNEDKNINPYFFRDKASKQKVTLYELGRALYHIAQRRGFLSNRLDQSAEGILEEHCPKIEAIVEDLNSYDEILENLREYFFETGILDSNEKSGFTKDLDEGDKKLVSLYKSIQAIIKKNDTDFEKGKAEITERLNKKDVLGKVKGKIKDISQAMNDGGFETLGQYFFSLYNKGKIRNQYTSREEHYLEEFITICKVQGINFINEKEQLPEKKFDGLAKDLYKAIFFQRPLKSQKGSIGKCSFETNKSRCAVSHPDFEEYRMWTYLNTIKIGTQSEKTLRFLTQEEKLKLVPKFYRKNDFNFEVLAKELVEKGASFGFYKSSKKNEYFYWFNYKPTDSVSACQVSSSLKNVVGEDWKIKIFNYKTLNAKKEAVTKSVDYKDLWHLLSVATSDVYLYEYAKEKLGFDDKSAKAFSKIKLKKDFASLSLAAISKILPYIKEGLLYSHAVFMANIENIVDENIWNDIEQRKYIQTKIAEIVDNYTFEKNQLEIINGLIKEAKLQTEYYSTEAEQIYKTDLAKKLVLFYKNHSIENENDQKNIFDNLFPIFIEQLKKYEFIKIKRLDEKVLEFLSGQNEDGEVFCSNPKQLKKLYHPSDIDVFKKKIIKDEFGNEKIVLGSPLTPSIKNPMAMRALHQLRKVLNTLILEGQIDENTRIHIEMARELNDANKRKGIQDYQNENKKFREHAIKKIKKLYFEECKKEVEPTEDDILRYQLWDEQGKCEIYEQGKNISICDIIGNNPAYDIEHTIPRSISQDNSQMNKTLCSQRYNREVKRNKMPVELSNHSEILPRITHWKEEAYNLSREIEIINRSIKAAATKEVKDKKIRRRHYLTLKRDYLQGKYDRFIWKEPKVGFKNSQIPDTGIITKYSQAYLKSYFKRVESVKGGMVAEFRKQWGIQESFIDENGFKQYKEKDRSKHTHHTIDAITIACMTKDKYDILAKAWTSEDEQDKQKSKNLMSEAKPWKTFKEDLEKIEKEILVSHFTPDNVKKQSKKILRVRGKKQYVAEIERDVNGKAILKKDNNGKVIYKLDKEGKKLPRFQQGDTVRGSLHQDSIYGAIKNPLNTEEIRYVIRKDLESLKANDIENIVDEMVKKKVKEAVVNKVLLLSSNAQQKNKMNGVVWMNEEKQVPINKVRIYANSVKNPLEIKEHSLLSKSKHEHKQKVYGQNDENYAMAIYELDGKREFELINNFNVAKLLKQGQGFYPLHKEKEIKGKKVLVPIEKRNNKDVVLKRGQQVVFYDKDVENPKDIKEIIDFNGRIYIIEGLSIQRQVVSVKLYEFGIIMLRYFKEARKADDIKKDNFKPDGVFKLGEVKPTRKMNHNQFSAFVEGIDFKVLPTGKFEKI

SEQ ID NO: 7428 - protein, 1455 aa, synthetic construct
  REGION 1..1455: note = Synthetic
MTKILGLDLGTNSIGWAVVDKDGNDFTLLDKGVRIFSEGVKSEKGVESSRAAERTGYRSARKIKYRRKLRKYETLKVLSVNGMCPLTVEEVDEWKKSGFKTYPLNPEFLKWLRTNEDENINPYVFRDKASKQKVPLYEFGRALYHIAQRRGFLSNRLDQSAEGIMEEHCPVIQTAIEDLNTIDEMKTELKDYFFNTGILDESIKGGFKKDLDEGETKLKSLYNALIGIVKKNENDIAKAKDEVIARLNRKEDLGAVKRVIGEISQAMKDGNFATLGQYFFSLYSKDKIRNKYTAREEHYLKEFEILCKIQGIDGIDEKEQLPEKRYFGLAKELYKAIFFQRPLKSQKGLIGKCSFEKSKSRCAISHPDFEEYRMWTYLNTIKYGTQSEKTLRFLSQDEKMSLVSKFFRKKDNFNFEDLAKELIPKGTTFGFYKSSNKNEFHYWFNYKPTDTVTGCPVSASLKNVIGENWKTKTFTYETLNSKAERVSRTVDYKDLWHLLSVSTSEVYLYEYAKDKLGLEDKASKAFSRIRLKKDFASLSLNAINKILPYVKEGLLYSHAVFMANIENIVDKEIWEDITQRKYIQDKIALIIENHIYENSLLEVVNSLIKDCKTDNCYYSKEAETTYKDDLNKKLITFFKYNKMEDAGEQQSLLDKLFPIFIEQLKAYEFIKIKRLDEKVFEFLNGESEDGQVFCMNEKRLKKLYHPSDIEVFKKKIIKDAFGNEKIVLGSPLTTSIKNPMAMRALHQLRKVLNTLIFEGQIDEKTKVHIEMARELNDSNKRKGIQDYQNENKKKRDDAIKDIKKLYWEECKKEIEPTDDDLLRYQLWLEQNRSEIYEEGRNISICDIIGNNPKYDIEHTIPRSISQDNSQMNKTLCSPKFNRNIKGNKMPVELSNYLEILPRIAHWKKEAENLSREIELITRSIKGVATKEAKDKKIRRRHFLTLKRDYLKGKYERFIWEEPKVGFKNSQIPDTGIITKYAQAYLKSYFKRVESVKGGMVAEFRKIWGVQESYHENDKKYFLEKDRSKHTHHTIDAITIACMTKEKYDVLATAWTLEDKEQINEARKLLADSKPWKTFKEDLKKLEEEVLVSHHTPDNVKKQSKKIVRIRGKKQYVAETEKDANGKTVVKKDVNQKIVYKLDGKGNKIPRLQQGDTIRGSLHQDSIYGAIRNPLNNEEIRYVIRKDLESIKATDLENIVDETVKEKVKKAIENKVLLISSNAQQKNKLNGTVWMNEEKGIVIKKVRIYANSVKNPLEIKEHSPLSKSKYKHKQKVYGQNDENYCMAIYELDGKRDFELINNFNLAKLIKQGQGYYPLYKEKEIKGKKVQIPVAKSNNRDVILKKGQQVVFYDKEVENPKDITEIIDFKDRAYIIEGLSINRVKSGNNFYEFGVIQLKYFKEARKADDIKKDNFKPDGDFKLTEYKPTRKMSPGQFTAFVEGIDFKVLTSGKYKKI

SEQ ID NO: 7429 - protein, 1455 aa, synthetic construct
  REGION 1..1455: note = Synthetic
MAKILGLDLGTNSIGWAIVEKEGIEFSLIDKGVRIFSEGVKSEKGVESSRAAERTGFRSARKIKFRRKLRKYETLKVLSKNNMCPISIEEVEEWRNSGFKKYPLNPEFLKWLRTDEEENINPYVFRDRASKQNVSLFELGRAFYHIAQRRGFLSNRLDQSAEGILEEHCPQIISIIEDCNSNTEIRIELKDYFYDKGILDETNKGGFKKELDEGEAKLKTLYNALLGIVKNNENKFVTAKEEIIVRLNRKEDLGKVKGKIKDITQAMLDGNFKTLGQYFFSLYNNGKIRNQYTSREEHYLEEFNIICKTQGIGEIIDNELLPEKKYNGLAKDLYKAIFFQRPLKSQKGLIGKCSFEKSKTRCAISHPDFEEYRMWTYLNTIKIRTQSDKTLRFLSQEEKQSLIPKFLRKKDNFSFEDLAKELIPKGATFNFYKSSKANEVNYLFNYKPYDTVTASPVSASLKNVFGEVWKIKTISYKTKNSKGIEVNRTVDYKDLWHLLSVSTSDIYLFQYAKEKLGLDDKNAKAFSKIRLKKDFASLSLNAITKILPYVKEGLLYSHAVFMANIEKIVDESIWNDSNQRKFIQDKIAEIIENHTFENGKLEVINSLIKEYKSGDKEEGKKTFYSKEAESLFRQDLDKKLTPFIKFHKIESDRESIVNELFPVLIEQLKQYEYIKINRLDEKVLDFIKGKNDDGEIFCTNEKRINKLYHPSDIEVFKKKIIKDEFGNEKVVLGSPLTSSIKNLMAMRALHQLRKVLNTLIFEGQVDEKTIIHIEMARELNDANKRKGIQDYQNENKKNREEYAKEIRKLYFEECKKEIEPTEDDLLRYQLWLEQNKQEIYEEGRNISICDIIGSDPKYDFEHTVPRSRSQDNSQMNKTLCSQKFNREIKGNKMPIELNNYLEILPRIAHWKEESDNLTREIEIISRSIKAAATKELKDKKIRRRHYLTLKRDYLKGKYDRFIWEEPKVGFKNSQIPDTGIITKYSQAYLKSYFKRVESVKGGMVAEFRKIWGIQESFQENDKKYFHEKDRSKHTHHTIDAITIACMTKEKYDTLANAWTHEDKGQLGEARKLLADSKPWKTFKEDLIKIEEEILVSHYTPDNVKKQSKKIVRIRGKKQYVAETVKDVNGKAIVQKDADDKIIFRLNKEGKRIPRLQQGDTIRGSLHQDSIYGAIKNPLNTEEIRYVIRKDLESIKASDVENIVDEMVKEKVKDAISNKVLLISSNAQQKNKLEGIVWMNQEKGIPINKVRLYANSVKNPLKIKTHSELSKSRHEHKQKVYGQNDENFAMAIYEGIDKKGNVKRSFESVNYMDAGAYYKLSNKNNNSNPLVPMIHLKTQLPLKYEIKKGDLVLFYKENKEELNEIGNQDLMKRLYKVIGFEGDGRIQFRHHKTAMQQSSSNKEELTIVKFMADNNLKNSQVDFENPVPWLRLRVSNCDFLLIKKEFKITSTGRIDF

SEQ ID NO: 7430 - protein, 1454 aa, synthetic construct
  REGION 1..1454: note = Synthetic
MAKILGLDLGTNSIGWAIVDKDGTDFSLVDKGVRIFSEGVKSEKGIESSRAAERTGFRSARKIKFRRKLRKYETLKVLSENNMCPLSVEEVIEWRKSGFKKYPLNPEFIAWLRTDDDKNLNPYYFRDKSSKQKTSLLSLGRAFYHIAQRRGFLSNRLDPSAEGVIEQHKPDLEDILENVATITELQMELTDYFQNRDLIERKATDLDDGEKKLKTLYNSFFKTIKDNPKDFERTKTILLERLNKKEDLGAVKQKIGEISQAMKLGNYATLGQYFFSLYNIGKIRNQYTAREEHYLSEFEVICLVQGIDGIIATEKLPEKRYFGLAKELYKAIFFQRPLKSQKGLIGKCTFEKSKSRCAISHPNFEEYRMLCFINTIKIKTPDDETLRFLTNEERLKITPKFLRKKDNFNFEDLAKELVPSGGKYAFYKSSAAPNVNYLFNYNMNSSVSGCVVSTSLKNALGEDWKTKIYSYETLNKSGEIVTRNVDYNDLWHLISVSTSDLYLQEFAKYKLKLDDKKAILFSKIKLKKDFASLSVTAINKINLFLREGLLYSHAVFMANIKNIVDVDIWKNLEDRKHIQTKIAELIATNTFDNNLLEIVNGLIKECKVGGFYYSKEAEGTYKSDLEKKVSYFVKSNKIDDQNEVIVKKLFPIYIEQLKKYEFLTIKRLDEKVFDFLDGQNDDGQVFCNAKNKLNKLYHPSDIDVFRKQILKDGNGNEKLVLGSPLISSIKNPMAMRALHQLRKVLNALIIEGLIDEKTRIHIEMARELNDANKRKGIQDYQRDIENSRKAYIEEIKKDYKAETGIDIEPTEDDILRYQLWIEQDRKTIYEEQYTNISICQIIGSDPDYDIEHTIPRSRSQDNSQMNKTLCSKRYNREIKKNKMPIELSNHSDILDRVAPWQKKYLALEYDIIGISRAIKAATTKEQKDRKIRLRHKLNLQKEYFKGKYERFTYKEPKVGFKNSQIPDTGIITKYASAYLKSYFGRVEAVKGGMVAEFRKAWGIQESYIKDGKKYYKIKDRSKHTHHCIDAITIACMTKDKYDVMAHAWDLEDDLEKNQYKLMKSVLEQSKPWKTFTEDLKKIEDEILVSHHTPDNVKKQSKKIIRIRGKKQFVAEMEIDTNGKNVPRTDINNKIIFKKDSNGEKMARFHQGDTIRGSLHQDSIYGAIKNPLHQEEIRYVIRKDLESIKASDVENIVDEVVKEKVKQAIAAKVLLLSSNPQQKNKLAENQKVWMNEEKGVAINKVRLYANSVKNPLEIKDHAVLSQSRHKHKQKVYAQNDENFCMAIYEIDGKRDFELINNFNLAKLQKQGEGYYPLFKEKNVNGKTVQIPIAKRNKRDLVLKRGQQVIFYDKEVENPNDVYDLVDLKGRIYIIEGLSIQRINSSGKQYDFGVIMFRYFKEARKLEDLKNDKYKPDGVFKLEETKPTRKMNHNQFNAFVEGIDFKVMSSGKIEKI

SEQ ID NO: 7431 - protein, 1446 aa, synthetic construct
  REGION 1..1446: note = Synthetic
MEKILGLDLETNRIGWAIVKQGSSEFTLVDKGVRVFTAGVKSEKGIESSRASERTAYRSARKIKYRRKLRKYYTLKVLSINKMCPLTVDEVEGWKKSGFKKYPLNPAFLKWLRTDEQKNLNPYYFRDMASREKVTLLELGRAFYHITQRRGFLSNKTDQSGQGILEEHSPIIESIVEEVNSTAELLCELKDYFFNLGIIAENNKDGLKKNLDQGDTKLKILYNSLRTILVENQDNLSKAKQEVILRLYRQEDLGLIKKEIGKISQAMSDGNFSTLGQYLFSLYSKERIRKKYTAREEHYLKEFEILCRVQGIQNIDQSEQLPEKRYAGLARDLYKAIFFQRPLKFEKGTAGKCPLEKNKSRCAASHPDFEEYRMWNFLNTIKYGRSSEKTLRYLTLDEKLRLIPKFLRKKNTFVFEDLAKELIPKEATSEFYKSSSREEFDYLFNYNPRHTVMGCPVSASLKKAIGENWKIKTFTYTALNSNGLEVCRSVNYGDLWHMLSVATSNVYLFEYAKNKLGLDLPSAKAFSSIKFRREYGNLSLNAIDKILPYLKQGLQHSHAVLMGNVSNIVDGTIWDDPVKRKFIQDKIGFVIENHTSENGLVEAMNSLIKEYKANGIEYSQVAETGYKSALNAKLVSFFRYNAREDKNTILNKLLPIFIDQLKGNDLIKTKSLMEKVMAFLAGDNEEQLKLCSSERRLNLLYNPSNVKTFKNKIIKDEFGNKIALLGSPVIDSVKNPMAMRTLHQLRALLNTLIREGQIDPTTKIHINMAPELSDANKRKAILDYQNELKKKRQEAREQIGKLYATQGKEGLSPTDSDVLRYQLWVEQNKAEIYEGNKEISICDIVGEHPRYNIFYTIPRSISRDNSQRNMTLCSKEFKRDTKRSEIFTQLSSKPEIGSRIVHWKEEADKLSKDIEALNCSVKAAASREARDSKIRRRHYLSLKRDYLQAKFERFFWTENKSAFKNGKSLETGNISKHIQSYLKSYFERVEVVQVALVDEFRKIWKMEENYQKNDLRKHSHCAIDAIIVACMTRDKYKMLFSAWDLEEKEYIEEAKTLLAQCRPWKNFTEDLKKIEHEIQISHHRPDNVKKQSKKIIRIRGKKQFVAEMEIDPQGRRAVKKDSNQKIVYKLDKSQEKVPRFQQGDTIRGSLHQEHFYGAIKNPLNHDQIYYVIRKDLLSIKAADVESIVDHVVKEKVKQAIENKVLLLSSNQQQKNKLAPNSKVWMNKEKGIAINKVRLYANAVKNPLEIREHSVLSKSPHEHKQKVYGQNNRNYAMVLYETDDIKEFELINNFSLAKFKKQGLGDYPLRKEKQVKGGKRLIPVARRNNRDVVLKRGLQVVFYDDERENPKNVLEITDFAGRIYTIEGLTIQRRKYKNKEFVYGKIILRCFNEARGFDEIIKENFKPAGGFRLGEYKPIRNMNHIQFSAFVEGIDFKVLASGKIVKI

SEQ ID NO: 7432 - protein, 1442 aa, synthetic construct
  REGION 1..1442: note = Synthetic
MAKILGLDLGTNSIGWAVVDKEGNDFTLVDKGVRIFSEGVKSEKGIESSRAAERTGYRSARKIKYRRKLRKYETLKVLSINGMCPLSIEEVEEWKKSGFKEYPLNPEFLKWLRTDDNENVNPYSCRDRASKQKVTLFELGRALYHITQRRGFLSNRLDQSAEGVFEEHCPQIQSAIEDVNTSDEILIELKDYFLNRGILDESITGGFKKDLDEGEKKLKTLYNSLVAITKKNENDIVKCKDELFTRLNKKEDLGKVKGKISEISQAMKDGGFVTLGQYFNSLYNKGKIRNQYTAREEHYLAEFEIICKTQAIEGITDSEQLPEKRYRGLTKELYRAIFFQRPLKSQKGLIGKCSFEKSKSRSAISHPDFEEYRMWTYLNTIKIGTQSEKILRFLSQEEKLSLIPKFLRKKDNFNFEDLAKELIEKGASFGFYKSSKRDSFHYWFNYKPTDTVAGSPVCASLKNVIGEDWRIKTFTYPTLNSKGIEVNRTVDYKDLWHLLSVSTSDIYLYEFAKDKLKLEEKNAKTFSKIRLKKDFASLSVNAINKILPYVKEGLLYSHAVFMANIGGIVDEAIWNDLAQRKYIQDKIAEIIANNTFDNGLLEVVNGLIKECKVDGAYYSKEAEATYRNDLSKRLVSFFKYHNITDGLKQEVILKELFPVFIEQLEAYEFIKVKRLDEKVLEFLKGENEDGEVFCNNPKQLNKLYHPSDIDVFKKQKARDKDGKETGQLILGSPLTSSIKNPMAMRALHQLRKVLNALIVEGQVDERTSVHIEMARELNDANKRKGIQDYQNENKKEREKYKEEIKKLYLAECGKEIEPTVDDLLRYQLWIEQDRKEIYENGNSISICDIIGENPKYDIEHTIPRSISQDNSQMNKTLCSQKFNRDIKKQKMPIELVNHLEILPRIAHWKKEAENYTREIEMIIRSTKTAATKEAKDKKIRRRHYLTLKRDYLQGKYDRFIWTEPKVGFKNSQIPDTGIITRYAQAYLKSYFKRVESVKGGMVAEFRKIWGIQESYQKDGKKYFVEKDRSKHTHHTIDAITIACMTKDKYDVLAHAWTLEDKEQLSDARKLLADSKPWKTFKEDLIKIEEEILVSHYTPDNLKKQSKKIVRIRGKKQYVAEIERVANGKAVPKIDSSRKIIYKFGKDGKKLPRLQQGDTVRGSLHQDSIYGAIKNPLNIEEIKYVIRKDLESLKASDIENIVDEIVKEKVKEAVTNGILILSSNAQQKNKITEGKKVWMNEEKGIAINKVRLYANSVKNPLEIKEHSLLSKSRHEHKQNVYAQNDENFAMAIYEDFDKKGKIKRSFEMINNIDAGSYYRLGNEENKLKYDIVTNPHDKTGLPLKYILKKGLMVLFFKENFQEILELPTSDLHNRLYKLAKFDAQGRLTFRTHFEARQASELKEIYNVDFESPFEQIRLQVSKLNMLVEGYEFVLTASGKITFI

SEQ ID NO: 7433 - protein, 1438 aa, synthetic construct
  REGION 1..1438: note = Synthetic
MARILGLDLGTNSIGWAIVEKENNDFSLLDKGVRIFSEGVKSEKGIESSRAAERTSYRSARKIKYRRKLRKYETLKALSINGMCPLSLEEVEAWKKSSFKDYPLNPEFISWLRTNDDENINPYFFRDRASKQKVTLYELGRALYHIAQRRGFLSNRLDQSAEGVFEEHNPQIQSLIEDLDSVNSIFDELKDYFINLGIIDLSEKGGFKKDLDEGEKKLKTLYNSLVAIAKRNENDVVKCKEELIVRLNKKEDLGKVKGEIKEISQAMLDGNFKTLGQYFYSLYNKGKIRNQYTSREEHYLEEFIIICKVQGINGIDDNEKLPEKKFTGLAKDLYRAIFFQRPLKSQKGLIGKCSFEKSKSRCAISHPDFEEYRMWTYLNTIKVGTQSEKTLRFLTQEEKSKLVPKFYRKNDFNFEILAKELVEKGTSVGFYKSSKKNEFFYWFNYKPTDTVSACQVSASLRNVIGEDWKTKIFTYKTFNSKKEEVLKSVDYKDLWHLLSVATSDIYLFDFAKEKLGFDDKNAKAFSKTKLKKDFASLSLSAITKILPYIKEGLLYSHAVFMANIENIVDKDIWQNDEQRHYIKNQIAEIVDNYTFEKNQLEIINGLIKESKLKEEYYSKEAESIYKKDLANKLVSFYKNNAVENESEQKEIFDSLFPIFIGQLKKYEFIKIKRLDEKVLEFLSGENEDGEVFCSNPKQLKKLYHPSDIDVFKKKIIKDEFGNEKVVLGSPLTNSIKNPMAMRALHQLRKVLNTLILDGQVDENTRIHIEMARELNDANKRKGIQDYQNENRKFREDAIKEIKKLYFEDCKKEVEPTEEDILRYQLWTEQGKCEIYEQGNNISISDIIGSNPVYDIEHTIPRSISQDNSQMNKTLCSQRFNREVKKQKMPIELSNHSEILPRIAHWKQEADNLSREIDTISRSIKAASTKEVKDKKIRRRHFLSLKRDYLKGKYDRFIWTEPKVGFKNSQIPDTGIITKYAQAYLKSYFKRVESVKGGMVAEFRKQWGIQESFIDENGFKQYKEKDRSKHTHHTIDAITIACMTKDKYDVLAYAWKLEDEQNKKEAKAIIEQAKPWKTFKEDLLKIEEEILVSHYTPDNVKKQSKKIIRVRGKKQYVAEIERDVNGKAVPKKDSNGKTIYKLDKHGKKLPRLQQGDTIRGSLHQDSIYGAIKDPLNTEEIRYVIRKDLESLKANDIENIVDESVKEKIKEAVANKVLLLSSNAQQKNKLDGKVWMNEEKQVPINKVRIYANSVKNPLEIKEHSLFSKSRHEHKQKVYGQNDENYGIAIYEGIDKKGKIKRAFESINNKEAGQYFKLSNREFNQEYSIVENPHGKTGLPLKYILKKGMMVLFYKDSADEIYDISVKDLNKRLYRLSKFDAQGRLTFRSHFEAKQASELKEFYNVDFENPLEQVRLQVSKLDILVEGYEFIMTSTGKIILN

SEQ ID NO: 7434 - protein, 1436 aa, synthetic construct
  REGION 1..1436: note = Synthetic
MAKILGLDLGTNSIGWAIVEKENNDFSLVDKGVRIFSEGVKSEKGIESSRAAERTAFRSARKLKYRRKLRKYETLKVLSENGMCPLSFEEVEEWKKSGFKKYPLNPEFLKWLRTDEDQNINPYVFRDRASKQKVSLFELGRALYHIAQRRGFLSNRLDQSAEGILEEHCPQINSLIEDCNSNTEILIELKDYFFNVGILDETNKGGFKKELDEGEAKLKTLYNALLSIVKRNENKFIEAKEEIIARLNRKEDLGKVKGKIKDISQAMIDGNFKTLGQYFFSLYNKNKIRNQYTSREEHYLYEFIEICKIQEIDNIDENEKLAEKKFSGLAKDLYKAIFFQRPLKSQKGLIGKCSFEKSKTRCAISHPDFEEYRMWSYLNTIKMGTQSDKTLRFLSQDEKLGLISKFLRKKDNFNFEDLAKELIPKGATFGFYKSSKANEVNYLFNYKPYDTVTASPVSASLKNIFGEDWKTKTISYKTKNSKGIEVNRSVDYKDLWHLLSVSTSDIYLFQYGKEKLGLDDKNAKAFSKIRLKKDFASLSLNAITKILSYVREGLLYSHAVFMANIEGIVDESIWNDSNQRKFIQDKIAEIIENHTFENGKLEAINSLIKECKTVGAFYSKEAESIYKSDLDKKLIPFVKFHKIESDKEAILNELFPVLIEQLKKYEYIKINRLDEKVLDFIKGKNDDGEIFCTNEKRINKLYHPSDIEVFKKKIIKDEFGNEKVVLGSPLTSSIKNPMAMRALHQLRKVLNTLIFEGQVDEKTIIHIEMARELNDANKRKGIQDYQNENKKNREEYAKDIRKLYFEECKKEIEPTEDDLLRYQLWLEQNKQEIYEEGRNISICDIIGKDPKYDFEHTVPRSRSQDNSQMNKTLCSQKFNREIKGNKMPIELNNYLEILPRIAHWKEESDNLTREIEIISRSIKAAATKELKDKKIRRRHYLTLKRDYLKGKYDRFIWEEPKVGFKNSQIPDTGIITKYSQAYLKSYFKRVESVKGGMVAEFRKIWGIQESFQENDKKYFHEKDRSKHTHHTIDAITIACMTKEKYDALANAWTHEDKGQLGEARKLLADSKPWKTFKEDLKKIEEEILVSHYTPDNVKKQSKKIVRVRGKKQYVAETVKDVNGKAIVQKDVDDKIIFRLNKEGKRIPRLQQGDTIRGSLHQDSIYGAIKNPLNTEEIRYVIRKDLESIKASDVENIVDEMVKAKVKEAITNKVLLISSNAQQKNKLDGIVWMNEEKGIPINKVRLYANSVKNPLEIKMHSDLSKSRHEHKQKVYAQNDENFAMAIYEDFDKKGKIKRSYEMINNIDAGSYYKLSNAENKINYDIVTNPHDKTGLPLKYILRKGLLVLFFKENHQEILELPTDDLHNRLYKLAKFDAQGRLTFRTHFEARQASDLKEIYDVDFETPFEQIRLQVSKLNMLVEGYEFKLSSSGKITFI

SEQ ID NO: 7435 - protein, 1430 aa, synthetic construct
  REGION 1..1430: note = Synthetic
MVRILGLDLGTNSIGWAIVDKEGTDFSLVDKGVRIFSEGVKSEKGIESSKAAERTAYRSARKIKFRRKLRKFETLKVLSKNGMCPLSVEEVEAWRKSNFKSYPLNPEFLKWLSTDDNHNINPYAFRDRASKQKVSPYELGRALYHIAQRRGFLSNRLDQSADGIIEQHAPNIENRIEDAQTTADLLIEIKDYFEVLDILEKNSKDLDEGEKKLKSLFNALEKIIRSNDFENAKIELIGRLNRKEDKGAVKQEIGDISQAIKDGGFTTLGQYFCSLYNKNRIRNHYTAREEHYVKEFEIICSIQGIQGIDENEKLIEKRYSGLVKELYRAIFFQRPLKSQKELIGKCSLEKSKTRCAISHPDFEEYRMWTYINTIKIKTPEDEDLRFLTSEEKQKLIPKFLRKKDHFNFDDLAKELMLKGASFDFYKSPSVKYANYLFNYKAKDTVSGCVVSASLKNIFGEDWKVRSWAYQTQNNKGEKVSRNVDYKDIWHLLSVSTSDVYLEEYAKDKLGLDEKRAKLFSKIRLKKDFSSLSLNAINKILPYLKQGLLYSHAVFMANIENIVDENIWSNPTERMFIQNEIAKLIDTNTFENSKLVVVNELIKGCKVSNCYYSKEAESIYREDLKKKVISTFKNSDSQESIVNELFPIFIEQLKKYEYIEIKRLDEKVIEFLKGKNKDGEIYCSNQNRLKKLYHPSDIEVFKKKIIKDEFNNEIIVLGSPLISSIKNPMAMRALHQLRKVLNALIIEGLVDTKTKIHIELARELNDANKRKAIQDFQNENKTKRDDFRKEIKDLYFAECKKEIEPTEDDLLRYQLWIEQDKKEIYEEGRNISICDIIGENPKYDIEHTIPRSISQDNSLMNKTLCSQRFNRDVKKNKMPVELSNHEDVLLRIDHWRKEAEKLTWEIEQIVKSTKAATTKEAKDKKIRRRHYLTLKRDYLKGKYERFIWTEPKVGFKNSQIPDTGIITKYSRAYLNSYFTRVESVKGGMVAEFRKIWGLQPSYIKDNKKYYESKDRSKHTHHAIDAITIACMTKDKYDVLASAWSLEDDTEKENYKAVKELLEKSKPWKTFTEDLKKLEEEILVSHHIPNVVKKQSKKIIRVKGKKQYVAETEKDFKGKTILKKDVNGNIIYKVDKQDNRIPRFQRGDTVRGSLHQDSIYGAIKNPLNQEEIKYVIRKDLESIKASDVENIVDEVIKEKVKEAIRNKVLLISSNAQQKNKIAENQKVWMNQEKGIAINKVRLYANSVKNPLEIKEHSLLSISKHRHKQKIYAQNDENFAIAIYENIDKKGKTKRSYEMINNIDAGSYFKLSNDNKNTYDIVTNPHDKTGLPLKYILKKGMMVLFYKDSPQEILELPTEDLCNRLYKLSKFDAQGRLTFRTHFEARQASDLKEIYNIDFENPFEQIRLQVSKLNMLVEGYEFTLTPFGKINFL

SEQ ID NO: 7436 - protein, 885 aa, synthetic construct
  REGION 1..885: note = Synthetic
MAKILGLDLGTNSIGWAIVDKDGSDFSLVDQGVRIFPEGVKTEKGIESSKAAERTAYRNARKIKFRRKLRKYETLRVLSENNMCPLSVEEIIEWRKSGFKKYPLNPEFISWLRTDDDKNINPYYFRDKSSKQKATLLELGRAFYHIAQRRGFLSNRLDQSLEGIIEQHRSGLEDIIDNASSFTELQIELTDYFQDRDLIERKASNLDEGEKKLKTTYNSFLKIITDNIKDFDKTKSLLIERLNKKEDLGVVKQKIGEISLAMQSGNFTTLGQYFFSLYNKGKIRNQYTAREEHYLSEFEIICLAQGIEGIIASEKLPEKKYFGLAKELYRAIFFQRPLKSQKASIGKCTFEKNKSRCAVSHPDFEEYRMLQYINTIKIKTPNDERLRFLSNAERLKIMPKFLRKKDNFNFEELVKELVPSESKYAFYKSSSAPTANYLFNFNLNSSVSGCVVSASFKNVLGEDWKTKEYSYQTINKKAEIVTRNVDYNDLWHLISVSTSALYLQEFAKDKLKLDDKRAISFSKIKLKKDFASLSLKAINKINPFLREGLLYSHAVFMANIENIVDVDIWNDPNDRKYIQIKIAELIATNSFDNNLLDIINDLIKECKTEGCYYSKEAEATYKSDLDKKLSSFLRSNKIEDQKEAITNELLPLFIEQLKKYEFITIKRLDEKVFGFLNGQNDDGQVFCNNKNKLKKLYHPSDIDVFRKEITKDGNGNEKLVLGSPLISSIKNPMAMRALHQLRKVLNALIIEGQVDEKTRIHIEMARELNVANKRKGIQDYQRGIEKNRKEYIEEIKKDYKAASGLDIEPTEDDILRYQLWIEQDRKTIYEEECTNIRISQIIGSDPDYDIEHTIPRSRSLDNSKMNKTLCSKLYNRKIKKNKIPV

SEQ ID NO: 7437 - protein, 1445 aa, synthetic construct
  REGION 1..1445: note = Synthetic
MTKILGLDLGTNSIGWAIVDKEGNEFSLVDKGVRIFSEGVKSEKGIESSRAAERTGYRSARKIKFRRKLRKYETLKVLSKNGMCPLSLDEVEAWRKSGFKQYPLNPEFLNWLRTDDVHNINPYVFRDRASKTKVTLYEVGRALYHLAQRRGFLSNRLDQSAEGIIELHAPNIESRIEETTTINDLKIEIQEYFEGLDILDKNAKELDEGEKKLKSLYNALDKIIKANEFEKAKTEIIARLNWKEDQGAVKQEIGEISQAMKDGCFETLGQYFYSLYNKGKIRNHYTAREAHYLNEFEKICEVQKISAIDISENIPEKRYSGLAKELYRAIFFQRPLKSQKGLIGKCSLDKTKSRCAISHPDFEAYRMWSYLNTIKIKTPQEEQLRFLTIEEKQQLIPKFFRKKDNFNFEDLSKELIPKGYTPDFYKSSSAKTASYIFNYKAIDSVAGCVVSASLKNVLGEEWNTKTWTYETKNSKGEFVNREVDYKDLWHLLTVSTSDAYLEEYAIEKLGLDEKRAKSFSKIRLKKDFASLSLSAINKILPYLKQGLLYSHAVFMANIEKIVDENIWNNPEERLYIQNKIAEIIENNTFENSKLEIVNGLIKDSKLNSCYYSLEAEQSYKEDLVKKVNSIFKEIDNKEAIVNDLFPVFIEQLKKYEYISVKRLDEKVLEFLKGENEDGEIYCTNPSKLNKLFHPSDIDVFKKKVIEDEFGNKKVVLGSPLISSIKNPMAMRALHQLRKVLNTLIIEGLVDEKTRVHIELARELNDANKRKAIQDFQKENQTKREEFRKEIKALYLAEINKEIEPTEDDLLRYQLWIEQDKKEIYEEGKNISICDFIGENPKYDIEHTVPRSISQDNSLMNKTLCSQRFNREIKKNKMPIELANHEEIIKRVDHWRIEADKLSWEIEQLSKGIKAAATKDTKDRKIRRRHFLTLKRDYLKGKYSRFVWKEPKVGFKNSQIPDTGIITKYSRAYLNSYFSRVESVKGGMVAEFRKIWGIQESYSKDGKKYYVEKDRSKHTHHTIDAITIACMTKDKYDVLAKAWTDEDNENLPLARKLLADSKPWSTFTEDIKKIEEEILVSHHTPDNVKKQAKKIIRIRGQKQYLAEMTQEENGKKVPQKDENGKIIYKLNTDGKRIPRVQQGDTVRGSLHQDSIYGAIKNPLNPEEIRYVIRKDIESIKATDVENIVDEVVKEKVREAIANKVLLISSNPQQKNKLADNQKVWMNEEKGIAINKVRLYANSVKNPLHIKEHSNLSKSRHEHKQKVYGQNDENYAMAIYELDGKREFELINNFTLAKLQKTGEGFYPLFKEKEVKGKKILYPIAKSNNRDVVLRKGQQVIFYDKALEKPLDISHIDDFTGRIYIIEGLSINRVKSGNNIYEFGVIQLRYFKEARKADDIKKDKYKPDGDFKLGENKPTRKMSPGQFNAFVEGIDFKVLPSGKFEKI

SEQ ID NO: 7438 - protein, 1446 aa, synthetic construct
  REGION 1..1446: note = Synthetic
MAKILGLDLGTNSIGWAIVDKDENEFSLVDKGVRIFSEGVKSEKGIESSKAAERTGYRSARKIKLRRKLRKYETLKILSENGMCPLSVEEVEEWRKSGFKQYPLNPEFLKWLRTDDDQNINPYFFRDKASKQKVTLYELGRAIYHIAQRRGFLSNRLDQSADGIIEQHAPNIESRIEEAKTINELAVEVKDYFDGLDILDKNSKDLDEGEKKLKSLFNALEKIINSNDFEKAKVEVIARLNRKEDQGAVKQEIGEISQAIKDGGFETLGQYFSSLYNKGKIRNHYTAREEHYLKEFEVICEKQGIIGINKEEKLPEKRYTNLAKALYRAIFFQRPLKSQKGLIGKCSLEKSKTRCAISHPDFEEYRMWSYINTIKIKTPEDEKLRFLTSDEKQRLIPKFLRKKDNFNFEDLAKELISKDATFEFYKSTNAQAVNYLFNYKAKDTVSGCVVSASLKNVFGEDWNTKQWKYQTKNAKNETLSRTVDYKDIWHLLSVSTSDIYLEEYAKEKLELDHKRANSFSKIRLKKDFASLSLNAITKITPYLKQGLLYSHAVFMANIENIVDEHIWKNPQERLYIQNKIAELIDNNTFENIKLEIINGLIKDCKVDNCYYSKEAEATYKSDLEKKVVYVFRNNENQKAIIEELFPKFLEQLKKYEYITIKRLDEKVVEFLKGENEDGEIYCSNQNRLNKLYHPSDIEVFKKKIIKDEFGNEKVVLGSPLISSIKNPMAMRALHQLRKVLNTLIVEGLVDEKTKVHIELARELNDANKRKAIQDFQNDNKKDREKYREEIKKLYFEECKKEIEPTEDDLLRYQLWIEQDRKEIYEEGRNISICDIIGANPNYDIEHTIPRSISQDNSLMNKTLCSQRFNRDVKKNKMPVELTNHEEIKLRVDHWRKEAEKMTWEIEQILKSTKAAATKEAKDKKIRRRHYLTLKRDYLKGKYERFIWEEPKVGFKNSQIPDTGIITKYSRAYLNSYFNRVDSVKGGMVAEFRKIWGLQPSYIKDDKKYYEIKDRSKHTHHTIDAITIACMTKDKYDVMASAWGLEDDTEKENYKAVKALLEQSKPWKTFTEDLKKLEEEILVSHHTPDNVKKQSKKIIRIRGKKQYVAEVENDATGKTIAKKDAHGKVIYKLNNKGERIPRLQQGDTVRGSLHQDSIYGAIKNPLNIEEIRYVIRKDLESIKATDVESIVDEVVKEKVKEAIANKVLLISSNAQQKNKLDGTVWMNESKGIAINKVRLYANSVKNPLQIKEHSALSKSRHEHKQKVYGQNDENYCMALYELDGKRDFELINNFNLAKLIKQGQGYYPLNKEKEVKGKKVQIPIAKSNNRDVVLKRGQQVVFYDKDVETPKDITEIIDFKGRIYIIEGLSIQRIKSGNNEFEYGVIMLRFHKEARKADEIKKDNFKPDGIFKLGENKPTRKMNQNQLTAFVEGIDFKVMPSGKFEKI

SEQ ID NO: 7439 - protein, 1459 aa, synthetic construct
  REGION 1..1459: note = Synthetic
MSKILGLDLGTNSIGWAIVEKEDEQFTLIDKGVRIFSEGVKIEKGIESSRAAERTGYRSARKIKYRRKLRKYETLKVLSLNGMCPLSIEEVNSWKKSCFKEYPLNPEFIDWLRTSDDENINPYFFRDKASKRKVTLYELGRALYHIAQRRGFLSNRLDQSAEGVYEEHNPQIQGLIEDLDSTDLILSELKDYFIDIGILDESEKSGFKKDLDEGEKKLKTLYNSLVTITKKKEIDFVKCKEELITRLNKKDELGKVKGGIKDISQAMLDGNYKTLGQYFFSLYDKGKIRSQYTSREEHYLEEFITICKVQGIDGIDENEKLPEKKFTGLAKELYKAIFFQRPLKSQKGLIGKCSFEKNKSRCSISHPNFEEYRMWTYINTIKIGKQSDKILRFLTQEEKLKLVPKFFRKNDFNFEVLAKELIEKGASFGFYKSSNKNEFHYLFNYKPSDTVAACQVSASLKNAVGEDWKTKIFTYKTFNSKGVEVTRTVDYNDLWHLLSVSTSDVYLYEYAKIKLELDDKNAKSFSKIKLKKDFSSLSLSAITKILPYLKEGLLYSHAVFMANIKNIVDDKIWNDLDQRNYIQTKIAEIVENNTFDKNQLEIINGLIKDCKVNDEYYSTEAETIYKNDLLKKLVSFFKNHKIEDENEQLKIINNLFQIFIGQLKLHEYIKIKRLDEKVLEFLQGKNEDGEVFCSNPKHLKKLYHPSDIEVFKKKMIKNELGNEKVVLGSPLTSSIKNPMAMRALHQLRKVLNALILEGQIDEKTRIHIEMARELNDANKRKGIQDYQNENKKFREEAIKEIKKLYFEECKKEVVPTEDDILRYQLWIEQNKCEIYEQGKNISICDIIGSNPAYDIEHTIPRSISQDNSQMNKTLCSQRFNREVKKQKMPIELNNHIEIVPRITHWKVAADKLESEIDFLTRTIKSAATKEAKDKKIRRRHYLSLKRDYLKGKYERFIWEEPRVGFKNSQLPDTGIITKYAQAFLKSYFKRVESVKGGMVAEFRKQWGIQESYIDENGFKHYKKKDRSNHTHHTIDAITIACMTKDKYDVLAHAWKLEDEQNKKEARAIIEQAKPWKTFKEDLLKIEEEILVSHYTPDNVKKQSKKIIRVRGKKQFVAEIVRDVNGKAIPQKDINGKIIYKLNDKGEKIPRYQEGDTIRGSLHQDSIYGAIKDPLNINEIRYVIRKDLESLKANDIESIVDEIVKQKVKEAIENKVLILSTNAQQKNKFAENKKVWMNENKQVPINKVRIYANSVKNPLEIKEHSALSKSKHEHKQIVYGQNDENYAMAIYELDGKREFELINNFNLAKLIKQGEGFYPLTKEKEVKGKKALYPIAKSNKRDLVLKRGQQVIFYDKSIEKPKDLNEITDYYNRIYIIEGLSIQRIVRPSGKIDEYGVIQFRNFKEARKADDIKKDKFKIDGVFKLGENKPLRKMNHNQFSAFVEGIDFKVLASGKIEKII

SEQ ID NO: 7440 - protein, 1456 aa, synthetic construct
  REGION 1..1456: note = Synthetic
MTKILGLDLGTNSIGWAIVDKDSNDFSLVDKGVRIFSEGVKSEKGIESSRAAERTAFRSARKLKYRRKLRKYETLKVLSINGMCPLSIKEVEEWKKSGFKQYPLNPEFLKWLRTDEEENINPYVFRDRASKQKVSLFEFGRALYHIAQRRGFLSNRLDQSAEGILEEHCPQITLLIEDSISNTEILIELKDYFFNVGILDETNKGGFKKELDEGEAKLRTLYNALLGIVKRNENKFIIAKEEIIARLNRKEDLGKVKGKIKDISQAMIDGDFKTLGQYFFSLYNKSKIRNQYTSREEHYLEEFNIICKIQGIGEIIADELLPEKKYNGLAKDLYKAIFFQRPLKSQKGLIGKCSFEKSKTRCAISHPDFEEYRMWTYLNTIKIGTQSEKTLRFLSLEEKQSLIPKFLRKKDNFNFEDLAKELIPKGETFNFYKSSKANEVNYLFNYKPYDTVAASPVSASLKNIFGDDWKTKIISYKSKNAKGIEVNRTVDYKDLWHLLSVSTSDIYLFQYAKQKLGLDDKNAKAFSKIRLKKDFASLSLNAITKILPYVKEGLLYSHGVFMANIESIVDESIWNDGNQRKFIQDKIAEIIENHTYENGQLEVINSLIKECKTVGAFYSKEAESIYKSDLNKKLIPFFKFHKIELDKESFLNELFPILIEQLIKYEYVKISRLDEKVLDFIKGKNDDGEIFCTNEKRINKLYHPSDIEVFKKKIIKDEFGNEKVVLGSPRTSSIKNPMAMRALHQLRKVLNTLIFDGQVDEKTIIHIEMARELNDANKRKGIQDYQNENKKNREEFAKDIRKLYFEECKKEIEPTEDDLLRYQLWLEQNKQEIYEDGRNISICDIIGTDPKYDFEHTVPRSRSQDNSQMNKTLCSQKFNRNIKGNKMPFELSNHKEILLRVAHWKEESDNFTREIEIISRSIKAAATKELKDKKIRRRHYLTLKRDYLKGKFDRFIWEEPKVGFKNSQIPDTGIITKYSQAYLKSYFKRVESVKGGMVAEFRKIWGIQESFQENDKKYFHEKDRSKHTHHTIDAITIACMTKEKYDALANAWTQEDKGQLAEARKLLADSKPWKTFKEDLKKIEEEILVSHYTPDNVKKQSKKIVRIRGKKQYVSETIKDVNGKVIVQKDANEKIIFKLDKDGKRISRLQQGDTIRGSLHQDSIYGAIKNPLNTEEIRYVIRKDLESIKASDVENIVDEMVKEKVKEAISNKVLLISSNAQQKNKLAENQKVWMNEEKGIPINKVRLYANSVKNPLEIKEHSALSKSRHEHKQKVYGQNDENYCMAIYELYGKRDFELINNFNLAKLIKQGQGNYPLNKEKQLKGKKVQIPIAKSNNRDVVLKRGQQVIFYDKEIEKPKDITEIIDFKGRIYIIEGLSIQRIPSVSGSVNEYGVITLRYFKEARKSDEIKKDNFKPDGIYKLGEIKPTRKMNHSQFSAFVEGIDFKVLPSGKFQKI

SEQ ID NO: 7441 - protein, 1511 aa, synthetic construct
  REGION 1..1511: note = Synthetic
MAKILGLDLGTNSIGWAIVDKDGNDFSLVCKGVRIFSEGVKSEKGIESSRAAERTGYRSARKIKFRRKLRKYESLKVLSLNGMCPLSIEEVEDWKKSGFKEYPLNPEFLKWLRTSDDENINPYSCRDRASKQKVSLFELGRALYHITQRRGFLSNRLDQSAEGVFEEHCPQIQSVIEDVNTTDEILIELKDYFLNTGILDESIKGGFKKDLDEGEKKLKTLYNSLVAITKKNESEIEKCKEELFARLNKKEDLGKVKGKISEISQAMKDGSFETLGQYFNSLYSKGKIRNQYTAREEHYLAEFEIICKTQTIESIIDNEQLPEKRYRGLAKELYRAIFFQRPLKSQKGLIGKCSFEKSKSRCAISHPHFEEYRMWTYLNTIKIGTQSEKILRFLTQEEKLSLIPKFLRKKDNFNFEDLAKDLIEKGASFGFYKSSKRDSFHYWFNYKPTDTVSGSPVSTSFKNVIGEDWRIKTFTYPTLNSKGIEVNRTVDYKDLWHLLSVSTSDVYLYEYAKDKLKLEDKNAKSFSKIRLKKDFGSLSLNAINKILPYVKEGLLYSHAVFMANIEGIVDQAIWNDLAQRKYIQDKIAEIISNNTFDNGLLEVVNGLIKECKVEGAYYSKEAEPTYRKDLSKKLVSFFKYHEINDVLKQEKILKEVFPVFIEQLKAYEFITVKRLDEKVLEFLKGENEDGEVFCGNPKQLNKLYHPSDIDVFKKQKVRDENGKETGQLILGSPLTSSIKNPMAMRALHQLRKVLNALIVEGQVDERTRIHIEMARELNDANKRKGIQDYQNENKKEREKYKEEIKKLYLAECGKEIEPTVDDLLRYQLWIEQDRKEIYENGNSISICDIIGDNPKYDIEHTVPRSISQDNSQMNKTLCSQKFNRDIKKQKMPIELVNHLEILPRIAHWKKEAENYTREIEIIIRSTKTAATKEAKDKKIRRRHYLTLKRDYLQGKYNRFVWTEPKVGFKNSQIPDTGIITRYAQAYLKSYFKRVESVKGGMVAEFRKIWGIQESYQKDGKKYFIEKDRSKHTHHTIDAITIACMTKDKYDVLAHAWTLEDKEQVTDARKLLADSKPWKTFKEDLKKIEEEILVSHYTPDNVKKQSKKIVRIRGKKQFRDELLLDLSGNKIPIFGKRMNNDEIKSKVIGKDYFEIVSNNEKSFYEFLKDKNGDIVYKKTPLFQQGDTIRGSLHSAGNYGAIKMPQRNEKNEPIKNEKGAFILEKDKKDKDVIHFVERKALTKLSENDINNIVDPIVAQKIQKAVRDGFITFKMVQGKKVAVIKDDVIIWMNEEKKIPILKVRVFATTVKNPLEIKKHSSLSESRHKHKQMIYAQNDENYCMAIYELEGKRDFELINYFNLAKLQKQRQGYYLVNKEKEVNGKIVHIPIAKRNGRDLVLKRGKQVIFYDKEVENPDNIFDLEDLKSRIYIIEGLSIQRIVRPSGKIDEYGVIMFRYFKEARKADDIKKDNFKPDGGFKLGEIKPTRKMNHNQFNAFVEGIDFKVLSTGKFEKI

SEQ ID NO: 7442 - protein, 1448 aa, synthetic construct
  REGION 1..1448: note = Synthetic
MARILGLDLGTNSIGWAIVDREGVDFSLVEKGVRIFSEGVKSEKGIESSRAAERTGYRSARKIKYRRKLRKYETLKVLSANGMCPLSIEEVEEWKKSSFKNYPLKPEFIKWLRTSEDENINPYFFRDKASKQKVALYELGRALYHIAQRRGFLSNRLDQTAEGVFEEHNPQIQILIEDLDNSSSILNDLKDYFINLGIIDETEKGGFKKELDEGEKKLKSLYNSLVAIAKKNESDIVNCKEELITRLNKKEDLGKVKGEIKDISQAMLDGNFKTLGQYFFSLYNKGKIRNQYTSREEHYLSEFIAICKVQGIQRIDENEKLPEKKFTGLAKDLYRAIFFQRPLKSQKGLIGKCSFETSKSRCAISHPDFEEYRMWTYLNTIKIGTQSEKTLRFLTQEEKLKLVPKFYRKNDFNFEVLAKELIEKGASFGFYKSSKKSDYFYWFNYKPTDTVSACQVSASLKNVTGEDWKTKTFTYKTLNAKKEEIIKSVDYKDLWHLLSVATSDDYLYEYAKGKLGFDDKNAKAFSKIKLKKDFASLSLSAINKILPYIKEGLLYSHAVFMANIENIVDEDIWNDKLQRKYIQTQIAEIVENYTFEKSQLEIINGLIKDCKLKEEYYSKEAESIYKSDLASKLVLFYKNQTIENESEQKAILDEVFPIFIEQLKKQEFIKVKRLDEKVLEFLSGENQDGEVFCSNPKRLKKLYHPSDIEVFKRKIIKDEFGNEKVVLGSPLTNSIKNPMAMRALHQLRKVLNTLIFDGHVDENTRIHIEMARELNDANKRKGIQDYQNENKKFREEAIKEIKKLYFEECKKEVEPTEDDILRYQLWIEQGKCEIYEQGKNISICDIIGSNPAYDIEHTIPRSISQDNSQMNKTLCSPHFNREIKKQKMPIELSNHSEILQRVKHWENQAKEIDNLIEGLSRSIKSASTKEDKDRKIRKRHFLSLKRDYLQGKYDRFIWTEPKVGFKNSQIPDTGIITKYSQAYLKSYFKRVESVKGGMVAEFRKIWGIQESYQDENGFKHYKNKDRSKHTHHTIDAITIACMTKDKYDVLAHAWTLEDKEQIPEAKKILAASKPWKTFKEDLEKIEEEILVSHYTPDNVKKQSKKILRVRGKKQYVAEIERDEKGKAIPKKDANGKVIYKLNEKGEKIPRFQQGDTIRGSLHQDSIYGAIKNPLNTEEIRYVIRKDLESLKANDIESIVDETVKEKVKEAVANKVLLLSSNAQQKNKIDGIVWMNEEKQVPINKVRIYANSVKNPLEIKEHSLLSKSRHEHKQKIYGQNDGNYCMALYEGNDSKGKVKRSHLLINMMGAADYFKLSNSDKDMYPIAPEKDNKNLPLKYILTKGKMVLIYNKSKDELIDMSSKMLLERLFQITQIDVEKSAEIKLLHHIEAREKKEITEAMGLKTGMKGGKNIGNHKEYPWIKVGVNSFDCLVQDYDFTISASGKIILK

SEQ ID NO: 7443 - protein, 1462 aa, synthetic construct
  REGION 1..1462: note = Synthetic
MTKILGLDLGTNSIGWAIREDENEGIKQIIDKGVRIFSEGVKTEKGIESSRAAERTGYRSARKIKYRRKLRKYETLKVLAINGMCPLSVEEVDNWKKSGFKEYPLNPEFLNWLRTSENENKNPYYFRDVASKQKVTLYELGRALYHIAQRRGFLSNRLDTSAEGVYEEHNPQIQNLIEDLDTPTAILDELKNYYNNLGIIDETEKGGFKKELDEGEKKLKTLYNSLVTITKKNEADITKCKEELIARLNKKEDLGKVKGAIKDLSLAMEQGNFKTLGQYFFSLYNKGKIRNQYTSREEHYLEEFITICQVQGIQGIDNDQKIPEKKFTGLAKDLYRAIFFQRPLKSQKGLIGKCSFEKTKSRCAISHPDYEEYRMWAYLNTIKIGTQSEKTMRFLTQEEKLKLVPKFYRKNDFNFEVLAKELIEKGASAGYYKSSKKDEFFYWFNYKLTDTVPACQVATAIKNAMGEDWKTKTITYTTFNAKKEEVTKNINYKDLWHLLAVSTSDTYLYDFAIDKLKLDSKNAKAFSKTKLKKDFASLSLAAITKILPYLEQGLLYSHAVFMANIENIVDQEIWKDIEQRNSIQTKIIELVDDYTSEKNRLEIVNGLLKEYSKEDEQGKKVYYSLEAEPSFATDLRKKLVRFYKANEIENEEQQNQIFKDLFTLLIEQLKQQKFIKIERLDEKVVAFLKGENQEGQIFCSHPEKLKKLYHPSDIEVFKKKIIKDENGNDKIVLGSPLTNSIKNPMAMRALHQLRKVLNTLIIDEQIDENTRIHIEMARELNDANKRKGIQDFQNENKKFKEEAIKEIKKLYFEQCHKEVNPTEEDILRYQLWLEQNKCEIYETGSNISICDIIGSNPAYDIEHTIPRSISQDNSQMNKTLCSQRFNREIKKQKMPIELANYNEILPRIAHWKKQADELSRQIDAISKSIKSASTKEAKDKSIRRRHYLTLKRDYIQGKYDRFIWEEPKVGFKNSQIPDTGIITKYAQAYLKSYFKRVESVKGGAVAEFRKLWGIQESYKDENGFKQYKEKDRSKHTHHTIDAITIACMPKDKYDLLAHAWRLEEEQDKKAAKAIIEQAKPWKTFKEDIAKLEEEILVSHYTPDNVKKQAKKILRIRGKKQYIAEIEKDINGKLTPKKDANGKLIYKLDEKGNKIPRLQQGDTIRGSLHLDTIYGAIERKKENGEKEIRYVVRKPITKDFSEADISKIVDEGIQERIRRNGLKNVVTKEGIIVLPEEKITNGNTEKYLKEMIIKKIRLYQDNVKKPLHIKKHSALSKSKQEHKQKVYGQNDENYAMAIYEGVDKKGNVKRGFEMLNYMDAGNYFKKSNDLKNENPIVPNLHFKSQLPLKYIIKKGDLVLFYKENKDEILEIKDKELVNRLYKVIAFESDGRIQFRHHKTALQQSSTNKEELTIVKFMADNGLKNSQIDFTNPLPWLRLTMSNFNFLLNKKEFEINSIGKISFY

SEQ ID NO: 7444 - protein, 1529 aa, synthetic construct
  REGION 1..1529: note = Synthetic
MAKILGLDLGTNSIGWAIVDKDGTDFSLIDKGVRIFSEGVKSEKGIESSRAAERTGYRSARKIKYRRKLRKYETLKVLSLNGMCPLSIEEVEEWKKSGFKKYPLNPEFLKWLRTDEAENINPYFFRDKASKQKVSLFELGRGFYHIAQRRGFLSNRLDQSAEGVFEEHNPQIQSLIEDLDDSKLILNELKSYYVDKGIIEEAEKGVFKKDLDEGEKKLKTLYNSLVAITKKNENNVEKCKEELIARLNKKEDLGKVKGKIKDISQAMLDGNFKTLGQYFFSLYNKEKIRNQYTSREEHYLEEFIMICKVQGIDFISDKEQLPEKKFDGLAKDLYKAIFFQRPLKSQKGLIGKCSFETSKSRCAISHPDFEEYRMWTYLNTIKIGTQSEKTLRFLTQEEKLKLVPKFYRKNDFNFEVLAKELIEKGASFGFYKSSKKNEYFYWFNYKSTDTVSACQVSASLKNTVGDDWKTKTFTYQTLNAKKEEVTKTVNYRDLWHLLSISTSDIYLYEYAKEKLKLDDKNAKVFSKIKLKKDFASLSLSAITKILPYIKEGLLYSHAVFMANIENVIDDEIWKDEKEKYIVKNGIFNIIKNDVFEREILNVANGLIKNSKSEGEIYSEESKSIFKSDFDKAIENLIKKREDLEINELFIEEVYLDYIEEIKKYDKERKFLPIPRLDEKVIQFLLGNNNDAVVYCSDEKKIKKLYHPSDIEVFKKKIIKDEFGNEKVVLGSPLTSSIKNPMAMRALHQLRKVLNTLILEGEVDENTKIHIEMARELNDANRRKGIQDYQKENKDFRDNAIKEIKKLYLDECGKEVEPTEDDILRYQLWIEQDKCEIYEQGKNIRICDIIGSNPAYDIEHTIPRSISQDNSQMNKTLCSQRFNREIKKQKMPIELSNHLEILPRIAHWKEEADNLSREIEIISRSIKAASTKEIKDKKIRRRHYLTLKRDYLQGKYDRFIWKEPKVGFKNSQIPDTGIITKYAQAYLKSYFKRVESVKGGMVAEFRKQWGIQESYIDENGFKQYKEKDRSKHTHHTIDAITIACMTKDKYDVLAHAWKLEDEQNKKEAKAIIEQAKPWKTFKEDLLKIEDEILVSHFTPDNVKKQSKKIVRVRGKKQYVAEIERDAKGKAIPKKDANGKIIYKVNDKGEKIPRLHQGDTVRGSLHQDSIYGAIKNPLKTDEIRYVIRKDLESLKANDIENIVDETVKEKVKKAIANKVLLLSSNAQQKNKIAENEKVWMNEEKQISINKVRIYANSVKNPLEIKEHSLLSKSRHEHKQMVYGLNEENFAMAIYEGLDKKGNTERAFELINYMDAGYYYKLKNKNERRKNIISLIPEKHLETGFDLLKSNNKPIILKKGLNVILYKNEKEEINFNNPNSIIKRLYKISGLDKDGIKLTYCVSAKGSTENIAYMNDIINEQKLFQIRSEIENLGLWDNIFSDFKNDNIKKSIFFKNLNDLLNKHYLENNIYDSKGLIKKVKFKESGLTTPKGGDVIDSFKDFPYIKFKASNFNALIEGIDFKILPSGRVVEI

SEQ ID NO: 7445 - protein, 1451 aa, synthetic construct
  REGION 1..1451: note = Synthetic
MAKILGLDLGTNSIGWAIVDKEGNEFSLVDKGVRIFSEGVKSEKGIESSRAAERTGYRSARKIKFRRKLRKYETLKVLSKNGMCPLSLDEVEAWRKSGFKQYPLNPEFLKWLRTDDDNNINPYVFRDKASKDKVTLYELGRAFYHLAQRRGFLSNRLDQSAEGVIELHAPNIESRIEETTTINDLKIEIQEYFDGLDILDKNAKELDEGEKKLKSLYNALDKIIKANEFEKAKTEIIARLNRKEDQGAVKQEIGEISQAIKDGGFETLGQYFFSLYNKGKIRNHYTARESHYLNEFEKICEVQNLSSINKNENIPEKRYSGLAKELYRAIFFQRPLKSQKGLIGKCSLDKTKSRCAISHPDFEAYRMWSYLNTIKIKTPQDEQMRFLTIEEKQQLIPKFFRKKDNFNFEDLSKELTPKGYTPDFYKSSSAKASSYIFNYKAKDSVAGCVVSASLKNVFGEEWNTKTWTYETKNSKGKFVKREVDYKDLWHLLTVSTSDAYLEEYAMEKLGLDEKRAKSYSKIRLKKDFASLSLSAINKILPYLKQGLLYSHAVFMANIEKIVDENIWKNPEERLYIQNRIAEIIENNSFENSKLEIVNGLIKDCKVNNCYYSIEAESSYKADLVKKVSSFFKEIENQKEIVEDLFPVFIEQLKKYEYISVKRLDEKVLEFLKGENEDGEIYCSNPNKLNKLFHPSDIDVFKKKVIEDEFGNKKVVLGSPLISSIKNPMAMRALHQLRKVLNTLIIEGLVDEKTRVHIELARELNDANKRKAIQDFQKENQSKRAEIALKIKEDYKAATQKDIEPTGDDILRYQLWEEQNGMEIYEASINNGISKKIGIHQIIGENPDYDIEHTVPRSISQDNSLMNKTLCSKKFNRDIKKKQMPTELNNYELILPYIDHWRFEADKLSWEIEQLSRGIKAAATKDAKDKKIRRRHFLTLKRDYLKGKYDRFVWKEPKIGFKNSQIPDTGIITKYSRAYLNSYFTRVESVKGGMVAEFRKIWGIQESYSKDGKKYYVEKDRSKHTHHTIDAITIACMTKDKYDVLAKAWTDEDNENLPLARKLLADSKPWSTFTEDIKKIEEEILVSHHTPDNVKKQSKKIIRVRGKKQYLAEMTKDENGKTVPQKDENGKIIYKLNSEGKRIPRVQQGDTVRGSLHQDSIYGAIKNPLNQEEIRYVIRKDIESIKATDVENIVDEVVKEKVKEAIANKVLLISSNPQQKNKIADNQKVWMNEEKGIPIQKVRLYANSVKNPLHIKEHSALSKSRHEHKQKVYGQNDENYAMAIYELDGKREFELINNFNVAKLQKTGEGFYPLFKEKEVKGKKTQIPIAKSNNRNLVLKRGQQVVFYDKETEQLNDITDVIDFSGRIYIVEGLSIQRIKSGGNQFDYGVIMFRYYKEARKADEIKNDKYKPDGVFRLGENKPTRKMNHNQFNAFVEGIDFKVLPSGKIQKL

SEQ ID NO: 7446 - protein, 1475 aa, synthetic construct
  REGION 1..1475: note = Synthetic
MAKILGLDLGTNSIGWAIVDKEGNDFSLVDKGVRIFSEGVKSEKGIESSRAAERTGYRSARKIKFRRKLRKYETLKVLSQNGMCPLSVEEVIEWLKSGFKTYPLNPEFLKWLRTDDNQNINPYIFRDRASKQKVSLYELGRALYHIAQRRGFLSNRLDQSADGIIEQHAPNIESRIEETKSINDLMVEIADYFDGLDILEKNSKDLDEGEKKLKSLYNTLEKIIKSNDFEKAKLEVIARLNRKEDQGAVKQEIGELSKAMKDGNFVTVGQYFYSIYSKGKIRNHYTAREEHYLAEFEIICKKQGITGINENEKLPEKRYTGLVKDLYRAIFFQRPLKSQKGLIGKCSLEKNKTRCAISHPDFEEYRMWSYLNTIKIKTPEDEKLRFLTLEEKESLISKFLRKKDNFNFEDLAKELIIKGATFEFYKSSNAKSAHYLFNYKPKDTVSGSIVSASLKNIFGDDWNTKHWNYQTQNSKGETVTITVDYKDIWHLLSVSTSDIYLEEYAKNKLGLDEKRAKSFSKIKLKKDFASLSLNAISKITPYLKQGLLYSHAVFMANIENIVDEHIWNNPQERLYIQNKIAEIIDNNTFENNKLEIINGLIKECKTDNCYYSKEAEHSYKKDLQKKVAITFRNNEDQEAIVEELFPIFISQLQKYEFITIKRLDEKVIEFLKGENEDGEIYCSNQNRLHKLYHPSDIEVFKKKSIKDEFGNEKVVLGSPLISSIKNPMAMRALHQLRKVLNTLILEGLVDEKTKVHIELARELNDANKRKAIQDFQKENQSKRLDLAKQIKEDYKSQTGKDIEPTDDDILRYQLWVEQNGMEIYEPTLNGGVSKKIGIHQIIGENPDYDIEHTIPRSISQDNSLMNKTLCSKQFNREIKKTKMPIELNNYELLLPYIDHWRKEADKLTWEIEQILKSTKAAATKDSKDRKIRRRHYLTLKRDYLKGKYERFIWKEPKVGFKNSQIPDTGIITKYSRAYLNSYFNRVESVKGGMVAEFRKIWGIQPSFIKDGKKYYQEKDRSKHTHHTIDAITIACMTKDKYDVLANAWTKEDNENSNEARKLLSESKPWPTFTEDLQRIEEEILVSHHTPDVVKKQSKKIVRDRGKKQFRNELMLHKVTNKPIPVLGKRLKENELVGKAEGKDYFIISKNKALFYYEYLYDNKGNIIYKKVPIYQQGDTVRGSLHQDSIYGAIKNPLNTEEIRYVIRKDLESLKANDIENIVDEVVKEKVREAIDNKVLLLSSNAQQKNKMNGIVWMNEEKQVHINKVRIYANSVKNPLEIKEHSLLSKSKHEHKQKVYGVNGENYAMAIYEGQDKKGNLKRGFELLNYMDAGNYFKLSNDSKYHNTIVPSIHLKSDLPLKYIIKKGDLVLFYKESREELSEVGEKEFVKRLYKVIGFEGDGRIQFRHHKIAMQQSSANKEELTIVKFMADNNLKNSQVDFDVPVPWLRLRVSNCDFLLNDKEFKINPLGKVEIL

SEQ ID NO: 7447 - protein, 1046 aa, synthetic construct
  REGION 1..1046: note = Synthetic
VPSELVFGFDIGTTSIGSAIIRMDSTAEAGEVLHLGVRIFPEARDPDGIPLNQERRKRRMMRRQLRRRRTRRRDLNQFLFEAGLLPEFSKKAESAWAEVMALNPWMLRAKATREHLSPLELGRALYHLAQRRHFRGRDLEDAAAADEDNCEAASAEEQRAASQREKDRSALKASGLTLGAYIAAIPERIERRRGHHFAREDVVAEFRAIIAAQAPHCAKLRDADFVTALEQTIFNQKSVFWRKSTLGECRFVPRAGLAASASWVAQEKRMLEKLNNLRIEESNDRPLDDRERAALLALLRKKDSVSWGGIRRHLKLYWRKHDLPEKPTFNLERGGEKGLVGNRLESRLASIMGDRWDADAAYRDRIRREIHARLYAADYDQIGDRIVIRREAERRKARAAERERLMADFGLSAEQAESLTALTFAPGWEPFSEDALWKFLPRLQEGAVFGALLASPEEEGWRASTFPNRLQPTGSWVDRLPTPGNSREEINRQKAVRNPTVLRVQNELRKVVNNLIAVYGRPDRIRVEVAREVGKSARERAEDLKRNRDREKERKKASEELQKCGIAHPSRDDIEKWLLWQECNRQCPYTGQMIDFAALFHRGEFQVEHIWPRWRSLDDSFVNKTLCHRDFNLKKANRTPFEVFEHDPDGWEAALERVRGFAGPKGRVTIKARRFAAREIPADFAARQLTDTGYAARQAVGFLKMLFPDLGQASEVRVATLSGRVTSRLRHSWGLNGILSDSGEKARADHRHHAIDALVVALAHPGYTQRLSRWFQARDSATPQPEPRLDPPFANVRHQAERKVAEIVVSHRVRRKVSGSLHKDTTYGDAGPVDGTGGIAYRWFVTRKPLEALTKSLLADDDAWPDAHVRDRVRAWIEAHGGDPKKAYVNGYPTVSEGGAPIRKVRIRLKQQQKLMARLKNGHADLGNNHHMAVFRHAGGRVETEIVSLFEAAHRLRKHTPVIRKSLNEAPLVMSLAQGDTLSFPDGKLQGLWIVHGVWAGGQIVLWRAEDATGSSVFRPTAASILKSGGRKVSVDPIGRIRPARD

SEQ ID NO: 7448 - protein, 1045 aa, synthetic construct
  REGION 1..1045: note = Synthetic
MASELIFGFDLGTTSIGSAVVRMDEMAETGDVLHLGVRIFPEARDPKGIPLNQERRNRRMMRRQLRRRRVRRRALNSLLTEAGLLPPFSKAIDSAWSAAMALDPWALRARAVSEPLSPQELGRLLYHLAHRRHFRGRDLPEAPATKPDKQDPAAAEEQEASSKREEHRKALAASGLTVGAFLAAKDPIEDRRRGHHFDRSDVEAEFRAILAAQAPHHAALANTDLTTEMERVVFDQKPVFWRKGTLGECPFDPDKPLAASASWVAQEKRMLEKVNNLRIEQGNGRPLDEHERKVIIDLLRRQDTATWPSIRKALKPYWKSQGLPETPKFNLERGGEEKLTGNRLENSLAKAIGARWHADPDFQSRLRRDIHARLYEADYGQIGQRIVIRREAERQAKRTEARDSLKADFQLTDAEADTLARLTFPTGWERFSEAALWQFLPRLEAGAVFGALLAGPEEEEWRAATFPNRARPTGTSVDRLPTAKHNKAERDRQKAVRNPTVLRVQNELRKVVNNLIAVYGKPDRIRVEVARDVGKSAREREEDLVRNRDREKERKTAAADLQSNGIAEPSRKDIEKWLLWQECRKQCPYTGREISFAALFHHGEFQVEHIWPRSRSLDDSFANKTLCHRDFNLTKANRTPFEALHHSPEEWAKALDRVRAFIGKRGRPNMKLRRFAATEIPADFAARQLTDTGYAARQAVGFLKMLFPDHGATSQVRVATLSGKVTDRLRRSWGLNKLLADDGEKTRADHRHHAIDALVAALAYPGYTQRLSRWFQAKDSPIPEPEPDLSPPFAGVREQAKRQLDQVVVSHRVRRKVSGPLHKDTTFGDGGQADTTYRWFLTRKKVETLSKDLLAKDDAWPDAHVRDRVREWVATNGGDPKKAFGTGYPTVSKDGPPIRKVRIRMKQQLSLMVKLKDGFADLGNNHHAAIYQTPDGETVFRVVSLMEAATRLRHGLPVVDRSPEGNLKFLMSLSAGDTVRLAGDRAGLWIVRTVSSKGQIALWPINDTDADKHETVFAPRIGGMIKRGLEKVSVDPIGRIRPARD

SEQ ID NO: 7449 - protein, 1030 aa, synthetic construct
  REGION 1..1030: note = Synthetic
MATELVFGIDIGTTSIGSTVLTLDRDAGHGELHHLGVRIFPEARDEKHLPLNHTRRQKRLARRQLRRRRVRRRTLNELLATQGLLPAFGAQRDSAWRAAMAIDPWPLYAAAETRALTAVELGRLLYHVAQRRHFQGRALQGDGGAGPGDSETAEERQAQSQRERDRAALRAAGTNIGAFLSAIPDGERRRGRHFAREDVRAQFVTIIAAQRLRHPVLADPVILGALTEAIFSQRPVFWRRGTLGRCRLVPGAMPAATASWLAQEKRMLEKLNDLIVEVGNGRPLDTAERHAVIALLRRQDSVTWGALRKALRLPPSNRFNLERGGEKGLTGNRLENRMAAIVGARWDSDAALRDSLRADLHRRLFAADYAEIGERIVIRDTASAARERAALADNLARDFALPVAAATALADIQQAGGWTPFSEAALAAMLPRLAAGARFGALLNGPEEEGWRDRTFPARERPTGALVRTLPSPADRDEQARLGAIRNPTVVRVQNELRKVVNNLIRAYGAPHRIRVEVGRDVGRSAREREEITTRTRKREAERRRAAADLVAQGIAVQSGRDIEKWLLWQECRRTCPFTGRAIGFEALFRTGEFQVEHIWPRERSLDDSFANKTLCHVDANRRKGNRTPAEAFDAADLAAMVERVRSFAGPPGLIAAKARRFIQPIPDDFASRQLNDTRHAALQVVTQLKMLFPDVGPTAEVRVQVVTGQVTARLRRHWGLADLLGDGDSKTRDDHRHHAVDALVVAAAHPGYGAALSRYFAARDSGVLEPQLPLPFPDIRAQAQAKLATLVVSHRVRRKLSGPLHKETVYGDAGPARGSGGKEYRYFVTRKPVAALTPSLLKDDEAWPDAHIRDTLRHWLAAHDGDIKKALTSGLPTVSTGGPEIRRVRVRVKQQAKLMATLKNGHADLGNNHHVAIYRDATGVHTEVVSLFEAAQRQARHEPVVRRQRPDGATFVMALSPGEIIHFAAGTRQGLWVVKGVWAAGPIILWRAADARGVSVWRPVAATILGDGGVKVQVDPIGRTRPAHD

SEQ ID NO: 7450 - protein, 1181 aa, synthetic construct
  REGION 1..1181: note = Synthetic
MSRVDRSIIRMDSCIPHPLRPRPRVPALASGGGDAVNVTVARHRPHGTILCGYRAQNKETPSRGVRRVGLGRSPADVSFTVITEGKHRSITLHAMYHGWRPRVTPSSPSLGGFLMAALSFGLGLDQGVASIGWAIVILDSAGKPVGVERMGTHLFEAGTEGNIVGGMDESRAGPRRMARQLRKQYRRRVLRKRRLLRWLQELGLMPEGDISTAEGRDALLKGLDEELRRKWEGDADHRTRQLLPYRLRAAGLTGKLEPFELGRALYHLAQRRGYLSNRKTQSGSEDPSDTKKGAKKSKKGTEAGDAASEKVASDAQDTGKEDAGVVRASIIELQRQMEGAGCRTLAEYFTRLDPTGTIGERLRGRWTAREMFLEEFGRLCSEQAKHHPALTTEMIRKVHRAIFFQRPLQSMSHLIGHCDLVPGKKRCPLGHRLAQRFRLLQRVNDLQILYPDFTSRPLSREERERLIDALQREGDVTFSKLKTKAWFGLPKGSTFNLERGGEKRLVGNRTEAKCRAIFGDERWDAMRDDERDGVVQDLLLFEKPSALAKRGASVWGLSEEKAKALGDCVLEPGFAAHSKEALATLLVRLEDGTPYATAVKEEFGRGDEALEVHDLLPPVEKALGQLRNPTVTRALTELRKLVNAVTRTYGKPAWIRLELARDLKRARKHRERMSKEMRAQEDRREVARGLVLEKARIASVSRADVERVLLAEECNWICPYTGKPFGMDDIVGRHPQVDIEHIWPLSRSLDDSYLNKTLCYVDENRNVKKNRTPFEAYASSPERWREMLDRVKRFRGDAARIKLERFSKEQIPEGFAQRHLAETRKIGAASAAYLGLLFGGEIDQTHTRRVFVTTGGLTAHLRREWHLNGILSDDGEKTREDHRHHAVDALVVALTDTRAVQILQRAAEQASAVGRRLFAPVEEPWENFVPSVREKVEAINVSHRQSRRVAGKLHAETNYSRAIQPKGERRIRKELAKLSEKEVERIIDPKVRAAVEDKIKELGLKPKGPARRYTDFSSRDLHPFTPTKTGAKNWIHKVRIKSGEKPWAVGKGARERFVTSTPGSNHHTVLSRQREGKWSDEPVPLLNVRSLTAHEKRPHDGDRLSLASNEFVIMQDRSGVERLYRVLSVSSGDIELIEHTDGRISKDRTHDRTRGGAAALMKRGLRKVSVTYLGEIRRAGG

SEQ ID NO: 7451 - protein, 1137 aa, synthetic construct
  REGION 1..1137: note = Synthetic
MGIMYRVGVDVGLNSTGLAAIEVDSEGKPIRILNMQSVIHDGGVDPNSNKTGDTRKLISGIARRTRRMRRRRRARLAKLDHFLSELGLPIEEYGDESFEPWVVRAKLADAYIEDEETRKRFLSIAFRHIARHRGWRNPYKSVQSLYDLNVDDLSKQYESLCSSGGCDKEDGLTPAQIAVEYVRANAGNPAPRFRKSTNQKYSNNQTLFPQRLMQEDNAYEVSYICQQQGIDEDTEHSIISKIFDSKSPRGSAKDRVGKDVLTGEPRALKASLAFQRFRIIAALSNISIKVDGVVRPLNISEKQRAFNVLADMDVKDRPTWSDVAQSLGVTRREIRGIGGIQDGEDRVSNRAPVVESYFALRDAEGALKKLVVKVILPWWNEASDQEREHLIELLSNTIDIDSVRDDLDYASAFDLIDSFDDEALAQLDNLKLPSGRAAYSVRACLDMADRILNTSDNLHEARKYLYGVTDNWRPPQEPIGKPVGNPSVDRVLKIVNRYLMNVTNRWGRPVSVNIEHVRDGFSSLKVARMYQRDTEQRAKYRDSIFQEMKREDPKIDRYQDSQIKRWEAVQRQGSKCLYCGSLIDFSSCELDHIVPRKGVGATNTKTNLAAVCANCNRNKSNTLFSRWCHSDYASEHGITLKAALERVDSFLFPAGMYNRRESLNFMRAVKARLQQKTEDEAPDNRSIESVAWMADELHKRIDWYYNSERYLSRDTENLPDRQVEVFVYAGKVTAMARRFSGIEKQIHFAGPHGKTRLDRRHHAVDAAVIALMHHGMAMILNEKNELRMAQFYTNQLNQNEMDWKEYPAGTSKGPRYFEWVDDMHSLLELINNALDADRVKVLRNIRLELGNSRAHKDTIHKLVKVRLGDALDAKQINKASTPALYAALTRLPEYNPKNGLPENSDREITVNGKHYAADDDVLFFATDAAQLMVNGGSVEIGDGFHHARVYKCAKFNKAGKQTGFFYGMIRVFAADLVHAAHEDLLSAELPPQSLSMRYGEKRTVDAILSGHAEFVGHLFIGDEIRLNLGKVNYTGQVKEYEEVLRDSSSPHIYSSWVIDGYYSPSRLRLRPLFLSSEGIDKMPIEQQGVLGKMFKPGWLPAVDVLSSFEPEVLRRNGLGEPRWSSNSGLPVSYRWRE

SEQ ID NO: 7452 - protein, 1134 aa, synthetic construct
  REGION 1..1134: note = Synthetic
MALKRIYRIGIDVGLYSTGLSAVEVDSNGTPIRILNMQSVIHDGGVDPNSNKTADTRKMISGVARRTRRMRRRRKSRLANLDKYLESLGFPITNYGDDTFEPWMLRARLADGYIPDEEQRKYMLSVAFRHIARHRGWRNPYKSVKSLYSVSLDDLSERYDDLCDACQVNPEDGLTPAQIIGDYVASKDGQVAPRIRHSGSKAEAFAPLPQKLMQEDNAYEVRYICEQQGIDETTRRKLIDKIFYAVSPRGSASERVALDDLTHEKRATKASLAFQKFRIVAALSFLRIAIDGTERPLTIEEKNIAFDILTSMESKSRPTWTDVADALGVNRRDIKGIGGIQDDGDRISNRAPVMDSYFALAESAGALGKLVKQVIMPWWRDASDNDRERLLELLGNTIDIDSIRDDISYSNAFELIDSFDDDQLGAIDNIKLPAGRAAYSIRACQELTDRMLSTSDNLHDARKAVYGVTDNWKPAQESIGAPIGNPSADRVLKIVNRYLMNCTARWGTPVGVNIEHAREGFSSAKVARAYQKDAEAYATNRSAIFDKIKDLYPDFNRFSDSAMKRWEAIQRQNGECLYCGATLKFTTCELDHIVPRKGVGATNTKTNLAAVCTDCNRAKSKKLFSLWCHDDYAVSRGITVANAVARVEMFNFPAGTLNAANAKRFKQAVISRLTQVTEDEAPDNRSMESVSWMADELHKRIDWYYNSQRYIATEDVPERSVKVFVYSGLSTSLARRFSGIEKRIHFAGPEGKTRLDRRHHAVDAAVIALMQHNVAEVLVDKNELRKAQLYSQKDDGTDWREYSGKDDDQRFLYGRWLGNMQALLDLLNEELDDDRVQILRNLRLELGNSRAHEDTIHKLSRVRLGDKLDASLIQRASTPALYTALTRCDDFDEKTGLPENRERHIVVNGVHYGPEDETLFFEKNAAQIMVHNGSAEIGDGFHHARIYVCDKVNKAGKKTGEFYGMIRVFAADLAKSRSEDLLNVTLSDSSLSMRYGDPRTVKAIREGRARFVGHLFVGDELRLDLSQTGYTGQVKEFADFLQPWCSTKLYATWTVEGYFSPSQLRLRPSYLSAEGLEKLDMPISEDVQKIFTRGWLPSVNAVSAFFPSVIRRNGLGEIRWKSNAGLPVSYRWHE

SEQ ID NO: 7453 - protein, 1133 aa, synthetic construct
  REGION 1..1133: note = Synthetic
MTLNNYKIGIDVGLYSTGLAAIEVDSNGEPVRILNMQSVIHDGGVDPNSNKTADTRKMISGVARRTRRMRRRRKSRLANLNKYLEELGLPLENYGDDTFEPWMLRARLADGYIQDEEQRKYMLSVAFRHIARHRGWRNPYKSVKSLYNVNLDDLSERYDDLCEACQVNPEDGLTPAQIIGDYLASKDGQVAPRIRHSGSKSEAFAPLPQKLMQEDNAYEVRYICEQQGVDDETCRKLIDKIFYAVSPRGSASERVALDDLTHEKRATKASLAFQKFRIIAALSFLKLAVGGQQRPLTVEEKNTAFDILSSMDSKTRPTWADVAAALGVNRRDIKGIGGIQDDGDRISNRAPVMDSYFALIESSGVLGKLVKHDIMPWWRDASEDDQERLLELLGNNVDIDSIRDDMSYSNAFELIDSFDDDQLGAIDNIKLPAGRAAYSVSACQALTVRMLSTTDNLHDARKTVYGVTDNWKPAQEPIGFPIGNPSADRVLKIVNRYLMNCTARWGTPVSVNIEHAREGFSSAKVARAYQKDAEAYATNRSAIFDKIKDLYPDFNRFSDSAMKRWEAIQRQNGGCLYCGATLKFTTCELDHIVPRKGVGATNTKTNLAAVCTDCNRAKSKKLFSLWCHDQYAVSKGITVAKAVARVEMFTFPAGTLSAANAKRFKEAVKSRLTQMTEDEAPDNRSMGSVSWMADELHKRIDWYYNSQRYTATSDIPERAVKVFVYSGLSTSLARRFSGIEKQIHFAGPSGKTRLDRRHHAVDAAVIALMQHNVAEVLVDKNELHKAQRYSQKEDGADWREYRGKDEEQQFLYGRWLGNMHVLLDLINDALDDDRVQILRNLRLELGNSRAHEDTIHKLLRVRLGDKIEASLVQRASTPALFTALTRCDDFDEKTGLPENRERHIVVNGVHYGSEDEIAFFEKNAAQIMVHNGSAEIGDGFHHARIYLCDKINKSGKKTGEFYGMIRVFAADLAKSRNDDLLTVPLSESSLSMRYGDPSTVKAIREGHARFVGHLFVGDELRLDLSQTDYTGQVQEFAQVLANVAEAEVYTTWVVDGFCDPAKLRLRPSYVSSEGVKSFDEAEQSRLLKVIDKGWRPAINALSAYYPTVVRRNGLGEIRWKSNAGLPMSYRWHE

SEQ ID NO: 7454 - protein, 1068 aa, synthetic construct
  REGION 1..1068: note = Synthetic
MRRRRRARLVKLDKYLLSLGFPLVEYGDETFEPWVARAELADGFIADENLRIRKLSIAFRHIARHRGWMNPYKSIQSLYGISSENLSEQYEEMCAHLGFKKADGLTPAQVVAEYLNENENKPAPRLRKSTKHTDRFALFPQRLMQEDNAYEVEYICKQQGIDEKTTREIINKIFYAISPRGSATDSVGNDVLTGEARALKASLAFQKFRIASAIANLSLHINGVERPLSIKEKQIAYDVLTDTDTKNRPGWADVAQQLGVNRRDIKGIGGIQDGEDRVSNRAPVIETYYALLDSDGGLKKLVKKVILPWWDNSKEDDKEALIEILGNTLDIESARDDIKYLSAFDLIDSFDDNELALLDNIKLPTGRAAYSVRACYELTEQILTTSDNLHEARKNVYGVTDNWRPPQASIGEPVGNPSVDRVLKIVNRYMLNTTKRWGKPLSVNIEHVREGFRSEKVARMYQHDTEQKAKYRQSIFNTMKTENPSVDRYQDSQIKRWEAVQRQGCKCLYCGKTITYSTCELDHIVPRKGVGADNKRTNLAAVCADCNRSKSNILFSKWCHSTYAMDRGISVEAAVDRAESFIFPTGIYSKKASANFIGAVKNRLQQETEDDAPDNRSIESVAWMADELRKRIDWYYNSEHYTSHKPKNDNKQVKIGVFPGKVTALARRLSGIEKEIHFAGPRGKTRLDRRHHAVDAAVISMMSREIAVILNEKNELRIAQMYVSHPEKLGQPFWKDYPLDIGRSLQFRKWIDKMKDLQVLVNDAMDHDRVSVLRDYRLRFGNSKAHKDTIHKLVRMRLGDRLSAELINKASTPALYMALTRCDDYDAETGLPENKSRKIVVNGQHFSANDVVFFFDDDAAQLIINGGSVELGDGFHHVRIYKCPKFNSAGKQIGVFYGMIRVFTVDLRHNSSDDLLSVELPPQSLSMRYAEPRTVAAVLSGKAEFVGHLFISDEIRLDLDTSTYKGQVAEFAEIMRKISKPEIYSTWVVDGFKSPSRFRLRPSYLASEGIEKLPEEQRTMLDKFFKDGWTPSVDIVSKFKPVVIRRNGLGEPRWKSKAGLPVSYRWCD

SEQ ID NO: 7455 - protein, 1141 aa, synthetic construct
  REGION 1..1141: note = Synthetic
MKKQYEVGIDVGLNSTGIAAIEIDENNNPVRILKAISVIHDGGVDPGQQKKARSRMKQAGIARRTRRMRRRRHARLQRLDNVLEQLGYPLTSLVSAEGDSFEPWFCRAKLADSYIENEEERKEAFSIAIRHIARHRGWRNPYKQIRTLHDDNPLSEQYNELAKRFSEKVGRKADVLRTPGQIIRDYIQSTSGAAPRLRMSTKETKDEGMLPARLMQEDNAFEIKKICEIQRVPKKDTNTILDAVFDRVSPKGSAQSRVGSDPLTHEPRASKASLAFQKFRIVATVANLWVHTADGDRALTVDEKRKAFDKLADQNTVSESLTWIDIADELGINRHDLKGIGGIQDDGERISNRPPRLDSIKAISKISNKSFKKSLFEWWGKADECSQEAMLELLGNSVDIDAVRDRLEYADPLDFIDQLDDAQLGELDKVSLPSGRASYSMAALKKLTDRMLSTNDNLHDARIHLYNVPSTWRPSAAPIGEPVGNPAVDRVLKIVNRFLMNCQDRWGSPQSVNIEHTRQGFHSASVALKLQRETEARAEHRQSIFNDIKGIKGKEGETNSREYDIRRMEAVQRQNGKCLYCGGKISFGNCEMDHIVPRKGIGSTNTRTNLAAVCSKCNRLKSNIPFASWCEMDAAKERGVDLKEAIDRVNNFIFTNEYSAQAKKNFKKAVISRLKQTTEDEGMDNRSIESVAWMADELHRRIDWFFNSSKYMDTTGEESGNLDTKVRVYAGFVTGIARRYSGIDGRIHFIGAHYKTRLDRRHHAVDACVIALMEHTVAEVLVNKAQLRRSQEFMKDPKAGDPYWKDYPGQQDKGFYSYQQWQGRMYSLLGLMNDALDNDRIPVLRDKRLRLGNSRAHDDTIQPLDRIRLGEKISNDQIRKASTPALYTALVREKDYDASSGLPKNPNRVIHVNGRVIHSDEEIAFFRGKDKAQIKVGDGSAEIGNSIHHARLYRCWNETKKGRKEEFFGMVRVFQVDLLKARNLDLFAFPLAESSVSMRYAEEKTAKAILQGRSKFVGVLLVGDEISINTEKKQLSGIAGTADRSLLKGGKSQLQRWTIDGYYSTAKLRLRPSYLSEEGLSRLDVDEDSKEALKKTIKDPGWLPAVNALADYDPTVIRRNAFGEERWDSRNGMLTSYRWKE

SEQ ID NO: 7456 - protein, 1141 aa, synthetic construct
  REGION 1..1141: note = Synthetic
MKKQYEVGIDVGLNSTGLAAIEIDENNNPVRILKAISVIHDGGVDPGQQKRAFSRMKQAGIARRTRRMRRRRHARLQRLDNVLERLGCPLTSLVSAEGDSFEPWFCRAKLADSYIENEEKRKEAFSIAIRHIARHRGWRNPYKQIRTLHDDNPLSEQYNELAKRFSEKVCSEKVGREADISRTPGQIIRDYIQSTPGAAPRLRTSTTKEGMLPTRLMQEDNAFEIRKICEMQRVSKKDTNTILDAVFDRVSPKGSAQSRVGSDPLTHEPRASKASLAFQKFRIAATVANLWVHTADGDRALTVDEKRKAFDKLADQNTVSESLTWIDIADELGINRHDLKGIGGIQDDGERISNRPPRLDSIKAISKISNKSFKKSLFEWWGKADECSQEAMLELLGNSVDIDAVRDRLEYADPLDFIDQLDDAQLGELDKVSLPSGRASYSMAALKKLTDRMLSTNDNLHDARIYLYNVPSTWRPSAAPIGEPVGNPAVDRVLKIVNRFLMNCQDRWGSPQSVNIEHTRQGFHSASVALKLQRETEARAEHRQSIFNDIKGIKGKEGETNSREYDIRRMEAVQRQNGKCLYCGNEISFGNCEMDHIVPRKGIGATNTRTNLAAVCSECNRLKSNIPFASWCEMDAAKERDVDLKEAIDRVNNFIFTNEYSAQARKNFKKAVISRLKQTTEDEGMDNRSIESVAWMADELHRRIDWFFNSSKYMDTTGEESGNLDTKVRVYAGFVTGIARRYSGIDGRIHFIGAHYKTRLDRRHHAVDACVIALMEHTVAEVLVNKAQLRKSQEFMKDPKAGDPYWKDYPGQQDKGFYSYQQWQGKMYSLLGLMNDALDNDRIPVLRDKRLRLGNSRAHDDTIQPLDRVRLGEKISNDQIRKASTPALYTALVREKDYDTSSGLPENPNRVIHVNGRIIHSDEEIAFFRKDAAQIKVGDGSAEIGNSIHHARLYRCWNETKKGKKEEFFGMVRVFQADLLKARDSDLFAFPLAESSVSMRYANKSVSNAVKGGRAEYIGSFCVGDEIALNLSAISRDNESINDYRDFILGFGGFNNYTLKHWVISGYEDTSRINLRPSQISAEGLSSISISKKVEKILNKSWRISINTLANYDPIVIRRNAFGEERWDSKNGMLTSYRWKE

SEQ ID NO: 7457 - protein, 592 aa, synthetic construct
  REGION 1..592: note = Synthetic
MHYILGLDIGITSIGWAVIESDQDGVPFKIADLGVRIFKAAEQPKTGASLALPRRSARSLRRRLWRKAHRKERIKLLLDKVGLISKKNLEKLFSASSFEKDVYTLRAEGLDRKLNNEEWARVLYHLAQRRGYRSSSKAEEADKDNKEAGKLLNAVKSNSDKMKQNNFRTVGEMFCKDNSDLFQVKDGSGHIVGRKTHNTSGVYDLTIARNLIEAEVHKLFAAQRQLGNAFATESIENEYCEILLSQRHFSDGPGGERTFKFDLRGNCTFEKDELRAFKACYTFEYFKLLQDINHLRIIPEYRKGSAKQIRPLTPEERQKIIDLCLKSPGLDFSKLRKELKLEDDELFNRVSYDVKKKKGKKKDTEEQSEEQLTPEQQRLKCEKAAKFQQMQSYHEICKALDKVAKGTISKLSHDQLDAIGEALSLYKADDKRRERLEQIGLSNEEIEALLPLDSTKAGNLSLIAMRKLIPYLEQGLTYDKACEQVYGDHRAQYNGERMPLLSFGKLKEEGALDSVNNPVVLRAIAQTFKVVNAIIRRYGSPQAIHIELARDMKRNFTDRQDIKKKQIRLNPVLLFGMCLIASVLTIVITIKF

SEQ ID NO: 7458 - protein, 1168 aa, synthetic construct
  REGION 1..1168: note = Synthetic
MHYILGLDIGITSIGWAVIESDQDGVPFKIADLGVRIFKAAEQPKTGASLALPRRSARSLRRRLWRKAHRKERIKFLLDKVGLISKENLEELFLASGFEKDVYTLRAEGLDRKLNNEEWARVLYHLSQRRGYKSSSKAEESDKDNKEAGKLLNAVKSNSDKMKQNNFRTVGEMFCKDNSDLFQVKDGSGHIVGRKTHNTSGVYDLTIARNLIEAEVHKLFAAQRQLGNAFATESIENEYCEILLSQRHFSDGPGGERTFKFDLRGNCTFEKDELRAFKACYTFEYFKLLQDINHLRIIPEYRKGSAKQTRPLTPEERQKIIDLCLKSPSIDFSKLRKELKLADNELFNRVNYDVKKKKGKKKDTEEQSEEQLTPEQQRLKCEKAAKFQQMQSYHEICKALDKVAKGTISKLSHDQLDAIGEALSLYKADDKRRERLEQIVLSNEEIEALLPLDSTKAGNLSLIAMRKLIPYLEQGLTYDKACEQVYGDHRAQYNGERMPLLSFGNLKEEGALDSVNNPVVLRAIAQTFKVVNAIIRRYDSPQAIHIELARDMKRNFADRQDIKKKQDNNWSCNDRIRQKVEEYKGSAATGQDIVKMKLYEEQNGVCLYSGKQLDIHRLFEVGYAEVDHIVPYSKCFDDSYNNKVLVFSSENQSKGNRLPLEYMLAEGDEDKLDNYVTLVEAFIKNTRKRQRLLKPCLTAEDSSDWKERNLTDTQYITKAVADILRNYLAFEEDSPFAKKPVRSINGAVTDQVRKRLGLQKHREEGDLHHAMDAAVIAVTTDGYINRISRYTQRREFGKRIGCYKDKQTGEKVEIEKQKGQAPLYVDPETGEKLTEQAFDQKYAPTFPAPWPEFTKELKARMAPNADEAIRQLYLPSYGSEEIKPIFVSQMPDRKISGQAHAETIRSARVDVDESGKERIIAVAKTPLTSLKLDKDGEIENYYMPSSDRLLYEELKNRLKAYNNDPKEAFKEPVYKPKKDGSQGPRVYKVKTWKTTTSNVKVAGGIADNGSMVRIDVFYVKEGKDKGYYFIPIYVADTIKKELPQKAVVQGESMNNWKEMDDKDFIFSLYPGDLVRVEHKKNIVMKSTAKDSSNTKSQKVWMAYYVCASISTGSININSHDRSYGIPSLGIKTLQSFEKYEIDILGNYHKVRLPEKRQAFNLKYSQKEQ

SEQ ID NO: 7459 - protein, 1166 aa, synthetic construct
  REGION 1..1166: note = Synthetic
MHYILGLDIGITSIGWAVIESDQDGAPFKIADLGVRIFKAAEQPKTGSSLALPRRSARSLRRRLWRKAHRKERIKLLLDRVGLITKENLEKLFSASSFEKDVYTLRSEGLDRKLNNEEWARVLYHLAQRRGYRSSSKAEEADTKNDAGKLLKAVKNNSDKMAQNNFRTVGEMFCKDSSDLFQVKDGSGHVIGRKTHNTSGVYDLTVARTFIEEEAHKLFAAQRQFGNAFATENIENEYCEILLSQRHFSDGPGGERTFKFDLRGNCTFEKDELRAFKACYTFEFFKLLQDINHLRIIPEYRKGSNKQTRPLTPEERQKIIDLCLKSSSIDFSKLRKELKLADDEIFNRVGYDVKKKKSKKKDAEEQPEEQLTPEQQRTKCEEATKFTQMQSYHEMRKALDKVAKGTISKFSHDKLDEIGEILSLYKADDKRRERLEQIGLSNEEIEALLPLTFTKAGNLSLGAMRKLIPYLEQGLTYDKACEIVYGDHRAQYKGERMPLLSFGKLKEEGALDSVNNPVVLRAIAQTFKVVNAIIRRYGSPQAIHIELARDMKRNFADRQDIKSKQKDNWSENNRRREKVEEIKGSVATGQDIVKMKLYEDQNGVCLYSGKQLELHRLFEVGYAEVDHIVPYSKCFDDSYNNKVLVFSSENQRKGNRLPLEYMLAEGDEDKLDDYVTLVEANIKNTRKKQRLLKPCLTEQDITDWKARNLTDTQYITKAVADILRNYLAFEEDSPFIKKPVRSINGAVTDQVRKRLGLQKHREEGDLHHAMDAAVIAVTTDGYINRISRYTQRREFGKRIGCYKDKQTGEKVEIERQKGQAPLYIDPETGEKLTEQVFDHKYAPTFPAPWKEFTKELKARMAPNADEAIRQLYLPSYGSEEIKPIFVSQMPDRKISGQAHAETIRSARIDVDESGKERIIAVAKTPLTSLKLDKDGEIDGYYMPSSDRLLYEELKNRLKAYGNAEQAFKEPVYKPKKDGSQGPRVYKVKTYKTTTSNVKVAGGIADNGSMVRIDVFHIKEGKDKGYYFIPIYVADTIKQKLPQKAVVAAKSIDQWKEMDDEDFIFSLYPGDLVRVEHKKDIVFKSTDKNSSDTISCKNLLTYYSGANISTGAITITNHDRSYIVHGLGIKTLQLLEKYEVDVLGNYHKVRLPEKRQAFNLKYSQKKQ

SEQ ID NO: 7460 - protein, 905 aa, synthetic construct
  REGION 1..905: note = Synthetic
LRGNCTFEKDELRAFKACYTFEFFKLLQDINHLRIIPEYRKGSNKQTRPLTPEERQKIIDLCLKSSSIDFSKLRKELKLADDEIFNRVGYDVKKKKSKKKDAEEQPEEQLTPEQQRTKCEEATKFTQMQSYHEMRKALDKVAKGTISKFSHDKLDEIGEILSLYKADDKRRERLEQIGLSNEEIEALLPLTFTKAGNLSLGAMRKLIPYLEQGLTYDKACEIVYGDHRAQYKGERMPLLSFGKLKEEGALDSVNNPVVLRAIAQTFKVVNAIIRRYGSPQAIHIELARDMKRNFADRQDIKSKQKDNWSENNRRREKVEEIKGSVATGQDIVKMKLYEDQNGVCLYSGKQLELHRLFEVGYAEVDHIVPYSKCFDDSYNNKVLVFSSENQRKGNRLPLEYMLAEGDEDKLDDYVTLVEANIKNTRKKQRLLKPCLTEQDITDWKARNLTDTQYITKAVADILRNYLAFEEDSPFIKKPVRSINGAVTDQVRKRLGLQKHREEGDLHHAMDAAVIAVTTDGYINRISRYTQRREFGKRIGCYKDKQTGEKVEIERQKGQAPLYIDPETGEKLTEQVFDHKYAPTFPAPWKEFTKELKARMAPNADEAIRQLYLPSYGSEEIKPIFVSQMPDRKISGQAHAETIRSARIDVDESGKERIIAVAKTPLTSLKLDKDGEIDGYYMPSSDRLLYEELKNRLKAYGNAEQAFKEPVYKPKKDGSQGPRVYKVKTYKTTTSNVKVAGGIADNGSMVRIDVFHIKEGKDKGYYFIPIYVADTIKQKLPQKAVVAAKSIDQWKEMDDEDFIFSLYPGDLVRVEHKKDIVFKSTDKNSSDTISCKNLLTYYSGANISTGAITITNHDRSYIVHGLGIKTLQLLEKYEVDVLGNYHKVRLPEKRQAFNLKYSQKKQ

SEQ ID NO: 7461 - protein, 927 aa, synthetic construct
  REGION 923..927: note = misc_feature - Xaa can be any naturally occurring amino acid
  REGION 1..927: note = Synthetic
MHYILGLDIGITSIGWAVIESDQDGAPFKIADLGVRIFKAAEQPKTGSSLALPRRSARSLRRRLWRKAHRKERIKLLLDRVGLITKENLEKLFSASSFEKDVYTLRSEGLDRKLNNEEWARVLYHLAQRRGYRSSSKAEEADTKNDAGKLLKAVKNNSDKMAQNNFRTVGEMFCKDSSDLFQVKDGSGHVIGRKTHNTSGVYDLTVARTFIEEEAHKLFAAQRQFGNAFATENIENEYCEILLSQRHFSDGPGGERTFKFDLRGNCTFEKDELRAFKACYTFEFFKLLQDINHLRIIPEYRKGSNKQTRPLTPEERQKIIDLCLKSSSIDFSKLRKELKLADDEIFNRVGYDVKKKKSKKKDAEEQPEEQLTPEQQRTKCEEATKFTQMQSYHEMRKALDKVAKGTISKFSHDKLDEIGEILSLYKADDKRRERLEQIGLSNEEIEALLPLTFTKAGNLSLGAMRKLIPYLEQGLTYDKACEIVYGDHRAQYKGERMPLLSFGKLKEEGALDSVNNPVVLRAIAQTFKVVNAIIRRYGSPQAIHIELARDMKRNFADRQDIKSKQKDNWSENNRRREKVEEIKGSVATGQDIVKMKLYEDQNGVCLYSGKQLELHRLFEVGYAEVDHIVPYSKCFDDSYNNKVLVFSSENQRKGNRLPLEYMLAEGDEDKLDDYVTLVEANIKNTRKKQRLLKPCLTEQDITDWKARNLTDTQYITKAVADILRNYLAFEEDSPFIKKPVRSINGAVTDQVRKRLGLQKHREEGDLHHAMDAAVIAVTTDGYINRISRYTQRREFGKRIGCYKDKQTGEKVEIERQKGQAPLYIDPETGEKLTEQVFDHKYAPTFPAPWKEFTKELKARMAPNADEAIRQLYLPSYGSEEIKPIFVSQMPDRKISGQAHAETIRSARIDVDESGKERIIAVAXXXXX

SEQ ID NO: 7462 - protein, 1075 aa, synthetic construct
  REGION 1..1075: note = Synthetic
MSDNDLIFSFDIGTGSIGECVRQGSEIKHLESLLIPAEYASTKDATKKRHQIRTREAHKAREDWWRKQAKEAGIEVLESRQPTKENPNIKPDERLLREFPKDGDNTIYTSCLLRIALLQGKKLDGWQIYKAVWSAIQHRGYDEKNHWKNDDDSAENKKNVNEYIKYCKDNKFEEKYWLPCYVDAHRMGIWSPEDSNNLYRKRNNETNPAPARNKNHSKYHLVFPRSKVEEELKHLLSQAAKLFPKLAGKENYIVYGPGEVQYASMKKMEFSKYRGKEWDWQGLLGQKIPRFDNRMLNKCCCMSHFNVCRADDMLNQEVMFLMMLKNMRYHSKNKPDEMLTAEQIKELFNKFKDRLKFEKNEKDKVKNRKKEVIPKSLLRKWVIEKLNGEIHPAHSLIPMPNAGGRSRYCRPALEVIREVILSGKTPKQVYEECVAKNKIENPEQNSKKGRIQSDFDFLIKKGTSEKWENFYISDNRYELREMSADERKIEIEKTLNEINNPIVSHRLKWFKKELNKLAFGEPEKKNPGYGIPEKVVLEFARDEFMGKQAKEDYYKFIKEQTKERKIVVEELEKAGFSKPSGEMIRKMMLFRQQDGIDFYSMQNIKLSHLGEYEIDHVIPRSRGGSDAFYNIILTTNKNNSAKGDKTPYEWLGKGDIWDNISEKLKVNKKMGSKKKLLFMASSEEQYKLLIDKYTQLSQTAYISKLAQKVTALTFGWGMQTKDDNRNIVIATGGQTARIRSRFKLDRLLHSGMTDEEFEKALRNGEIEKKNRSNPRHHALDALVLSAVPEIRVDKNRKGKYDDIYPSWLTRDFCEKEVAHVYPKQIKFSKAQLAEVLYGKREVKKEDGLWYTYAITRQNEGTRIEDYYVKKSEKKSDIEDMEKLRNKILKKVNHIFSNDIRTDFKKKLEEKPTEEQWNDFIKNYKVNGTCPHRISVIGNPGVKGFKEKQPLPPNYKEIRPNSKQYYETKTGQKWSYTAQLICLNEKDEWEVHPVYAWDSLYERIKKAEQEFKKVVKFHSRQSVEIKNDCANGKIKKGIYILATIQNGNWGVLESQGEKIDASLNELMNIGEMWPII

SEQ ID NO: 7463 - protein, 1631 aa, synthetic construct
  REGION 1..1631: note = Synthetic
MKKILGLDLGTNSIGAAIINIPKSFEEYGKGGNIEWMGSRIIPMEGFVSTKTGKPFKENPIDSFTKGVGVSKAAARRVKRGSRRLKHRYKLRRTRLIRVFKTLGWLDDSYPEDFKKEFRNDQNFKFHISDYLPFSEESIEEAKKLLGAANNKGEITLPEDWIVYYLRKKALHQKITFAELARITYMMNQRRGFKSSRKDLKDENLDEKKWVEILTIKSVVQETFEPNRNKNFKFKITPDNEKVQPWVVERKKKPEWEGKEFTFLITEKIKTKSDGTVEVTQLTPQIPQEGDWDLCVTAQDNKIGDEYPGTYFFNGLVESVKNKTDFKIRQYAVYRAKYKRELEAIWKKQIELNEELRKINNDQTILRKIAEILYPTQTKLNKSKLRELLSSDLLHIISEDIIYYQRDLKSQKNSKSDCQYEKKKGTDGEWYGLKCAPKSSPEFQEFRIWQDIHNIKVFQRNGKEEKILDDGIVKEFDKVDIDVSVDFINEKVKEALFYLFDTSKEISQIQIIDLINRFNYENKIDIKTHRINMFFNEEKKLIGNETKEYYRKIFRRFGYEVKGEEILNNKEKFYRLWNISYSISLNDEEKSKQAIFRALTEKNNRRGNPKKVIFELPENVALAIASAPDIETTKKYASYSSKAINKLLPLMRCGKYWDENLVENTVKEKASRIIERLTKINHNPKRLKSVADDDIPQQLLKSFVGSSMESIIKGLNTYQACYLVYDRHSEKLDYQKFTSINEFDVPKLLPNNSLRNPIVEQVVRETLFLVKDLWKQYGQPDEIHIELGRDLKKNAKERKSATETTTGNFQERQRIKKLLYELMNEEFEQYQNEGDNVVISKAKFEIKPNPESPVDINKFRLWKNMSGISDVDLDKRIRDEKIPKNQEIKKYALWLSQKCISPYTGRIIPLSKLFDPNQYEIEHILPRGLVKNDSFSNLVIAEWGVNKAKGRELGALFIANRNGKCEYGNQIYQLLDYDAYVTHCKSTFKGQKLKNLLATEIPDDFISRQINDTRYITRKITELLYPVAKGNKDAETDAEKGGLVFTIGSITSELKNEWGLQKEWKKMLKPRFERLERLNNEKYIYPNKKNSNDIDFNVKENETLNIKRIDHRHHALDALVIAATTNEHIRYLNTLNAADSNEEIKQLKRKLVKGKIRKFNLPWESFTKEAKEKLEETIVTFKSNNKVFTKPFNRYQKWELINGRWEKTFVKQATNRKWLAVRKSLFKEPQGIIYIKEIETKSFRTPTDILKIIKLQMERIKAQNTPKQKTTSYIYDQEVRELVKQIIELSNRDLDRIKKYLKNFKPKDINGNPIYTVRIAVFKPYAAKRVKLDKSFDHKKIDKIPYGDKVRITEDRKMTIPQILHQHLEEYEEYDRKRKEIEAKEEELLTNDEKLFLENIMPEPFSEEGLEALDKKVGMKIRMVTIKEKIGIKKELQNKLMEADGNPYYVFYENVITKERSGFSSLSTYDVLQKRLNNQPLLEPKANHRIHVLQNNDMVYVPTKEERDKIVRGVPLIEIINFTEIGKRLYIVNDFSKTDIYFRPNSFAKAIISKELHTSFDDKCSRFVNFYNSEEESDMIKNVCIKVKFDRIGNIILNEDDYLHLKIKEAENDKSITLKEFKRTLFDEDNN

SEQ ID NO: 7464 - protein, 1118 aa, synthetic construct
  REGION 1..1118: note = Synthetic
MRAPYILGLDLGIASVGWAVVGIDDDEYPKALIDVGVRCFETAEVPKTGESLAAARRLARAQRRLTRRRAHRVLRLKRLLIKEGILSANDFTEDGNGSRVLKNIQAKRDKAMNPNEIQMQARLKQPWQLRVEGLDRCLNPQEWAVVLLHMVKHRGYLSQRAKEAEQDKEQGKLLSAIKENSGKLWAEETATPAHLAVEYFAKEEGHIRNQRGAYTHSFNRKDLEKELTLLFDRQRIQGNPHTSPEFFEKVRGLLMDQRAALSGEAIQKMLGKCTFEPKEYRAAKHSYTAERFVWLTRLNNIRLYGNGSERALSDEERSELLNKPYQNAKFTYAQARKILGLDESVLFKGIDSKDESKKTLAELKGFHAIRKALESQGLKNEWQAMSGKALNGDANVLDAIGTGFSLYKTDEDITQYLNEKLPESDRLPENVLIALLNGVNFDQFISLSLKALHKIIPLMEQGKRYDEACAECYGSHYGSGVNNANKKALLPPISDDDIRNPVVRRTLAQARKVVNAVIRRYGQPARVHIETGREVGKSIEDRKAIEKQQAENQKDRERSKEYFKKQFPDAGEPKAKDILKLRLYEQQHGKCLYSGKPLDINRLLEAGYAEIDHALPFSRTWDDSFNNKILVLKAENQNKGNKTPYEWFDGKNNSERWRTFVALVDGSHFSPTKKARVKTQELDEDFIARNLNDTRYIARFLLNFIEANLALTGKGEKRVFASNGQITAFLRGRWGLRKSREENDRHHALDAVVVACSSVSMQQKITKYSRKRELGKAKIEQIDYETGEIISTHFPKPWKFFREEVMIRIFNRVLDNRDQSAEALEDAEALKDYLVKKLPDRPQAVHKYVTPLIVSRATGRKLSGQLHQDTIRSAKRLAESESTVRVALTALKLAQLENIANKERESALYQKLKTRLEEYGDDPKKAFAEPFYKSEKDREAGRAMKAIRVSTTQKSGIKIRSGIADNGEMARIDVFTKNGKYFLVPIYRHQAAKGELPNRAVIQGKDEDEWQEMDETYSFHCVLFKGDWIEVQTKKETHRGYFDGLHRATGGISIKVHDRDSRIGKKGILEGIGVKTAVSLQKYQIDPLGKFIRPCRMGGIRPGIKGDNNKGNNTEKEE

SEQ ID NO: 7465 - protein, 1118 aa, synthetic construct
  REGION 1..1118: note = Synthetic
MNKTYRYILGLDLGIASVGWALVLVDEEENPVGLLDCGVRVFERAEEPKTGESLSAGRRVARSIRRLIRRRAHRLLRLRRTLKQSGILTAADFGSDGLPLDLPIDAWQLRVQGLDRKLGNKEWAAVLLHLVKHRGYLSQRKSEMKTDDKELGRLLAGVAENSKLLAEASDEYRTAAELALKRFAQANGHMRNKGGDYSHTFNRQDLQVELHLLFARQRELGNPFATVDLERQADNLLMTQRSALQGEAVLKMLGKCTFEPSEYKAAKNTYSAERFVWLTKLNNLRILHNGEERALDEGERKMLLDEPYKKAKLTYAQVRKLLGLPESAVFKGLRYGKDSDGLKAESSTTLMEMRAWHAVRKALEKAGLKTEWQSLAGKPELLDAVGTAFSLYKTDEDILNYLTGKVASKTVLAIRNFWGGGVLDECDSGIEYLADEDMTQYLASGVLPVNVLQALLEGLNFDEFIHLSLKTLSKILPLMEQGMRYDEACRVVYGNHYGLKKKEESRLLPHIQADDIRNPVVFRTLTQARKVINAIIRRYGSPQRVHIETARELGKSFKDRKEIEKRQEENRKDRERAAAHFKELFPYFVGEPKGGDILKLRLYEQQQGKCLYSGGEIDLRRLNEKGYVEVDHALPFSRTWDDSFNNKVLVLGSENQKKRNQTPYEYLDGANNSPRWREFQARVAGCRFPYAKKQRIQTAKLDEQGFIERNLNDTRYIARFLCNFIGDNLHLEGAGKRRVFASNGQITSLLRGLWGLRKVREENDRHHALDAVVVACSTVSMQQKITKAMQRRETFETVDTETGEIKSRIPQPWDFFRREVMIRVFSDDPVRELAEKLDSRPEAVHEHVVPLFVSRMPMRKMSGQGHLETVRSPKRLDEKISTVKKPLSMLKSKDVEKIVGYPDREPALYAALLERLAAHKDDPAKAFAEPFYKPAKDGGQGSLVRSVRVEDVQKSGVMIRKDRSGRAQGIADNATMVRVDVYGKGGKNYLVPVYAWQVAEGILPNRAVASGKDESDWDVMDASYEFRFSLCPNDLVEIISKKGRIFGYFSGLDRATSNIHIKEHDMDKTKGKDGLHRSLGVKTVQSFQKYQIDPLGKEIRLCKAEPRPSLRVKKSKKQ

SEQ ID NO: 7466 - protein, 1114 aa, synthetic construct
  REGION 1..1114: note = Synthetic
MLVNISDEALNYIHEMFANLNFILRKDSSMKAQRYILGLDLGIASIGWGLVWVDEDELPIGLLDCGVRTFERAEVPKTGDSLAAARRQARSMRRLIRRRAHRLLRMRRLLKHEGVLTAADFDENGLPIGLPIDAWILRVAALDRKLSAQEWAAVLLHIVKHRGYLSQRKSEVKTKDQELGRLLAGVNENHQLLQDKFTQYRTPAELAIKKFAVESGHIRNKGGDYSHTFNRKDVECELHILFERQRALGNLFASTGLEEKTASLLMTQRAALQGEAVLKMLGHCTFEKNEFKAAKNTYSAERFVWLSKLNNLRICHSGEERPLDAAERALLLDEPYKKNKLTYKQVRTLLNLPEATVFKGLRYGKSEDGLAVEGKTAFMEMKAYHAVRKVLKDAGLETEWNNRIRNPHVLDAIGTAFSLYKTDTDITHNLEPYRLPENVLNALLSGISFDNFIQISLKALTKILPKMEQGLRYDEACTTVYGNHHGHNEQHDNRLLPPIPKDEIRNPVVLRTLTQVRKVVNEIVRRYGSPLRIHIETGREVGKSFTDRKEIEKRQEENRKDRERAAERFKELFPNIIGEPKGRDILKLRLYEQQHGKCLYSGSKIDLSRLPEKGYVEIDHALPFSRTWDDSFNNKVLVLGSENQRKGSQTPYEYLGGGHDSERWHEFAARVSGSRFPFGKKQRIMTKKLDEQGFIERNLNDTRYIARFLCQFIENNMHLEGSSKKQVFASNGQITSLLRGRWGLHKAREENDRHHALDAIVVACSSHSMQQKITHYVRQQEMNVFNGEIIDKETGEIRHIYFPEPWPFFRKEIMIRVFSEHPLEELAEKLTSRPEAVHEFVTPLFVSRAPTRKMTGQGHLETIKSAKRLDEKLSVIRLPLTQLKLKDIERIVGYPNREPALYAALANRLKSFNNDPAKAFNPKEHPFYKVGKNGQHRTQVKAIRVATIQKSGVMVRKDKNDIYHGIADNATMIRVDIFEKNGKNYVVPIYSWQVAKGILPNKAVVAYADEDDWIDVDETFHFKFSLYPNDLIKVTTKKGDFFGYYNGLNRSTGAINIKTHDLNIHYGKDGIWESIGIKTALSIKKYQIDPLGKSIKICRSEKRIMLRKKNKKYI

SEQ ID NO: 7467 - protein, 1089 aa, synthetic construct
  REGION 1..1089: note = Synthetic
MKTSSLNYILGLDLGIASVGWAVVEIDEQENPLGLIDVGVRTFERAEVPKTGESLALARRLARSSRRLVKRRAERLKKAKRLLKAENLLLSTDEKLPNDVWQLRVKGLEQQLEREEWAAVLLHLLKHRGYLSQRKNESKTENKELGALLSGVNTNHQILKSLAYRTPAEIAINKFQAEEGHIRNQRGSYTHTFSRLDLQAEMALLFQCQREFGNTYTSAKLLENLTALLMWQKPALAGEAILKMLGKCTFEPTEYKAAKNTYSAESFVWLTKLNNLRILENGEERALTDNERFMLLEQPYEKTKLTYAQVRSILALNNEAIFKGVRYFGEDKKSVETKTTLMEMKAYHQIRKALESADLKAEWNALKNDSVLLDEIGTAFSLYKTDEDINSYLNGKLSVKVLNALLENLNFDKFIQLSLKALQQILPLMLQGQCYDEAVSAIYGDHYGKKSEESNVFLPVIPANEIRNPVVLRTLTQTRKVINAIVRLYGSPARIHIETGREVGKSYKDRRELEKQQEENRKQRERAVKKFKEIFPNFIGEPKGKDILKMRLYDQQQAKCLYSGKPLELHRLLEKGYVEVDHALPFSRTWDDSFNNKVLVLANENQNKGNLTPYEWLDGKNNSERWQHFVARVQISGFSYKKKQRILSQKLDEKGFIERNLNDTRYVARFLCNFITDNMLLTGKGSRKVFASNGQITALLRSRWGLQKVREDNDRHHALDAVVVACSTVAMQQRIIRFVRYETGDVFKGERIDYETGEIIPLYFPTPWEFFRENVEIRIFSDNPKLELANRLPDYPKYNHEFVQPLFVSRMPTRKMTGQGHKETIFSKKTKGVNRIDAKDDASNEIVRVKKIPLTELKLEDIDFIVGYDVNREEALYESLKTQLEKYDNNPEKAFAEKFYKPKYIIKDNNKVLENTSALVKSVKVIQRKQGRQDILNTGVDVNNGHADNASGSIVRIDVFIKNKKYFYIPVYTWQVAKGILPNMAPLAKKKEIDWELMDEISVFQFSIYPNDLIKLKTKKFEFFGYFVKFNRNNVSFDIRAHDNSKKLGNNGVFESIGGATAVLVEKYQVDELGKNIRPCRPTKRQHVR

SEQ ID NO: 7468 - protein, 1088 aa, synthetic construct
  REGION 1..1088: note = Synthetic
VNHSTLLDKYDQHFCAFALNYLEGMFFNKNKENNMQQPLNQKFQYILGLDLGIASVGWAVVEIDENEYPTRLIDVGVRTFERAEVPKTGESLALSRRLARSTRRLIRRRAYRLLLAKRLFKQQGMITQSDLSEGLPNQVWHLRVEGLERKLLPREWSAVLLHLLKHRGYLSQRKNESKTDNKELGALLSGVNQNHQLLQSESYRTPAELAVKKFAEEEGHIRNQRGSYTHTFNRLDLLEELNLLFVQQRQFGNEDASEILQQRVTELLMWQKPALSGEAILRMLGKCTFEPTEYKAAKNTYSAERFVWLTKLNNLRILENGIERGLIEDERQLLINQPYEKAKLTYLQVKKLLQLPENTIFKHLRYSQNNAESATFMELKAWHAIRKALEGNGLKTEWQGLATKPELLDEIGTAFSLYKTDEDISKYLNGQLPNTVLQALLEQLNFDKFVQLSLQSLRKILPLMEQGKRYDEACREIYGDHYGKQSKQELVFLSAIPADEVRNPVVLRTLSQARKVINSIVRLYGSPARIHIETGRELGKSFKARREIQKRQEENRSERERAVKKFQECFPDFVGLPKAKDILKLRLYEQQHGKCLYSAKNLDITRLNEENYVEIDHALPFSRTWDDSFNNKVLVLANTNQEKGNRTPYEWLRGEENSARWKSFVALVMGSCFSHAKKQHLLTQKLDEDSFIKRNLNDTRYIAKFLSNYIATHMQLVGNGKHNVFASNGQITALLRRQWGFTKVRESDRHHALDAIVVACTTRAMQQKITRFIRFEEMSPFTGERIDKETGEIIPLYFPKPWQYFREDVNIRVFDDQPNITLKKMLPDRPEANHEFVQPLFVSRAPTRKMRGQGHMETVKSAKRLSEGVSVLKVPLTQLKPNLLENMVNRERESELYHALKTRLTEFNNDPAKAFAIPFYKKGGQRVKSVRVEQVQKTGVLVHKCKGIADNASIVRTDVFVKNGKFFLVPIYTWQVAKGILANKAIIANKHEDEWEEMDENAIFKFSLFPNDLVELKTKKERFFGYYIGLDRANGSISIREHDSAVSKGKDGIYRVGVKLALSFDRYQVDELGKNIQVCRPSKRQPVC

SEQ ID NO: 7469 - protein, 1086 aa, synthetic construct
  REGION 1..1086: note = Synthetic
MEKQMTVFKPNPLNYILGLDIGIASVGWAMVEIDDKENPIRLIDLGVRVFERAEVPKTGDSLAATRRLARSIRRLIRRRAHRLLRARRLLKHEGVLNPEDFNENGFIKLLPNTPWQLRTAALDRKLTPLEWAAVLLHLVKHRGYLSQRKNEGETDDKELGALLKGVADNTHALQAGNFRTPAELALNKFEKESGHIRNQRGDYSHTFSRKDLQAELVLLFEKQKEFGNPHVSDDLKNGIENLLMTQRPALSGDAIQKMLGHCTFEPAEPKAAKNTYTAERFIWLTKLNNLRILNQGNERPLTDAERTTLMDEPYKKSKLTYAQARKLLGLDDTAFFKGLRYGKDNAESATLMEMKAYHAISRALEKEGLKDKKSPLSLSPELQDEIGTAFSLFKTDEDITGRLKDCLQPEILDALLKHISFDKFIQISLKALRRIVPLMEQGKRYDEACAEIYGDHYGEKNSEEMLYLPPIPADEIRNPVVLRALSQARKVINAVVRRYGSPARIHIETAREVGKSFKDRKEIEKRQEENRKDREKAAAKFREYFPNLVGEPKSKDILKLRLYEQQHGKCLYSGKEIDLGRLNEKGYVEIDHALPFSRTWDDSFNNKVLVVGSENQNKGNRTPYEYLNGKDNSREWLEFKARVETSRFPHSKKQRVLLQKFDEEGFKERNLNDTRYVNRFLCQFVADHMHLTGKGKRRVFASNGQITNLLRGFWGLHKVRAENDRHHALDAVVVACSTVAMQQKITRFVRYKEMNAFDGKTIDKETGEVLHQKTHFPQPWKFFTQEVMIRVFGKPDGEPEFEEADTPEKLRALLAEKLPSRPEAIHEYVMPLFVSRAPNRKMSGQGHMETVKSVKRLNEGISVLRVPLTQLKLKDLEKMVNREREPKLYAGLKARLEAHKDDPVKAFAEPFYKHDKAGNRTQQVKAVRVEQVQKTGVWVRNRNGIADNATMVRVDVFEKAGKYYLVPIYSWQVAKGILPDRAVVAYAEEENWTVMDESFKFKFVLYANDLIKLTAKKNEFLGYFVSLNRATGAIDIRTHDTDSTKGKNGIFQSVGVKTALSFQKYQIDELGKEIRLCRLKKRPPVR

SEQ ID NO: 7470 - protein, 1082 aa, synthetic construct
  REGION 1..1082: note = Synthetic
MAAFKPNSINYIIGLDIGIASVGWAMVEIDEEENPIRLIDLGVRVFERAEVLKTGDSLAAARRLARSVRRLTRRRAHRLLRARRLLKREGVLQAADFDENGLIKSLPNTPWQLRIAALDRKLTPLEWSAVLLHLIKHRGYLSQRKNEGETADKELGALLKGVADNAHALQTGDFRTPAELALNKFEKESGHIRNQRGDYSHTFSRKDLQAELVLLFEKQKEFGNPHISDGLKEGIETLLMAQRPALSGDAVQKMLGYCTFEPTEPKAAKNTYTAERFIWLTKLNNLRILEQGSERPLTDTERATLMDEPYRKSKLTYAQARKLLDLDDTAFFKGLRYGKDNTEASTLMEMKAYHAISRALEKEGLKDKKSPLNLSPELQDEIGTAFSLFKTDEDITGRLKGCLQPEILDALLKHISFDKFVQISLKALRRIVPLMEQGKRYDEACAETYGDHYGEKNSEEMLYLPPIPADEIRNPVVLRALSQARKVINSVVRRYGSPARIHIETAGEVGKSFKDRKEIEKRQEENRKDREKAAAEFREYFPNFVGEPKSKDILKLRLYEQQHGKCLYSGKEINLGRLNEKGYVEIDHALPFSRTWDDSFNNKVLVLGSENQNKGNQTPYEYFNGKDNSREWQEFKARVETSRFPRSKKQRILLQKFDEDGFKERNLNDTRYVNRFLCQFVADHMLLAGKGKRRVFASNGQITNLLRGFWGLRKVRAENDRHHALDAVVVACSTVAMQQKITRFVRYKEMNAFDGKTIDKETGEVLHQKAHFPQPWEFFAQEVMIRVFGKPDGKSEFEEADTPEKLRTLLAEKLSSRPEAVHEYVTPLFVSRAPNRKMSGQGHMETVKSAKRLDEGISVLRVPLTQLKLKDLEKMVNREREPKLCEGLKARLEAHKDDPTKAFAEPFYKYDKAGNRTQQVKAVRVEQVQKTGVWVRNHNGIADNATMVRVDVFEKGGKYYLVPIYSWQVAKGILPDRAIIAFKDEEDWQLIDDSFNFKFSLHPNDLIEVITKKARIFGYFASCHRGTGNINIRIHDLDHKIGKNGILEGIGVKTALSFQKYQIDELGKEIRPCRLKKRPPVR

SEQ ID NO: 7471 - protein, 1082 aa, synthetic construct
  REGION 1..1082: note = Synthetic
MAAFKPNPINYILGLDIGIASVGWAMVEIDEEENPIRLIDLGVRVFERAEVPKTGDSLAMARRLARSVRRLTRRRAHRLLRARRLLKREGVLQAADFDENGLIKSLPNTPWQLRAAALDRKLTPLEWSAVLLHLIKHRGYLSQRKNEGETADKELGALLKGVANNAHALQTGDFRTPAELALNKFEKESGHIRNQRGDYSHTFSRKDLQAELILLFEKQKEFGNPHVSGGLKEGIETLLMTQRPALSGDAVQKMLGHCTFEPAEPKAAKNTYTAERFIWLTKLNNLRILEQGSERPLTDTERATLMDEPYRKSKLTYAQARKLLGLEDTAFFKGLRYGKDNAEASTLMEMKAYHAISRALEKEGLKDKKSPLNLSSELQDEIGTAFSLFKTDEDITGRLKDRVQPEILEALLKHISFDKFVQISLKALRRIVPLMEQGKRYDEACAEIYGDHYGKKNTEEKIYLPPIPADEIRNPVVLRALSQARKVINGVVRRYGSPARIHIETAREVGKSFKDRKEIEKRQEENRKDREKAAAKFREYFPNFVGEPKSKDILKLRLYEQQHGKCLYSGKEINLVRLNEKGYVEIDHALPFSRTWDDSFNNKVLVLGSENQNKGNQTPYEYFNGKDNSREWQEFKARVETSRFPRSKKQRILLQKFDEDGFKECNLNDTRYVNRFLCQFVADHILLTGKGKRRVFASNGQITNLLRGFWGLRKVRAENDRHHALDAVVVACSTVAMQQKITRFVRYKEMNAFDGKTIDKETGKVLHQKTHFPQPWEFFAQEVMIRVFGKPDGKPEFEEADTPEKLRTLLAEKLSSRPEAVHEYVTPLFVSRAPNRKMSGAHKDTLRSAKRFVKHNEKISVKRVWLTEIKLADLENMVNYKNGREIELYEALKARLEAYGGNAKQAFDPKDNPFYKKGGQLVKAVRVEKTQESGVLLNKKNAYTIADNGDMVRVDVFCKVDKKGKNQYFIVPIYAWQVAENILPDIDCKGYRIDDSYTFCFSLHKYDLIAFQKDEKSKVEFAYYINCDSSNGRFYLAWHDKGSKEQQFRISTQNLVLIQKYQVNELGKEIRPCRLKKRPPVR

SEQ ID NO: 7472 - protein, 1079 aa, synthetic construct
  REGION 1..1079: note = Synthetic
MKKQPQRYILGLDLGIASVGWALILVDGAENPVGLLDCGVRTFERAEVPKTGDSLALARRQARSVRRLIRRRAHRLLRLRRLLKREGILSAADFNSDGLPNLPIDAWQLRVAGLERKLTNQEWAAVLLHLVKHRGYLSQRKSETQTENKELGRLLAGVAENSKLLSESSEQYRTPAELAVKLFAEQSGRLRNKGGDYTHTFNRLDLQKELHLLFERQCALGNPFASAELQSKVDELLMTQRSALQGEAVLKMLGKCTFEPSEYKAAKNTYSAERFIWLTKLNNLRILYNGEDRALDEGERKQLLDEPYKKAKLTYKQVRSILNLPESAVFKGLRYGKDSDGLKAENGTLMEMKAYHKIRTVLDKAGLKGEWENRIRNPEILDKIGTAFSLYKTDEDIQATLADLRLPENVLDALLAGLNFDKFIQLSLKALRNILPLMERGIRYDEACKEVYGDHRALAESKNQVLLPPIPAGEIRNPVVLRTLTQARKVINAIIRRYGSPQRVHIETARELGKSFKDRKEIEKRQEENRKERERAAEHFKELFPHFAGEPKGGDILKLRLYEQQQGKCLYSGIPIDLGRLNEKGYVEIDHALPFSRTWDDSFKNKVLVLGSENQKKRNQTPYEYLDGAGNSQRWREFQARVQGCRFPYPKKQHIQTAKLDDKAEQGFLERNLNDTRYIARFLCGFIEKNLHLQGTGKRRVFASNGQITALLRGLWGLKKVREDNDRHHALDAIVVACSTVSMQQKITKAMQRRETLETVDSETGEVKTRIPQPWDFFRQEVMIRVFSDFPREELAEKLNSRPEALHDFVSPLFVSRAPNRKMTGQGHLETVKSAKRLSENISVVRKPLTALKLKDIENIVGYPDREPALYQALQERLQAYKDDPVKAFADQPFYKPAKDGGQGSLVKAVRVEDVQKTGVMVRKDRSGTARGIADNATMVRVDVFGKNGKNYLVPVYAWQVAKGILPNRAVVANKDESCWDLIDENFDFQFTLYPNDLIKVVTKKDKFFGYYVGLDRATGAITLKEHDLEKRKGKDGIHRSIGVKAVSIFQKYQVDLLGKEIRLCKVEKRTGLNGKKKK

SEQ ID NO: 7473 - protein, 1077 aa, synthetic construct
  REGION 1..1077: note = Synthetic
MQQKPQRYILGLDLGIASVGWACVWADENEHPTGLLDCGVRTFERAEVPKTGDSLALARRQARSVRRLIRRRAHRLLRLRRLLKREGVLLSADFNENGLVRGLPIDAWALRVAGLDRKLSNKEWAAVLLHLVKHRGYLSQRKNETQSKDKELGRLLAGVNGNREALQNRSDEYRTAAELAVKKFAAENNGSLRNKGGDYSHTFDRKDLQRELHLLFERQRALDNPFTSSEMEAAVDELLMKQRSALQGEAVLKMLGRCTFEPSEYKAAKNTYSAERFVWLTKLNNLRIQYNGEERALSEAERRLLLDEPYQKAKLTYKQVRTILELPESAVFKGLRYGHGEDGLKAESGTLMEMKAYHAVRKALKDAGLEGEWENRIRNPELLDAIGTAFSLYKTDEDIRANLAAFRLSENVLEALLAGLNFDKFVHLSLKALAKILPLMEQGMRYDEACKEAYGDHYGAKEQEDHRLLPPFVADDIRNPVVFRTLTQARKIVNEIVRRYGSPLRVHIETGREVGKSFSDRKEIEKRQEENRKERERAAAHFKELFPNFAGEPKAQDILKLRLYEQQHGKCLYSGKEIDLRRLPEKGYVEIDHALPFSRTWDDSFNNKVLVLGKENQDKRNRTPYEYLDGKGNSGAWRAFAERVSGCRFPYAKKQRLLTQKLDEKTEQGFLERNLNDTRYVARFLCQFIEEKMHLEGAGKKRVFASNGQITALLRGFWGLKKVREENDRHHALDAVVVACSSVSMQQKITRHFRYREELEHIDRETGEVIHGFPQPWEFFRQEVMTRVFSDDPVSELAEKLDSRPEAVHEFVTPLFVSRAPHRKVTGQGHLETIRSAKRLDEKISVVKLPLTQLKTKDIERIVGYPNREPALYDALAARLAAFKDDPAKAFSEPFYKTGKDGKCGVLVKAVRVENVQKSGLLVRKDESGKMQGVADNATMVRVDVFGKNGKNYLVPVYAWQVEKGELPNRAVVAYADEEDWDEMDDSFEFKFSLYPNDLVEVVTKKDKFFGYYSGFNRATGAINIKEHDLSKSKVKNGVYEGIGVKTAQSFQKYQVDTLGKTIRLCKPEKRMGFKKK

SEQ ID NO: 7474 - protein, 1074 aa, synthetic construct
  REGION 1..1074: note = Synthetic
MKATTHRYILGLDLGIASVGWALVWVDENEYPIGLLDCGVRTFERAEVPKTGESLALARRTARSIRRLIRRRAHRLLRLRRLLKREGLLTAADFAADGLPVAMPVDTWQLRVQGLDRKLAEKEWAAVLLHLVKHRGYLSQRKSEMQTEDKELGRLLAGVAENHKLLADNPGQYRTPAELAVKLFAEKSGHLRNKGGNYSHTFNRLDLQKELHLLFAKQRELGNPFTSVELEAKVDNLLMTQRSALQGEAVLKMLGKCTFEPSEYKAAKNTYSAERFIWLTKLNNLRILHNGEERALNEHERKLLLDEPYKKAKLTYAQVRKILGLPESAVFKGLRYGKDSDGLKTESGALMEMKAYHKIRTVLEKAGLKGEWENRIRNPEVIDAIGTAFSLYKTDNDIQTALAGWALPEQVLEALLKGLSFDKFIELSLPALAKILPLMEQGLRYDEACAQIYGNHYGAKTQQDNLLLPVIHADDIRNPVVFRTLTQARKVVNAIIRRYGSPLRVHIETARELGKSYKDRKEIEKRQEENRKERERAVAEFKEYFPHFTGEPKGQDILKMRLYKQQQGKCLYSGVPLDLGRLNEKGYVEIDHALPFSRTWDDSFNNKVLVLGSENQKKRNQTPYEYLDGAENSERWREFQARVAGCHFPYAKKQRIQTAKLNEQDFIERNLNDTRYIARFLCTFIEHNLHLEGKGKRRVFASNGQITSLLRGLWGLCKVREENDRHHALDAVVVACSTVSMQQKITQAMQRRESLEIVDTETGEVKQRIPQPWDFFRQEVMIRVFSDNPREELAAKLDARPQTLHEYVTPLFVSRAPNRKMTGQGHLETIKSAKRLSENISVVKKPLTSLKTKDIEKIVGYPNREPALYAALQERLAAYNDDPAKAFSEPFYKPAKDGQQGSLVKAVRVEDVQKTGVMVRKDSNGIPQGIADNATMVRVDVFGKGGKNYLVPVYAWQVAKGILPNRAIIAFKDEIDWELIDESFTFRFSLYSNDLVEVITKKGRIFGYFAGCHRGTGNINIRIHDLDNKFGKNGVLEGIGVKTAQSFQKYQTDPLGKEIRLCKPEQRPVLKIKK

SEQ ID NO: 7475 - protein, 1074 aa, synthetic construct
  REGION 1..1074: note = Synthetic
MGAYPQKYILGLDLGIASVGWALVSVDENENPNGLLDCGVRTFERAEVPKTGDSLAKARREARSVRRLIRRRAHRLLRLRRLLKREGVLAAADFDSNGLVRDLPVDAWPLRVAGLDRKLEAKEWAAVLLHLVKHRGYLSQRKSEMQTEDKELGRLLAGVAENSKLLQQDAYRTPAELAVKHFAVQNGHMRNKGGDYSHTFNRQDLQRELHLLFEKQRGFGNPFAAAELENRVDTLLMTQRSALQGEAVLKMLGKCTFEPAEYKAAKHTYSAERFVWLTKLNNLRVLHNGEERALEEAERKMLLDEPYKKAKFTYTQARKLLDMPADAAFKGLRYGKDSDGLKAENGTLMEMKAYHKIRQVLEKAGLKTEWQGLACKPDLLDEIGTVFSLYKTDEDISSCLKDKLPENVLQALLAGLNFDKFIQLSLKALSQIMPLMENGMRYDKACEAVYGDHYGLKKKEENLLLPRIAADDIRNPVVFRTLTQTRKVVNAIIRRYGSPQRVHIETARELGKSYKDRKEIEKRQEENRKERERAAADFKELFPNFVGEPKGQDILKLRLYKQQQCKCLYSGAEIDLRRLNEKGYVEIDHALPFSRTWDDSFNNKVLVLGSENQKKRNQTPYEYLDGASNSQRWREFQARVAGCGFPYAKKQRIQTAKLDSKAEQGFLERNLNDTRYIARFLCNFIEENLHLEGSGKRRVFASNGQITSLLRGLWGLRKVREDNDRHHALDAVVVACSTVSMQQKITKAMQRRETLETVDTETGEVKQRIPQPWDFFRQEVMIRVFSDQPHEELAEKLDSRPQALHEHVTPLFVSRAPNRKMTGQGHLETIKSAKRLSEKISVVKKPLTQLKSKDIENIVGYPNREPALYAALRERLAAHKDDPVKAFAEPFYKPAKDGGKGALVKAVRVEDVQKTGVMVRKDRQGIARGIADNATMIRVDVFGKNGKNYLVPIYAWQIAKGILPNKAVVQGKDEADWDVMDESYAFKFTLYPNDLVEVISKKGRIFGYFGGLDRATGNINVKEHDMAKNKGKEGVHRSLGVKTVLSFQKYQIDPLGKEIRLCKAERRLELKNKK

SEQ ID NO: 7476 - protein, 1073 aa, synthetic construct
  REGION 1..1073: note = Synthetic
MENSTLQAQSIPAYVLGLDIGIASIGWACVAVDEKEQPYGLLDCGVRIFDAAENPKDGSSLNATRREKRALRRSIHRRALRMQRGKALCKKFGLLEASDFINKNEVTGLPNDTWELRVAGLTRQLNRKEWAAVLLHLLKHRGYLSQRKSEATTTDKELGKLLSGVAQNHQMLDEKAYQSCAELALNEFKGKWRNHSGDYSHTFNRLDLLAEIHTLFAKQRAFGNSFTDTEFEDTFCDLFMWQKPALSGDALLNMVGKCTFEKGEYRAAKHSYTAERFIMLGKLLNLRFSDNGGQRGLTQEECQQLLELAYKQTKVTYTQVKKALNLPEDTLFKGLPYGRAKTAEEIKKVEGRTFLEAKAYHQIRKAVEKVDKQAWELMKADAKLLDHIGTTFSLYKTDEDFTKQLEHVDLASEIKDSLMMELNFDKFINLSLKALYQILPYMEQGKRYDEACAAIYGDHYGKKLGQISTLLPPLNEEQKYQLTNPVVIRALSQARKVINAIIRKYGSPARVHIETGRDVGKSYKARRDIEKQQEKNRKERELAVKDFSENFPEFGGVPKGKDILKMRLYKAQDGKCLYSGKPLDLRRLNEKGYVEVDHALPFSRTWDDSMNNKVLVLAGENQNKGNKTPYEWLGHTDRWQDFVARVLNSHFSPMKKERILTKVLDEKGFIERNLNDTRYISKFLSQWIDDNLQLTGQGKRRVLMTNGQITSLLRARWGLHKVREENDRHHAMDAVVIACTTPSMQKRISDYSKRREMQLFGERKGKMIDESTGEISYIHFPTPWEYFYQDVNARVFSDNPQNTLQENVPDRAEILADFVTPLFVSRMPNRKVTGQGHLETIRGAKNYLTDKVSTIRKPLTSLKLKDLENMINKEREPVLYEALKARLTEFNDDGAKAFAEPFYKKGGQQVKSIKLQDKQNTGVLLNDGKAIADNGDMVRTDVFIKKGKYFLVPVYAWQVEKGILPMKACIAKKTEDEWEDMDETAEFQFSMYKNDLIEVLRKNKPTIIGYFNKLNRSSGCIDLILHDRDTSQIKDGIIESLGIKGAIAVKKLDVDILGKTISPCKKEKRSDFR

SEQ ID NO: 7477 - protein, 1070 aa, synthetic construct
  REGION 1..1070: note = Synthetic
ISHFRLKQLNYILGLDLGIASVGWAVVEIDTEENPTRLIDVGVRTFERAEVPKTGDSLAAARRQARSARRLIRRRTHRLLRARRLLKREGILHADDLNAEGLVKELPNTPWQLRVDGLDRKLMPKEWAAVLLHLVKHRGYLSQRKNESEGADKELGRLLAGVHENHQALQSSEYRTPAELAVKKFQAQSGHIRNQRGDYTHTFDRKDLQQELHQLFAAQQKYGNPFVSDGLKQGIETLLMQQRPALSGDAVQKMLGRCTFETEEFKAAKHTYSAERFIWLTKLNNLRIQENGNERCLTAQERGQIIDLPYKKAKLTYAQVRKELSLPENAFFKGLRYGKENAETAALMEMKAYHAIRKALEKAGLKTEWQGLACKPELLDAIGTVFSLYKTDEDISTRLQGQLSEDVINALLAGLNFDKFIQLSLKALSKILPLMEQGQRYDEAHAALYVRSTPQPQRLLPQITADEICNPVVLRTLSQARKVINAIVRRYGSPARIHIETGREVGKSFKDRQEIQKRQEDNHKERKQAAEKFLEYFPNFVGQPKAKDILKLRLYQHQHGQCLYSGKTLDICRLNEKGYAEIDHALPFSRTWDDSFNNKVLVLAGENQNKGNQTPYEWLGGASNSPRWQEFVARVGSSRFHHSKKQRILLRQLDEEGFKERNLNDTRYVARFLCKFIEENMLLLGRGKRRVFASNGQITSFLRSRWGLRKVREENDRHHALDAVVVACSTVAIQQRITYFVRQREMNIFDGELIDKETSEVSRPYFPQPWDFFRQEVMMRVFGKPDGDPSFPEADTKETLCTLLETRLSSRPQAVHEYVTPLFVSRAPTRKMSGQGHKETVKSAKLLHEGKSVLRVPLTQLKPNLLEKMVNRDREPQLYEALKERLAAYGNDPAKAFATEFRKKGGQLVKAVRVEDTQKSGVLLHKGTGVADNATMVRVDVFEKSGKYYLVPIYSWQVAQGILPNKAVIQGKDEKNWDEMDETYTFKFSMYPNDLVEINTGKQRLFGYYIGLDRATGAISIREHDLDNFKGKNGIYRVGVKTAISFKKYQTDELGKVVVPCRPKKRLPVR

SEQ ID NO: 7478 - protein, 1069 aa, synthetic construct
  REGION 1..1069: note = Synthetic
MPRYILGLDLGIASVGWALVSVDEDEHPVGLIDCGVRTFERAEVPKTGDSLALARRQARSVRRLIRRRAHRLLRLRRLLKREGVLAAADFDADGLVRDLPVDVWQLRAAGLDRKLEAKEWAAVLLHLVKHRGYLSQRKSEINETDKHSEQGRLLAGVAANSELLKQDAYRTPAELAVKHFAVQNGHMRNKGGDYSHTFNRQDLQKELRLLFEKQRSFGNPFAAAELEGKVEDLLMTQRSALQGEAVLKMLGKCTFEPSEYKAAKNTYSAERFVWLTKLNNLRILHNGEERPLEEAERKMLLDEPYKKAKFTYAQARKLLDLPADAVFKGLRYGKDSDGLKAESGALMEMKAYHKIRSVLEKAGLKTEWQGLATQPEWLDAVGTAFSLYKTDEDITAHLAEFKLPENVLNALLAGISFDKFIQLSLKALDKILPIMEVGKRYDEACAAVYGDHYGSKPVQISRLLPTIPADEVRNPVVFRTLTQARKVVNAIIRRYGSPQRVHIETARELGKSFRDRKEIEKRQEENRKERERAAADFKELFPNFAGEPKGRDILKLRLYKQQQCKCLYSGAEIDLRRLDDDGYVEIDHALPFSRTWDDSFNNKVLVLGSENQKKRNQTPYEYLDGASNSQRWREFQARVAACHFPYAKKQRIQTAKLDSKAEQGFLERNLNDTRYIARFLCHFIEENLHLEGRGKRRVFASNGQITSLLRGLWGLRKVREDNDRHHALDAVVVACSTVSMQQKITKAMQRRETLETVDTETGEVKPRIPQPWDFFRKEVTIRVFSDRPREELAKELNSRPQALHEYVTPLFVSRAPNRKMTGQGHLETVKSAKRLSENISVVKKPLTQLKLKDIEKIVGYEQAREPALYAALEARLRAHNDDPVKAFAEPFYKPAKDGRQGALVKAVRVEDVQKTGVMVRDGNGIADNATMVRVDVFGKNGKNYLVPVYAWQVAKGVLPNRAVVQGKDEADWEVMDESFAFKFSLYPNDLVEVITKKGRIFGYFASCHRGTGNINIRIHDLDSKIGKNGMLEGVGVKTALSFQKYQIDPLGKKIRLCKPEKRLELKNKK

SEQ ID NO: 7479 - protein, 1068 aa, synthetic construct
  REGION 1..1068: note = Synthetic
MTLRYILGLDLGIASVGWAVVEIDENGYPIRLIDLGVRAFEKAETAKEGKSLNEERRLARASRRLIRRRVQRLKQAKRLLKENGVLLPSDFISSQLQLPINTWQLRVKGLSEKLERQEWAVVLLHLIKHRGYLSQRKNEAQTENKELGAMLGGIAENQKLLQSAEFRTPAEIAVKKFVVEAKHIRNQRGSYAHTFNRLDILAEMQLLFQKQRELGNPFTSANFEKNMTACLMFQKPALSGEAILKMLGHCTFETDQYKAAKNSYSAERFVWLTKLNNLRILHEGEEFALTEEQRRSIIDEPYKKAKLTYAQVRNLLKLPETAIFKGVRYRQDKVAESATLMELKAWHAVRKALESNNLKTEWEELKTKPELLDEIGTAFSLYKTDDDIRAKLGDKLPEAVLECLLAQLNFDKFINLSLQSLAKILPLMEQGVRYDEACQQVYGDHYGSKTKQNEIFLPKILADEIRNPVVLRTLTQARKVINAVVRRYGSPDRVHIEIARELGKSFQDRQKFIKQQEENRKARERAGENFREIFPHFVGEPKYKDLLKLRLYKEQDGKCLYSGKALDLTRLLENGYVEVDHALPFSRTWDDSQNNKVLVLKAENQNKGNRTPFEWLGGVENSDRWKMFKVNVEMSAFSYAKKQRLLTQKLDEKGFKDRNLNDTRYISRFMMNWIADNMLLKGKGKRQVFAPNGQITALLRGRWGLTKNREESDRHHALDAVVVACATVSMQQKITRFMQYEAEHPYRQNLGRVDVETGEIIPLHFPAPWEYFREEVMIRVFSDVPKEDLTIQLPARLEANHEFVQPLFVSRMPTRKMTGQGHKETVRSAKRLEEKISIKRVALTELKLDLLENMANCEREVELYQALKERLNAFKNDPVKAFAEPFYKKGGQLVKAVRVEFLQKAGVLVHQGAGVTDNATMVRVDVFKKNGKFFLVPIYTWQVAKGILPNKAIYGSDEDNWLEIDESYQFLFPMYPNDLIKIVKQEGKLQNEYFGYYKELDRSDARIIISSHDRDIRKGNVKQKGSDKLTGKFRISTKSKVISFEKYEIDELGKNIHLCRYSKRPNVR

SEQ ID NO: 7480 - protein, 1067 aa, synthetic construct
  REGION 1..1067: note = Synthetic
MKTTTYRYILGLDLGIASVGWALVLVDENEHPIGLLDCGVRVFERAEMPKDGKSLAATRRQARSIRRLIRRRAHRLLRLRRLLKREGLLSAADFAADGLPAAMPVNTWQLRVEGLDRKLAEKEWAAVLLHLVKHRGYLSQRKNEMQTEDKELGKLLAGVAENRQLLADNPEQYRTPAELAVKRFAVQSGHLRNKGGDYAHTFNRLDLQKELHLLFAKQRGLGNPFASAELENKVDMLLMTQRAALQDGAVLKMLGHCTFEPQEYKAAKHTYSAESFIWLTRLNNLRILHNGEERALNEHERKLLLDEPYKKAKLTYKQVRKILDLPDSAVFKGLRYGKSEDGLKAESGALMEMKAYHKIRTVLEKAGLKGEWENRIRNPEVLDAIGTAFSLYKTDNDIQTALADLALPEKVLEALLKGIGFDKFIQLSLSALRKILPLMEQGLRYDEACTKVYGNHYGAKIQQNSLVLPVIDGNDIRNPVVLRTLTQARKVVNAVIRRYGSPLRVHIETARELGKSWDDRKEIEKRQEENRKERERAADEFKEYFPHFAGEPKGRDILKMRLYNQQQGKCLYSGLPLDLGSLNKTGYVEIDHALPFSRTWDDSFNNKVLVLGSENQKKRNQTPYEYLDGASNSERWREFQARVAGCHFPYAKKQRIQTAKLNEQDFIDRNLNDTRYIARFLCGFIENNLHLEGKGERRVFASNGQITALLRGLWGLRKVREENDRHHALDAVVVACSTVSMQQKITEAMKRRESLETVNTETGEVKQRIPQPWDFFRQEVMIRVFSDHPREELAEKLNSRPQALHEHVAPLFVSRAPNRKTTGQGHLETIKSAKRLSENISVVKKPLASLKTKDIENIAGYTANREPEFYQALKKRLAEFNDDPKKAFAEPFYKPTKNGEQGPLVKSVRVEDDRVKVGLAVRHGITDTNGDMVRADVYQKANKSGRIQYFVVPVYAWQIAKGVLPLLDCRGYKIDETYTFCFSLHKYDLISFPKDGNPEEEQLVYYITCDSSNGRFWIASHDKGAKEQQFRISTQNQLFIKKYQTDPLGKEIRLCKPEQRPALKIKR

SEQ ID NO: 7481 - protein, 1062 aa, synthetic construct
  REGION 1..1062: note = Synthetic
MNLNYILGLDLGIASVGWAVVEIDEQENPQRLIDVGVRTFDRAEVLKTGESLALARRLARSSRRLVKRRAERIKKAKRLLKAENLLLSADEILPNEAWQLRVKGLDQKLERQEWAAVLLHLLKHRGYLSQRKNESKSENKELGALLSGVAINHQILQSAEYRTPAEIAVNKFQAEEGHIRNQRGAYTHTFSRLDLLAEMELLFQRQATLGNPHTSTKLLENLTALLMWQKPALAGEAILKMLGKCTFEPTEYKAAKNSYSAERFVWLTKLNNLRILEQGAERALTDNERFALLDQPYEKAKLTYAQVRTLLGLSDEAIFKGLRYQGEDKKAVETKTTLMEVKAYHQIRKALEGLDLKAEWNELKNNPALLDEIGTAFSLYKTDDDIHRYLDGKLSESVLNALLENLNFDKFIQLSLKALQQILPLMLQGQRYDEAVSAIYGDHYGKKSDEIDRLLPNIPTDEIRNPVVLRTLTQARKVINAVVRLYGSPARIHIETGREVGKSYQDRKKLEKQQEENRKQRENAVKKFKEYFPNFVGEPKGKDILKMRLYELQQAKCLYSGKSLELYRLLEKGYVEVDHALPFSRTWDDSFNNKVLVLANENQNKGNATPYEWLDGKNNSEGWQHFVARVQTSGFSYAKKQRVLIQELDEKSFIERNLNDTRYVARFLCNHIADNMLLTGKGKRKVFASNGQITALLRGCWGLQKVRENNDRHHALDAVVVACSTKSMQDKITKFVKYKEGRLFKDKKDGVYKGERINRETGEIISLHFPTPWKFFKENVEIRIFSENPKLELENRLPDYPQYNHEFVQPLFVSRMPTRKMTGQGHMETVKSAKRLDKGLSVLKVPLTQLKLSDLERMVNREREMALYEALKECLEQFGNDPAKAFAEPFYKKGGALVKAVRVEQTQKSGVLVRNGNGVADNATGSIVRVDVFTKGGKYFLVPIYTWQVAKGILPNKAVIQGKDESEWEEMDENAVFQFSMHKNDLIKVKTKKGEIFGYFNGLDRATGSIEIEEHDLEKSKGKNGSHRGLGVKTAFFLEKYQVDELGKNIRPCRPTKRQHVR

SEQ ID NO: 7482 - protein, 1060 aa, synthetic construct
  REGION 1..1060: note = Synthetic
MAAKSLNYILGLDLGIASCGWAVVEMDEQENPLRLIDVGVRTFEEAENPKDGSSLAETRRLARAQRRLISRRANRMNKLCRLLKQENVLQANDYDEKGLIIGLPNQAWELRAQGLDRKLEPKEWAAVLIHLVKHRGYLSQRKNESQTADKELGALLSGMNHNHQLLQSQSNQYRTPAELAIKQFATQDGHIRNQRGAYTHTFNRLDLQNELNQLFDAQTRLGNPHVSGSLKTAINDLLMNQKAALSGDAILEMLGRCTFEPSEYKAAKNTYSAERFVWLGKLTNLRIQDNGLESALSREQRELLLNEPYNKTKLTYQQVRKLLRLPETAFFKGLRYGKDNAESATFMEMKSYHAIRKSLENKSLKSEWEKLKTQPKLLDLIGTAFSIYKTDDEIAGCLKNQLPENVIIALQGQLNFSNFMELSLKALEKLLPLMEQGLRYDEACTQIYGNRHEKIADKTEKFLPNIPADKLRNPVVLRTLTQARKVINAIIRRYGSPARVHIETGREVGKSFSDRDKLKKQQEENQEQRRRAIDEWKQFFPNAAHEPKAVDILKLRLYQLQQGKCLYSGLPIDVRRLPEKGYVEIDHALPFSRTWDDSFNNKILVLASENQNKGNQTPYEYLRGADNSESWRLFVENVQNCQFSPNKKQKIMAKQLDEKGFLERNLNDTRYVSRFLCQFISEHLHLTGKGKKRVFASNGQITALLRGRWGLSKNREENDRHHAVDAVVVACSTVAMQQKITQFVRYQKGNVFTGERIDKETGEVISIHFPTPWEHFREEVMIRVFDDNPLRTLPEKLPNRPEALHEYVMPLFVSRMPTRKMTGQGHKETIKSAKRLDEKISVLRVPLTQLKLNDLENMVNREREPALYEALKARLEQFKNDPAKAFAEPFFKQGGQQVKAVRVEIVQKSGMLLRKINGVADNGSMVRVDVFEKSGKFYLVPIYAWQVAEGILPNYAVVAHKDESDWILMDESYHFKFALYKNDLLEVQTKKGGIMGYFASLDRATGAITIREHDRDKKKCKDGEHRSIGVKMASSFKKLQVDELGKNIHETRSRKRPNIG

SEQ ID NO: 7483 - protein, 1059 aa, synthetic construct
  REGION 1..1059: note = Synthetic
MQHLNYILGLDLGIASVGWSVVEIDKEENPTRLIDLGVRTFERAEVPKTGESLALSRRLARSTRRLIARRANRLLKAKCLLKQENLLLPEDFIDRRTLKPLPNNVWQLRVAGLERKLERLEWAAVLLHLLKRRGYLSQRKNESQGADKEKGALLSGIATNSELLAQADYRTPAELALKKFYEEEGHIRNQRGAYTHTFSRLSLLDELQQLFAQQRQLGNPFTSQHLEEQLSELLLWQKPALSGEAILKMLGKCTLEPEHYKAAKNTYSAERFVWLTKLNNLRLQENGSERALTDAERHLLLEQPYQKAKLTYAQVRSILDLPDTTIFKGLRYQLNAESDAEKATLMELKAWHTIRKVLEKAGLETEWQGLKTKPELLDQIGTAFSLYKTDEDISAHLDGKLPPAVLEALLGGLNFDKFIQLSLQSLGKILPLMEKGLRYDEACQQVYGDHLGKREQKNHQLLPAIPAEEIRNPVVLRTLSQARKVINAIVRLYGSPARVHIETGREVGKSFDERRKIEKNQLENQAKRQQAVQKFKEFFPDFVGEPKAKDILALRLYEEQQGKCLYSGKALDLHRLREKGYVEIDHALPFSRTWDDSFNNKVLVLAGENQAKGNKTPYEWLDGEANSERWRLFVALVSGSRFSYTKKQRILTKKLDDEGFIQRNLNDTRYVARFLMNFIEEQMALTGQGKKRVFASNGQITALLRGRWGLSKVREENDRHHALDAVVVACTTRAMQKKITDFVRYKEMNAFSGEHIDRTTGEIQTIHFPEPWAYFRNEVMIRVFDEDPQTALSHLLPSRPQAQHKFVAPLFVSRSPNRKMTGQGHMETVKSAKRLSEGVSVQRVPLTALKLKDLESMVNREREPALYQALKDRLEAFKDDPAKAFAQPFFKAGGQEVKAVRVERVQKSGVLVRQNKGVADNASMVRVDVFEKAGKFYLVPIYTWQVAEGILPNRAIIQGKDESEWEEITEAHTFKFSLFANDLVKLTTKKGITFGYYAGLDRATGNITIREHDLEKSKGKNGEYRSLGVKTALSFEKYQVDPLGKNIRPCKTTKRQGVK

SEQ ID NO: 7484 - protein, 1059 aa, synthetic construct
  REGION 1..1059: note = Synthetic
IQMKPLNYILGLDLGIASVGWAVVEIDQNENPLRLIDLGVRTFERAEVPKTGDSLALARRLARSGRRLVKRRAFRLLKAKRLLKQSGVLSAGDFISASTLKPLPNNPWELRVQGLTKRLNRTEWAAVLLHLLKHRGYLSQRKNESKTDNKEFGALLKGVSENRQLLQNHQYATPAEIAIKKFQQEEGHIRNKRGAYSHTFDRKDLLAELTALFQAQRTLGNIYTDKSLEQAFAELLMWQKPALAGEAILKMLGKCTFESTEYKAPKNSYSAEYFVWLTKLNNLRILENGSERALTVDERNQLINQPFEKAKLTYAQVRKLLELSDFAIFKGLRYGKENAENTTLMEMKAWHAIRKALESNGLKTEWDGLKTKPDLLDKIGVAFSIYKTDEDISQYLDGELSPVVLNALLENLNFNKFIQLSLLSLSKILPRMEQGLRYDEACKQVYGDHYGHKENKELRFLPQIPAAEIRNPVVLRTLSQARKVINGVVRLYGSPARVHIETGREVGKSISERHDITKRQEENRNERERAVQKFKEFFPDFAGEPKAKDILKIRLYEQQHGKCLYSGKALDVNRLLEKGYVEVDHTLPFSRTWDDSFNNKVLVLANENQNKGKQTPYEWLHGADNSDAWREFLARVNGSRFSYHKKQKILTKKLDDEGFKERNLNDTRYVARFLCGFIEENMLLLGKGKKRVFASNGQITALLRHRWGLKKVREDNDRHHAVDAIVVACSTYSLQKKITDYVRYKEMNVFSGESIDRETGEVITLHFPQPWRYFRQEVEIRVFSETPAEDMVIALPDRPEANHEFIQPLFVSRAPTRKMSGQGHMETIKSAKRLDEGLSVSRVPLTQLKLKDLDNMVNREREKALYEALKARLEQANNDPAKAFAEPFYKKGGQPVKAVRVEQVQKSGVLVRQENGVADNASMVRVDVFIKGGKYFLVPIYTWQVAKGILPNKAVVAKRDEEEWEVMDEKAQFQFALYPNDLVEVVTKKERFFGYYAGLDRATGAINVKEHDLESSKGKAGLHRGIGVKTAISVQKYQVDELGKNIRPCRRMKQRPPVR

SEQ ID NO: 7485 - protein, 1059 aa, synthetic construct
  REGION 1..1059: note = Synthetic
MSTMSYILGLDLGVASVGWSVIEIDENEMPIRLVDLGVRTFEKAEVPKTGESLAKSRREARSIRRLIARRVRRLLLAKKALLEEGILTQNDFLTKSIIKDLPINAWELRAKGLDHKLTSKEWATVLLHLVKHRGYLSQRKNESDTADKQLGALLSGVKENHTLLQENKYRTPAELAICKFEKEEGHIRNQNGEYIHTFDRLDLQAELHLLFEKQRQFNNPYASAKLEEKMDYLLMYQKPALSGEAILKMLGKCSFETQEYKCAKNTYSAERFIWLTKLNNLRILTQGSERGLTESERALLLNQPYQKAKLTYTQVRNILELSESEIFKGLRYGNVEDKKMIEKETLMELKAFHQIRKVLEKANLKTEWQGLATKPELLDEIGTIFSLYKTDADITAQLQDKISAPILNALLSGINFDKFINLSLVALSKILPLMEQGQRYDEACTSIYGDHYGVKTKEEHLFLPSIDKDEIRNPVVLRCLSQTRKIINAVIRLYGSPARIHIETGREVGKSFKERQKIEKNQLENKAKKERAIKEFKDLFPYFIGEPKSKDILKMRLYNEQQGKCLYSGKTIDINRLLEKGYVEIDHALPFSRTWDDSFNNKVLVLANENQNKANQTPYEWFDGKNNTTKWQQFVALVWGSHFNYHKKQHLLLKNLPEGFMKRNLNDTRYVARYLMNFINDHIQLTGKGKRRVFASNGQITALLRARWGLMKVRGDNDRHHALDAIVVACTTPSMQNKITDFVRSKEMNIFSGEFIDRNTGEIKQIHFPEPWNYFRNEVMIRVFSHDPLLELEQQLPSRPEARHQYVTPLFVSRMPTRKMTGQGHLETIKSAKRLAENESVQRIALTSLKLNTLENMANKDKEKALYQALKERLEQFNNDPVKAFAEPFYKKGGQQVKKIRVKQIQKTGVIVHQGNGVADNASMVRVDVFEKANKFYLVPIYTWQVAKGILPNKAAIANKNEDEWQEMDESFTFKFSIHPNDLIKVTTKKEVYFGYYVAMDRHTAAINIREPDLERSKGKDGLHRGIGVKTALSFEKYDIDPLGKNIRPCQPKARQPIR

SEQ ID NO: 7486 - protein, 1058 aa, synthetic construct
  REGION 1..1058: note = Synthetic
MQTTNLSYILGLDLGIASVGWAVVEINENEDPIGLIDVGVRIFERAEVPKTGESLALSRRLARSTRRLIRRRAHRLLLAKRFLKREGILSTIDLEKGLPNQAWELRVAGLERRLSAIEWGAVLLHLIKHRGYLSKRKNESQTNNKELGALLSGVAQNHQLLQSDDYRTPAELALKKFAKEEGHIRNQRGAYTHTFNRLDLLAELNLLFAQQHQFGNPHCKEHIQQYMTELLMWQKPALSGEAILKMLGKCTHEKNEFKAAKHTYSAERFVWLTKLNNLRILEDGAERALNEEERQLLINHPYEKSKLTYAQVRKLLGLSEQAIFKHLRYSKESAESATFMELKAWHAIRKALENQGLKDTWQDLAKKPDLLDEIGTAFSLYKTDEDIQQYLEGKLPDSVINALLVSLNFDKFIELSLKSLRKILPLMEQGKRYDQACHEIYGHHYGEKNQQISQLLPVIPTQEIRNPVVLRTLSQARKVINAIIRQYGSPARVHIETGRELGKSFKERREIQKQQEDNRTKRESAVQKFKELFSDFSSEPKSKDILKFRLYEQQHGKCLYSGKEINIHRLNEKGYVEIDHALPFSRTWDDSFNNKVLVLASENQNKGNQTPYEWLQGKINSERWKNFVALVLGSQCSAAKKQRLLTQVIDDNKFIDRNLNDTRYIARFLSNYIQENLLLVGKNKKNVFTPNGQITALLRSRWGLIKVRENNDRHHALDAIVVACATPSMQQKITRFIRFKEVHPYKIENRYEMVDQESGEIISPHFPEPWAYFRQEVNIRVFDNHPDTVLKEMLPDRPQANHQFVQPLFVSRAPTRKMSGQGHMETIKSAKRLAEGISVLRIPLTQLKPNLLENMVNKEREPALYVGLKARLAEFNQDPAKAFATPFYKQGGQQVKAIRVELVQKSGVLVRQGNGVADNAPGSIVRTDVFIKNNKFFLVPIYTWQVAKGILPNKAIVAHKNEDEWEEMDEGAKFKFSIFPNDLIELRTKTECFLGYYIGPDRHNGSISLREHDSEISKGNAGVYRVGVKLALSLEKYHIDELGKNRRICRPHQRRPVR

SEQ ID NO: 7487 - protein, 1058 aa, synthetic construct
  REGION 1..1058: note = Synthetic
MNNSTLNYILGLDIGIASVGWAVVEIDGEENPIGLIDVGVRTFERAEVPKTGESLALARRLKRGTRRLIRRRAFRLLKAKRLLKQEGILTQDDFESSRVIKSLPHNTWELRVKGLTQLLSNKEWAAVLLHLLKHRGYLSQRKNETKTDNKELGALLSGVHSNHQLLAEKNYRTPAELALKHFYEEEGHIRNQRGAYTHTFGRLDLKQELRQLFNAQRELGNPHTSNELEQAFTELLMWQKPALSGEAILKMLGKCTLEKEEYKAAKNTYSAEYFVWLTKLNNLRILENGSERALSQEERAILIEQPYLKAKLTYTQVRKLLGLSDQAHFKGLSYRKDNAENTTLMEMKAWHAIRKALESNGLKTEWEGLKTQPDLLDKIGTAFSLYKTDEDITQYLNGCLSTDVLNTLLEHLNFDRFIHLSLQSLSKILPLMEQGLRYDEACKQVYGDHYGAKEQQEERYLPVIPADEIRNPVVLRSLSQARKIINGVVRLYGSPCRIHIETGREVGKSYKDRKEIEKRQNENQADKLRAIAHFKELFPNFVGEPKAKDILKMRLYEQQHGKCLYSGKGLDLNRLLEKGYVEIDHALPFSRTWDDSFNNKVLVLAGENQNKGNKTPYEWLDGKADTEQWKHFVSLVLGSYFSQKKKHRLLTKELDEKGFKEKNLNDTRYVARFLCNYIAENMLLTGKGKRRVFASNGQITSLLRHRWGMSKSREENDRHHAIDAIVVACSTVAMQKKITDFVRRKEMDVFSGEMVDKSTGEIQWIHFPEPWKYFRQEAEIRVFSDNPQEDLVIRLPDRPQANHQFVQPLFVSRAPTRKVTGQGHMETVKSAKRINEGISVIKVPLTQLKLKELENMVNREREQALYESLKEQLMQYNDDPNKAFAEPFYKKGGQQVKSVRVEQLQKTGVLVHNETGVADNASMVRVDVFKKKGKYFLVPIYTWQVAKGILPNKAVIQRKSEDEWEEMDETAEFQFSLFANDLIKVTTKKNAILGYFGGLDRATGNISIKEHDLNKNVVKNGIHTSVGVKLIPNFEKYQVDELGKNIRPCRKSKRLGVR

SEQ ID NO: 7488 - protein, 1058 aa, synthetic construct
  REGION 1..1058: note = Synthetic
MRVTQLNYILGLDLGIASVGWAVVEIDENEHPVRLIDVGVRTFERAEVPKTGESLALNRRLARSARRLTYRRKFRLLKAKRLLKKAGVLQETDFISSTTLAHMPNNPWELRLKALNQQLSPKEWAAVLLYLLKHRGYLSQRKNEQKTEDKELGALLSGVQTNHQLLQANDYRSPAELAINYFKEKDGHIRNQRGAYTHTFNRLDLRNELILLFEKQAELGNPYTSEELKCAFIELLMWQKPALSGDAILKMLGKCPFETDQYKAAKYSYSAEYFVWLTKLNNLRILENGAERSLTADKRQLLLNQPFEKAKFTYAQARKLLELNEHAIFKQLRYVKDNPENTTLMEMKGYHAMRKALESVGLKTEWAELKTKPELLDTIATAFSIYKTDDEITAYLADKLPQTVIDALLKNLSFDQFIQLSLQALHKILPLMEQGWRYDAACAEVYGAHYGKQDKQENITLPVIPADEIRNPVVLRTLSQARKVINGIIRVYGSPARVHIETAREVGKSFKDRRAMEKHQQENRNEKERAVRKFKEYFPEFVGEPKAKDILKLRLYEQQHGKCLYSGKEIELHRLLEQSYVEIDHALPFSRTWDDSFNNKVLVLANQNQDKGNQTPYEWFQGKDHSEKWKYFVALVNGSRFSFKKKQRILTQQLDEQGFIERNLNDTRYIARFLCQFINNNLLLKGKGKNRVFASNGSITALLRHRWGLFKDRDANDRHHAIDAIVVACSTVSMQQKITRFVRYKEGNVTTGEKIDRHTGEVISLHFPEPWQYFRQDVVCRVFDNDPKTALAKLLPNRPEANHDYVQPLFVSRAPTRKISGQGHMETIKSAKRLEEKISVSRVPLTQLKLKELALMVNREREVALYEALKARLELYKDDPVKAFEQPFYKKGGQQVKSVRVEKVQKSGVIVRQGKGVADNASIVRTDVFQKDGKFFLVPIYTWQVAKGILPNKAVVANKDESEWEEMDEKSIFKFSLFPNDLIKLTTKKEVFFGYYAGLNRHTGGINIKVHDMENTKGKRGVYEGLGVKVAISFEKYQVDELGKNIRPCKPSKRQPVR

SEQ ID NO: 7489 - protein, 1056 aa, synthetic construct
  REGION 1..1056: note = Synthetic
MQPVNNQLNYILGLDLGIASVGWAVVEIDDDENPTRLIDVGVRTFERAEVPKTGESLALSRRLARSTRRLIRRRAYRLLLAKRLFKREGMLTQADLDKGLPCQIWQLRLEGLERKLSAIEWSAVLLHLLKHRGYLSQRKNESKTDNKELGALLSGVNQNHQLLQSESYRTPAELAVRKFAEEEGHIRNQRGSYTHTFNRLDLLNELNLLFTIQRELGNPYTTEVLQQRIVDLLMWQKPALSGEAILKMLGKCTFEPSEYKAAKSTYSAERFVWLTKLNNLRILENGTERSLTNDERLLLINQPYEKAKLTYAQVKKILELPEQAIFKNLNYIKEDVESKTTLMELKAWHAIRKVLESNGLKTEWKGLASKPELLDEIGTAFSVYKTDEDITKYLENKLSSSVLSVLLANLNFDKFIQLSLKSLQKILPLMEQGKRYDEACSEVYGDHYGTTIQKEHIFLPPISADEIRNPVVLRTLSQARKVINGIVRMYGSPARVHIETARELGKSFKERNEIKKRQEENRSERERAVQKFKEYFPDFFNEPKAKDIVKLRLYEQQHGKCLYSGKELDIKRLNEKGYVEIDHVLPFSRTWDDSFNNKVLVLANENQDKSNQTPYEWLGGKENSLRWKNFIALVMGSRFSHGKKQRILTQKLDEKGFIERNLNDTRYVARFLFNYISNNMKLLGKGKRRVFASNGQITALLRSRWGLSKVREENDRHHALDAIVVACSTVSMQQKITRFVRFYEMDPFTGERIDKETGEVISLHFPEPWKYFRQDVNIRVFDDNPKIALERMLPDRPEANHEFVQPLFVSRAPTRKMTGQGHMETIKSAKRLSEGVSVLKVPLTQLKLNLLENMVNREREIELYNRLRMRLAEFNNDPLKAFEQPFYKKGGQLVKSVRVEQVQKSGVLVRENTGVADNASMVRVDVFEKKGKFFLVPIYTWQVAKGILPNKAVVAYKDEKDWEDIDESFIFKFSLYPNDLIRLVTKKKVFLGYYSGMNRAVASINIREHDLDIQKGKNGEHLSVGVKLALSFEKYQVDELGKNIRMCRTTKRQQVR

SEQ ID NO: 7490 - protein, 1056 aa, synthetic construct
  REGION 1..1056: note = Synthetic
MKPLNYILGLDLGIASVGWAVVEIDQNEFPIRLIDVGVRTFERAEVPKTGDSLALARRLARSSRRLVRRRAVRLLKAKRLLKQEGILQADDFHSSHLKPLPNNPWELRVKGLNHLLDRKEWAAVLLHLLKHRGYLSQRKNESKTDNKELGALLKGVSENRQLLQTQAFSTPAEIAIKKFQQEEGHIRNQRGAYSHTFDRNDLLAELRLLFQKQREFNNPYTSQSLEQAIAELLMWQKPALSGEAILKMLGKCTFEPTEYKAPKNSYSAEYFVWLTKLNNLRILENGSERGLTAEERQLLINQPFEKAKFTYAQARKLLGLSDLAIFKGVRYGKDNAESATLMEMKAWHAIRKALESNGLKTEWDGLKTKPELLDKIGTAFSIYKTDEEISQYLNSELSPAVLNVLLENLNFDKFMQLSLQSLAKILPLMEQGLRYDEACKQVYGDHYGKKEQLELLFLPKIPVEDIRNPVVLRTLSQARKVINGVVRLYGSPARIHIETGREVGKSYSERKDITKRQEENRNERQRAVEKFKEFFPNFVGEPKAKDILKMRLYEQQHGKCLYSGKELDLNRLLEKGYVEIDHALPFSRTWDDSFNNKVLVLANENQNKGNQTPYEWLNGKENSERWKLFQALVNGSRFPYSKKQRILTKYLDEEGFRERNLNDTCYVARFLCNFIEDNMQLIGQGKKRVFASNGQITALLRRSWGIQKVREDNDRHHAVDAVVVACSTRALQKKITDYVRYKEMNVFTGEKIDQETGEIIQFHFPEPWKFFRQEVEIRVFSETPAEDVVIALPDRPQANHEFIQPLFVSRAPTRKMTGQGHMETIKSAKRLAEGLSVSRVPLTQLKLKDLENMVNREREKALYEALKARLEKFNNDPAKAFAEPFYKKGGQQVKAVRVEQVQKSGVLVRQENGVADNASMVRVDVFIKGGKYFLVPIYTWQVAKGILPNRAVVANKDENEWEEMDEKSQFQFALYPNDLVEVVTKKEKFFGYYCGLNRHTGGINIRTHDLNNNQGKKGVFEGVGVKIALSFTKYQVDELGKNIRPCRPMKKRPPVR

SEQ ID NO: 7491 - protein, 1055 aa, synthetic construct
  REGION 1..1055: note = Synthetic
MKTSLLNYVLGLDLGIASVGWAVVEIDEQENPQRLIDVGVRTFERAEVPKTGESLALARRLARSSRRLVKRRAQRIKKAKRLLKAENLLLSIDEQLPNDVWQLRVKGLDQKLERQEWAAVLLHLLKHRGYLSQRKNESKSENKELGALLSGVATNHQILKDSKYRTPAEIAVNKFQVEDGHIRNQRGAYTHTFSRLDLLAEMELLFTRQSELGNLNTSAKLLDNLTALLMWQKPALAGEAILKMLGKCTFEPTEYKAAKNSYSAERFVWLTKLNNLRILENGIERALTDNERLTLLEQPYEKAKLTYSQARTMLTLSDDAIFKGVRYQGEDKKTVETKTTLMEMKAYHQIRKALEGADLKIEWQTLKHNTGLLDEIGTAFSLYKTDEDICRYLEGKLSESMLNALLENLNFDKFIQLSLKALQQILPLMLQGQRYDEAVSAIYGDHYGKKSEEIHRLLPNIPADEIRNPVVLRTLTQARKVINAVVRLYGTPARIHIETGREVGKSYQDRKKLEKQQEDNRKQRENAVKKFKEYFPNFVGEPKGKDILKIRLYELQQAKCLYSGKPLELHRLLEKGYVEVDHALPFSRTWDDSFNNKVLVLANQNQNKGNLTPYEWLDGKNNSVQWQHFVARVQTSGFSYTKKQRILSHKLDDKGFIERNLNDTRYVARFLCNFIADNMLLTGKGKRKVFASNGQITALLRARWGLQKVRDDNDRHHALDAVVVTCSTVAMQQKITRFVKYEEGNIFSGERVDRETGEIIPLHFPTPWAFFKENVEIRIFSENPKLELENRLPDYPQYNHEFVQPLFVSRMPTRKMTGQGHMETIKSAKRLSEGLSILKVPLTQLKLNDLERMVNREREIGLYETLKARLEQFGNDPMKAFAEPFYKKGGTLVKAIRVEQTQKSGVLVRDGNGVADNASMVRVDVFTKGGKYFLVPIYTWQVAKGILPDRAVVANTPEDEWELMDESSQFLFSMYSNDLIKLKTKKTEILGYFNGLNRATAAIDIKEHDLEKSKGKNGIHQSVGVKLALSLEKYQVDELGKNIRPCRPTKRQNVR

SEQ ID NO: 7492 - protein, 1055 aa, synthetic construct
  REGION 1..1055: note = Synthetic
MENKNLHYILGLDLGIASVGWAVVEIDEKENPLRLIDVGVRTFERAEVPKTGESLALSRRLARSARRLTQRRVARLKKAKRLLKSENILLFTDERLPHQVWQLRVEGLDRKLERQEWAAVLLHLIKHRGYLSQRKNESKSENKELGALLNGVDNNHKLLQQATYRTPAELAVKKFEIEEGHIRNQQGAYTHTFSRLDLLAEMELLFSRQQHFGNPFASEKLLENLTALLMWQKPALSGDAILKRLGKCTFEDEYKAAKNTYTAERFVWITKLNNLRIQENGLERALSDNERLMLIEQPYEKAKLTYAQVRSILNLSDEAIFKGVRYFGEDKKAIEIKTILMEMKGYHQICNALKGNNLKAEWAELKENPALLDEIGTAFSLYKTDEDISAYLAGKLSQPVLNALLLKNLSFDKFIQLSLKALYKLLPLMQQGLRYDEACCEIYGDHYGKKTEETHHFLPQIPADEIRNPVVLRTLTQARKVINGVVRLYGSPARIHIETGREVGKSYKDRRELEKRQEENRKQRENAIKEFKEYFPHFAGEPKAKDILKMRLYKQQNAKCLYSGKPIELHRLLEKGYVEVDHALPFSRTWDDSFNNKVLVLANENQNKGNLTPFEWLDGKHNSERWRAFKALVETSAFPYAKKQRILSQKLDEKGFIERNLNDTRYVARFLCNFIADNMRLTGEGKRKVFASNGQITALLRGRWGLAKSREDNDRHHALDAVVVACSTVAMQQKITRFVRFEAGDVFTGERIDRETGEIIPLHFPTPWQFFKQEVEIRIFSDNPKLELKNKLPDRPQANHEFVQPLFVSRMPTRKMTGQGHMETVKSAKRLNEGISVIKMPLTKLKLKDLELMVNREREKDLYDALKARLEAFNDDPAKAFAEPFMKKGGAIVKSVRVEQVQKSGVLVREGNGVADNASMVRVDVFTKDGKYFLVPIYTWQVAKGILPNKAIVALKDENEWIEIDNNYIFLFSLYQNDLIKVKTKKDKFWGYFNGLNRHTGGINIRTHDLEKSKGKQGIFEGIGVKTALSFEKYQVDELGKNIRLCKPSKRQAVR

SEQ ID NO: 7493 - protein, 1054 aa, synthetic construct
  REGION 1..1054: note = Synthetic
MKLTPLNYILGLDLGIASVGWAVVEIDEQENPLGLIDVGVRTFDRAEVPKTGESLALARRLARSARRLVKRRADRIKKAKRLLKAENILLSADEHLPNDVWQLRVKGLDQKLERQEWAAVLLHLLKHRGYLSQRKNESKSENKELGALLSGVETNHQILQSAEYRTPAEIAVKKFHVEDGHIRNQRGAYTHTFSRLDLLAEMELLFQRQTDLGNPHTSAKLLENLTALLMWQKPALAGEAILKMLGKCTFEPTEYKAAKNSYSAERFVWLTKLNNLRILEQGAERALTDNERFALLDQPYEKAKFTYAQARTMLALPDEAIFKGVRYQGEDKKAVETKTILMEMKAYHQIRKALENADLKAEWNELKNNSELLDDIGTAFSLHKTDEDICRYLDGKLSESILNALLENLNFDKFIQLSLKALQQILPLMLQGQRYDEAVSAIYGDHYGKKSAEINRLLPTIPADEIRNPVVLRTLTQARKVINAVVRLYGSPARIHIETGREVGKSYQDRKKLEKQQEDNRKQRESAVKKFKEYFPNFVGEPKGKDILKMRLYELQQAKCLYSGKSLELHRLLEKGYVEVDHALPFSRTWDDSFNNKVLVLANENQNKGNLTPYEWLDGKNNSEHWQNFVARVQTSGFSHTKKQRILSHKLDEKGFIERNLNDTRYVARFLCNFIADNMLLTGKGKRKVFASNGQITALLRGRWGLQKVRDDNDRHHALDAVVVACSTVVMQQKITRFVRYEEGNVFSGERIDRETGEIIPLHFPSPWAFFRENVEIRIFSENPKLELENRLPDYPQYNHEFVQPLFVSRMPTRKMTGQGHMETVKSAKRLDEGLSVLKVPLTQLKLSDLERMVNREREVTLYESLKARLEQFGNDPAKAFAEPFHKKGGAVVKAVRVEQTQKSGVLVRDGNGVADNASMVRVDVFTKGGKYFLVPIYTWQVAKGILPNKAVTANVDEIDWLEMDESYQFIFTMYPNDLVKVKLKKEEFFGYYGGLDRATGAIVIKEHDLEKSKGKQGIYRIGVKLALSFEKYQVDELGKNIRPCRPTKRQHVR

SEQ ID NO: 7494 - protein, 1047 aa, synthetic construct
  REGION 1..1047: note = Synthetic
MKQLHYILGLDLGIASIGWAIVEIDEDGFPIRLIDVGVRTFDKAEVAKTGESLALARRLARSTRRLIRRRAFRLLKGKRLLKQYNIISKEELAKLPIDCWALRVKSLDERLSPREWSAVLLHLLKHRGYLSQRKNEAKSADKEMGALLSGVKDNHQLLIENQFRTPAEIAVKKFALEEGHIRNQRGAYTHTFDRKDLLAEMQLLFQTQRELGNPHTSGQLEQEFCNLLMWQKPALSGDAILKMLGKCTFETNKYKAAKHSYTAERFVWLTKLNNLRILENGSERALNLEERTLLLNQPYEKAKLTYTQVRKLLGLSEEARFNGVRYGKEKAEDATLIELKAYHAIRKAVEKADKSAWETLKNQTALLDEIGTTFSIYKTDNDITEQLNGKLSETVLNALLENLNFDQFIQLSLKSLYKIVPLMEQGLRYDEACQQIYGDHFGKKSGEINRLLPPIPADEIRNPVVLRSLSQARKVINAVIRLYGSPARIHIETARELGKSYKDRKEIEKRQEQNRTEREKAILSFKERFPHILAEPKAKDILALRLYDQQNGQCLYSGKALDLHRLLEKGYVEIDHALPFSRTWDDSQNNKVLVLAGENQNKGNQTPFEWLSKDEQRWALFIARVNGCRFPYAKKQRILTQKLDEQGFIERNLNDTRYIARFLVNFVRDNLHLTGKGKNRVFASNGQITAFLRGRWGLTKVREESDRHHALDAVVVACSTVAMQQKITRFVKYQEGNLKTAERIDYETGEIIPLHFPEPWHFFRQEVMIRIFSENPQEDLIIQLPDRPEANHEFVQPLFVSRMPTRKMSGPGHMETIKSAKRLAEGVSVSKVPLTQLKLKDLENMVNREREKDLYEALKARLTEFKDDPSKAFTEPFYKNGGQQVKAVRVEQVQKSGVVVRNGNGVADNASMVRVDVFIKGGKYFLVPIYTWQVAKGILPNRAVIQGKHEDEWEIMDETAQFLFSMFPNDLIQVKTKKETFFGYYNGLDRATGAINLKEPDSNINKGKSGLHRGIGVKTALSFEKYQVDELGKNIRPCRPSKRQGVR

SEQ ID NO: 7495 - protein, 1009 aa, synthetic construct
  REGION 1..1009: note = Synthetic
MRRRIRRRAFRLLRLRRYLKRIGLLTKQDFDEHGLIKDLPINPWQLRVLGLERSLAPKEWAAVLLHLVKHRGYLSQRKNEINDKELGRLLAGVQANHDELQSKKYRTAAELALNKLAVESGHVRNKGGDYSHTFSRLDLQEELHLLFEKQRAFGNPWTSIEFEQKVDELLMKQRGALQGEAILKMLGKCIYEIDQYKAAKHTYSAERFVWLTKLNNLRIQDSGEERALTDVERQKLIDEPYKKAKLTYAQVRTLLDLSEIAKFKGLRYGYQQTNKEVESKETLMEMKAFHQIRKALEKADLKDEWQKISCQPDLLDDIGTAFSLYKTDEDITKQLTGKLSENALQVLLTELNFDEFIQLSLLALRKILPLMEKGQRYDEACKAVYGDHYGYKKQESNLLLPQIPADEIRNPVVLRTLTQSRKVINEIIRRYGSPLRIHIETGREVGKSYKDRREIEKRQEENRKEKERAVARFKECFSNFVGEPKAMDILKFRLYEQQHGKCLYTGTPIDLNRLLEKGYVEVDHALPFSRTWDDSLNNKVLVLGTANQNKRNQTPYEWLDGANESERWQQFVGRVQHARFSYGKKQKLLAKKIDEEGFIERNLNDTRYVARFLCNFISDNVQLLGKGKRRVFASNGQITSLLRGRWGLSKVREENDRHHALDAIVVACTTVSMQKRITDFVRRQEMDVFVGEMIDKTTGEVIKIHFPAPWPFFRQDIMIRVFDDNPRETLAKELPDRPEAIHDLVTPLFVSRAPTRKVTGQGHLETIRSAKRLNEQLSVTKMPLTKLKTKDIEKIVGYPHREPALYEALKNRLAQFKDDPVKAFEQPFYKVDGKGNATTTQVKSVRIENIQKSGVLVREGNGIADNATMVRVDVFTKEGKNYLVPVYAWQVAKGILPNKAVRQGKDEMEWDEMTEDFSFKFSLYPNDLIKLTYKNITYFAYNAGFDRATGAITVKAHDKSSAFGKNGQQSGIGVKTLKVFEKYSVDVLGKIIRPCKKEKRQDFSKKRKK

SEQ ID NO: 7496 - protein, 831 aa, synthetic construct
  REGION 1..831: note = Synthetic
MLFKKMLGHCTFEPAEPKAAKNTYTAERFIWLTKLNNLRILEQGSERPLTDTERATLMDEPYRKSKLTYAQARKLLGLEDTAFFKGLRYGKDNAEASTLMEMKAYHAISRALEKEGLKDKKSPLNLSTELQDEIGTAFSLFKTDKDITGRLKDRVQPEILEALLKHISFDKFVQISLKALRRIVPLMEQGKRYDEACAEIYGDHYGKKNTEEKIYLPPIPADEIRNPVVLRALSQARKVINAVVRRYDSPARIHIETAREVGKSFKDRKEIEKRQEENRKDREKAAAKFREYFPNFVGEPKSKDILKLRLYEQQHGKCLYSGKEINLVRLNEKGYVEIDHALPFSRTWDDSFNNKVLVLGSENQNKGNQTPYEYFNGKDNSREWQEFKARVETSRFPRSKKQRILLQKFNEEGFKERNLNDTRYVNRFLCQFVADHILLTGKGKRRVFASNGQITNLLRGFWGLRKVRTENDRHHALDAVVVACSTVAMQQKITRFVRYKEMNAFDGKTIDKETGEVLHQKAHFPQPWEFFAQEVMIRVFGKPDGKPEFEEADTPEKLRTLLAEKLSSRPEAVHEYVTPLFVSRAPNRKMSGQGHMETVKSAKRLDEGISVLRVPLTQLKLKGLEKMVNREREPKLYDALKAQLETHKDDPTKAFAEPFYKYDKTGNRTQQVKAVRIEQVQKTGVWVRNHNGIADNATMVRVDVFEKGGKYYLVPIYSWQVAKGILPDRAVVQGKDEEDWTVMDDSFEFRFVLYANDLIKAELKKETFFGYFSGLDRSTGNISLRSHDLDKTKGKDGVYRIGIKTALSFQKHQIDELGKEIRPCRLKPPVR

SEQ ID NO: 7497 - protein, 1056 aa, synthetic construct
  REGION 1..1056: note = Synthetic
MSVRITNMFKPLNYILGLDLGIASVGWAVVEIDEQGNPLRLIDVGVRTFERAEVAKTGESLALARRLARSSRRSVKRRAVRIKKAKRLLKAENILLSVDEILPNDVWQFRVKGLDHKLERQEWAAVLLHLLKRRGYLSQRKNESKRENKELGALLSGVSTNHQILQSAEYRTPAEIAVHKFQAEDGHIRNQRGDYTHTFSRLDLLAEMELLFQRQTELGNQYTSSKLLENLTALLMWQKPALTGEAILKMLGKCTFEPTECKAAKNSYSAERFVWLTKLNNLRILEQGAERALTDSERFALLDQPYKKAKLTYAQVRTLLKLSDEAIFKGVRYQGEDKKTVENKTTLMEMKAYHQIRKALDGADLKDEWNRLKNDSALLDEIGMAFSLYKTDDDISHYLGGKLSEKVLNVLLENLNFDKFIQLSLKALQQILPLMLQGQRYDEAVSTVYGDHYGKKSAESCRLLPAIPANEIRNPVVLRTLTQARKVINAVVRLYGSPARIHIETGREVGKSYQDRKKLEKQQEENRKQRESAVKKFKEYFPNFVGEPKGKDILKMRLYELQQSKCLYSGKSFDPNRLLEKGYVEVDHALPFSRTWDDSFNNKVLVLANENQNKGNLTPYEWLDGKNNSKRWQDFVARVQTCCFSHWKKQHILSHKLDEKSFIERNLNDTRYVARFLCNFIADNMLLTGKGKRKVFASNGQITALLRGRWGLQKVRDDNDRHHALDAVVIACSTVAMQQKITRFVKYEEGNVFSGERIDRETGEIIPLHFPTPWKFFKENVEIRIFSENPKLELENRLPDYPQYNHEFVQPLFVSRMPTRKMTGQGHEVKLRSARKLDTTGKSIKKEFLTDLTLKNLDNMMNKEREPELYQSLVEHFKKYGDKPKEKFFKKGGTEVKSIRICKTQNKFVDLGNKTIADNGDIVRTDLFLKGKKYYFVNIYAWQVAEDILPRETTTGDLLDDSYIFQFSLFKNDVLEISHPEDENKSVFVYFIRPDDERRWILKFHDNAKIPNIYGKKDETSIRLSIQGQKFIRKYQVDELGKNIRPCRPTKRQNVR

SEQ ID NO: 7498 - protein, 758 aa, synthetic construct
  REGION 1..758: note = Synthetic
LLLNEPYNKTKLTYQQVRKLLRLPETAFFKGLRYGKDNAESATFMEMKSYHAIRKSLENKSLKSEWEKLKTQPKLLDLIGTAFSIYKTDDEIAGCLKNQLPENVIIALQEQLNFSNFMELSLKALEKLLPLMEQGLRYDEADTQIYGNRHEKIADETEKFLPNIPADKLRNPVVLRTLTQARKVINAIIRRYGSPARVHIETGREVGKSFSDRDKLKKQQEENQEQRQRAIDEWKQFFPNAAHEPKAVDILKLRLYQLQQGKCLYSGLPIDVRRLPEKGYVEIDHALPFSRTWDDSFNNKILVLASENQNKGNQTPYEYLRGADNSESWRLFVENVQNCQFSPNKKQKIMAKQLDEKGFLERNLNDTRYVSRFLCQFISEYLHLTGKGKKRVFASNGQITALLRGRWGLSKNREENDRHHAVDAVVVACSTVAMQQKITQFVRYQKGNVFTGERIDKETGEVISIHFPTPWEHFREEVMIRVFDDNPLRTLPEKLPNRPEALHEYVMPLFVSRMPTRKMTGQGHKETIKSAKRLDEKISVLRVPLTQLKLNDLENMVNREREPALYEALKARLEQFKNDPAKAFAEPFFKQGGQQVKAVRVEIVQKSGMLLRKINGVADNGSMVRVDVFEKSGKFYLVPIYAWQVAEGILPNHAVVHSKDESDWILMDESYHFKFALYKNDLLEVQTKKGCIMGYFASLDRATGAITIREHDRDKKKCKDGEHRSIGVKMASSFKKLQVDELGKNIHETRSRKRPNIG

SEQ ID NO: 7499 - protein, 1053 aa, synthetic construct
  REGION 1..1053: note = Synthetic
MKLKPINYILGLDLGIASVGWAVVEIDENEYPLRLIDVGVRTFERAEVAKTGDSLAAARRAARSVRRLIRRRAHRLLRAKRLLKRIGLITQADLDSGLPNTPWQLRLDGLNRQLSNTEWAAVLLHLIKHRGYLSQRKNENKTDNKELGALLAGVSANHQLLQSAEYQTPAELALKKFAEEDGHIRNQRGTYTHTFNRLDIAAELALLFKYQRELGNHFASVDLEQEIGALLITQRAALSGEAVLKMLGKCTFEPAEFKAAKNTYSAERFIWLTKLNNLRILENGTERALSEDERQLLIEQPYQKAKLTYAQVRKLLELSEQAFFKGLPYRKENAESATLMELKAYHAIRKALEGANLKTEWQGLATQPELLDAIGTAFSLYKTDDDIAQFLDGKLSEQVLTALQENLNFDRFIQLSLLSLSKILPLMEQGKRYDEACKMVYGDHYGYRKQKESLFLPAIPSDDIRNPVVLRTLSQARKVINGIVRLYGSPARIHIETGREVGKSFKDRQEIQKRQDQNRSEREQSAKKFKELFPNFAGEPKAKDILKLRLYEQQHGKCLYSGKALELNRLLEKGYVEIDHALPFSRTWDDSFNNKVLVLAQENQNKGNQTPYEWLNGKDNSEQWKHFVALVTGSRFSYGKKQRILTQKLDEKGFLERNLNDTRYIARFLCQHIEDNMLLVGKGKKRVFASNGQITALLRNRWGLTKIREANDRHHAIDAIVVACSTIAMQQKITRFVRFEEGNVYKGERVDHETGEIIPLHFPDPWKYFRQDVTIRVFDDNPTTALEKMLSDRPEANHEFVQPLFVSRAPTRKMSGQGHLETIKSAKRLDEKISTSRVPLTQIKLKDLERMVNREREVALYEALKERLTTFNDDPIKAFTEPFYKKGGQQVKAIRLEQVQKSGVLVRQNNGIADNASMVRVDVFIKNGKYFLVPIYTWQVAKGILPNKAVIQGKDENEWEEMDEAAQFQFSLFPNELIKLTTKKKVFFGYYSGMNRAIASINIREHDLDISKGKDGEHLSVGVKLALSFEKYQVDELGKNIRPCRPTKRQPVK

SEQ ID NO: 7500 - protein, 799 aa, synthetic construct
  REGION 1..799: note = Synthetic
LHNSNPLKTTKPHKQRLHRIFSSQIFLFLSMQILSLPHIINQPYEKAKLNYAQVRSRLNLSDEAIFKGVRYSGEDKKAIETKTTLMEMKAYHQIRKVLEGNNLKAEWAELKANPTLLDEIGTAFSLYKTDEDISGYLAGKLSQPVLDVLLENLSFDKFIQLSLKALYKLLPLMQQGLRYDEACSEIYGDHYGKKTEENHHFLPQIPADEIRNPVVLRTLTQARKVINGVVRLYGSPARIHIETGREIGKSYKDRRELEKRQEENRKQRENAIKEFKEYFPHFAGEPKAKDILKMRLYKQQNAKCLYSGKPIELHRLLERGYVEVDHALPFSRTWDDSFNNKVLVLANENQNKGNLTPFEWLDGKHNSERWRAFKALVETTAFPYAKKQRILSQKLDEKGFIERNLNDTRYVARFLCNFIADNMRLTGEGKRKVFASNGQITALLRGRWGLAKSREDNDRHHALDAVVVACSTVAMQQKITRFVRFEAGDVFTGERIDRETGEIIPLHFPTPWQFFKQEVEIRIFSDNPKLELENRLPDRPQANHEFVQPLFVSRMPTRKMTGQGHMETVKSAKRLNKGISVIKMPLTKLKLKDLELMVNREREKYLYDTLKARLEAFNDDPAKAFAEPFIKKGGAIVKSVRVEQIQKSGVLVREGNGVADNASMVRVDVFTKGGKYFLVPIYTWQVAKGILPNKAIVALKDENEWIEIDNNHIFLFSLYQNDLIKVKTKKDELFGYFNSLNRATAAIDIKVHDLDKSKGKNGIYQSVGVKLALSFEKYQVDELGKNIRLCKPSKRQAVR

SEQ ID NO: 7501 - protein, 893 aa, synthetic construct
  REGION 1..893: note = Synthetic
MENKNLHYILGLDLGIASVGWAVVEIDEKENPLRLIDVGVRTFERAEVPKTGESLALSRRLARSARRLTQRRVARLKKAKRLLKSENILLSTDERLPHQVWQLRVEGLDRKLERQEWAAALLHLIKHRGYLSQRKNESKSENKELGALLSGVASNHELLQQATYRTPAELAVKKFESEEGHIRNQQGAYTHTFSRLDLLAEMELLFSRQQHFGNPFASEKLLENLTALLMWQKPALSGEAILKMLGKCTFEDEYKAAKNTYTAERFVWITKLNNLRIQENGLERALSDNERLMLIEQPYEKAKLTYAQVRSILNLSDDAIFKGVRYSGEDKKAIETKTTLMEMKAYHQIRKVLEGNNLKAEWAELKANPTLLDEIGTAFSLYKTDEDISAYLAGKLSQPVLNALLENLSFDKFIQLSLKALYKLLPLMQQGLRYDEACREIYGDHYGKKTEENHHFLPQIPADETRNPVVLRTLTQARKVINGVVRLYGSPARIHIETGREVGKSYKDRRELEKRQEENRKQRENAIKEFKEYFPHFAGEPKAKDILKMRLYKQQNAKCLYSGKPIELHRLLEKGYVEVDHALPFSRTWDDSFNNKVLVLANENQNKGNLTPFEWLDGKHNSERWRAFKALVETSAFPYAKKQRILSQKLDEKGFIERNLNDTRYVARFLCNFIADNMLLTGEGKRKVFASNGQITALLRSRWGLAKSREDNDRHHALDAVVVACSTVAMQQKITRFVRFEAGDVFTGERIDRETGEIIPLHFPTPWQFFKQEVEIRIFSDNPKLELENRLPDRPQANHEFVQPLFVSRMPTRKMTGQGHMETVKSAKRLNEGISVIKMPLTKLKLKDLELMVNREREKDLYDALKARLEAFNDDPAKAFAEPFMKLLLNQYE

SEQ ID NO: 7502 - protein, 1056 aa, synthetic construct
  REGION 1..1056: note = Synthetic
MNMVKPLNYILGLDLGIASVGWAVVEIDEQENPLGLIDVGVRTFDRAEVPKTGESLALARRLARSARRLVQRRAARIKKAKRLLKAENLLLSTDEQLPNDVWQLRVNGLDQKLERQEWAAVLLHLLKHRGYLSQRKNESKSDNKELGALLLGVAANHNILMSSEYRTPAEIAVKKFQIEDGHIRNQRGAYTHTFNRLDLLAEMKLLFQRQMELGNPYTSATLLENLTDLLMWQKPALAGDAILKMLGKCTFEPTEDKAAKNSYSAERFVWLTKLNNLRILENGVERALTDQERFTLLEQPYEKAKLTYAQVRTILALSDDAIFKGVRYQGEDKKAVETKTTLMEMKAYHQIRKALEGADLKAEWNTIKNNPTLLDDIGTAFSLYKTDKDISCYLEGKLAKNVLNILLENLNFDKFIQLSLKALQQILPLMLQGQRYDEAVSTIYGAHYGKKSIEIDRLLPNIPAGEIRNPVVLRTLTQTRKVINEVVRLYGSPARIHIETGREVGRSYQDRQKLDKQQKDNHEQRKSAVKKFKEYFPDFVGEPKGKDILKLRLYELQQSKCLYSGKPLDPHRLLEKGYVEVDHALPFSRTWDDSFNNKVLVLANENQNKGNLTPYEWLDGKNNSERWRHFVARVQTSAFSYSKKQRILSHKLDEKGFIERNLNDTRYVARFLCNFIADHMLLTGKGKRKVFASNGQITALLRGRWGLPKKREDNDRHHALDAVVVACSTVAMQQKITRFVKYKEGNVFTGERIDRETGEIIPLHFPSPWAFFKENVEIRIFSENPKLELKNRLPDYPQYNHEFVQPLFVSRMPTRKMTGQGHMETVKSAKRLNEGISVLKVPLTQLKLSDLERMVNRNREMALYESLKTRLEQFGNDPAKAFAEPFYKKGGTLVKAIRVEQTQKSGVLVRGGNGVADNASMVRVDVFTKGGKYFLVPIYTWQVAKGILPNKAVIQGKDEEEWEIMDEKAQFQFSMYQNDLIKLKTKKAEILGYFNALNRSTGNIDIKEHDLDKSKGKNGIYQGVGVKLAISLEKYQVDVLGKNIRPCRPTKRQNVR

SEQ ID NO: 7503 - protein, 1050 aa, synthetic construct
  REGION 1..1050: note = Synthetic
MENKNLHYILGLDLGIASVGWAVVEIDEKENPLRLIDVGVRTFERAEVPKTGESLALSRRLARSARRLTQRRVTRLKKAKRLLKSENILLSTDERLPHQVWQLRVEGLDRKLERQEWAAVLLHLIKHRGYLSQGKNESKSENKELGALLSGVASNHELLQQATYRTPAELAVKKFEVEEGHIRNQQGAYTHTFSRLDLLAEMELLFSRQQHFGNPFASEKLLENLTALLMWQKPALSGEAILKMLGKCTFEDEYKAAKNTYTAERFVWITKLNNLRIQENGLERALNDNERLMLIEQPYEKAKLTYAQVRSILNLSDDAIFKGVRYSGEDKKAIETKTTLMEMKAYHKIYNVLKSNNLKAEWAELKANPTLLDEIGTAFSLYKTDEDISAYLAGKLSQPVLNALLLKNLSFDKFIQLSLKALYKLLPLMQRGLRYDEACREIYGDHYGKKTEENHYFLPQIPADEIRNPVVLRTLTQARKVINGVVRLYGSPARIHIETGREVGKSYKDRRELEKRQEENRKQRENAINEFKEYFPHFAGEPKAKDILKMRLYKQQNAKCLYSGKPIELHRLLEKGYVEVDHALPFSRTWDDSFNNKVLVLANENQNKGNLTPFEWLDGKHNSERWRAFKALVETTVFPYAKKQRILSQKLDEKGFIERNLNDTRYVARFLCNFIADNMLLTGEGKRKVFASNGQITALLRSRWGLAKSREDNDRHHALDAVVVACSTVAMQQKITRFVRFEEGDVFTGERIDRETGEIIPLHFPTPWQFFKQEVEIRIFSDNPKLDLENRLPDRPQANHEFVQPLFVSRMPIRKMTGKAHEETLRSPKKLSEGKSIKKERLSNLKLTDLERMVNKEKEPELYQSLKEHFSKYGDYSKEKFFKKGGTEVKSIRLYKTQNKYVELNNGKTIADNGDIVRVDVFKKEKKYHAVNIYAWQVAKGILSKETSTGLFLDDNYIFQFSLFKNDLVKIPNPNNKSEYLFAYFIRPDDEPRWILKLQDNAIIPDGFSKKEKNSFRFSFKNQSFIEKYHIDELGKNINLCKRSKRQAVR

SEQ ID NO: 7504 - protein, 1053 aa, synthetic construct
  REGION 1..1053: note = Synthetic
MKNTSLNYVLGLDLGISSVGWAVVEIDEKENPLRLIDVGVRTFERAEVPKTGESLALARRLARSARRLTQRRVARLKKARRLLKSENILLSTDEHLPHQVWQLRVEGLERKLERQEWAAVLLHLIKHRGYLSQRKNESKSENKELGALLSGVANNHKLLQQTTYRTPAELAVKKFEVEEGHIRNQQGSYTHTFSRLDLLSEMELLFSRQQHFGNPFTSEKLLENLTALLMWQKPALSGDAILKMLGKCTFENEYKAAKHTYSAERFVWITKLNNLRIQENGLERALNDNERLALMKQPYEKAKLTYAQVRSILNLSDEAIFKGLRYSGEDKKTSETKTVLMEMKAYHQIRLALEKNDLKTEWAELKVNSSLLDEIGTAFSLYKTDEDISTCLAGKLSQPVLNALLENLNFDKFIQLSLKALHKILPLMQQGLRYDEACAEIYGDHYGKKTEENHLLLPQIPADEIRNPVVLRTLTQARKVINGVVRLYSSPARIHIETGREVGKSYQDRRELEKRQEENRKQREKAISEIKTLFPNFSGEPKAKDILKMRLYYQQNAKCLYSGKPLELHRLLEQGYVEIDHALPFSRTWDDSFNNKVLVLANENQNKGNLTPFEWLDGKNNSERWKAFKALVETSAFPYTKKQRILSQKLDEKGFIERNLNDTRYVARFLCNFIADNMHLTGEGKRKVFASNGQITALLRGRWGLAKSREDNDRHHALDAVVVACSTVSMQQKITRFVRFEEGNVFTGERIDRETGEIIPLHFPAPWKFFREEVEIRIFSDNPKLELENRLIARPQANHEFVQPLFVSRMPTRKMTGQGHMETIKSAKRLNEGLSVIKMLLTKLRLKDLESMVNREREKELYEALKARLEAFNDEPAKAFAEPFMKKGGAIVKSVRVEQVQKSGVLVRDGNGVADNASMVRVDVFTKGGKYFLVPIYTWQVAKGILPNKAVIQGKNEEDWEVMDDATFRFSLHQNDLVKLVTKKKTIFGYFNGLNRATGNIDIKEHDLEKSKVKDGIHQSIGIKLALSFEKYQVDELGKNIRLCKPSKRQAVR

SEQ ID NO: 7505 - protein, 1049 aa, synthetic construct
  REGION 1..1049: note = Synthetic
MQLSKLNYILGLDLGIASVGWSVIEIDETEMPIRLIDVGVRTFERAEVPKTGESLALARRLARSTRRLIRRRAFRLLKAKRLLKNHQIVSADELSTLPNHCWELRVKGLDERLTCQEWAAVLLHLLKHRGYLSQRKSEAQNADKEMGALLSGVANNHKLLSENHYRTPAEIAVKKFALEEGHMRNQRGAYTHTFNRLDLLAEMRLLFQTQRELGSPYASGELEQEFCKLLMWQKPALSGDAILKMLGKCTLEPTEYKAAKNTYTAERFVWLTKLNNLRILENGSERALNADERALLLNQPYEKAKFTYEQARKLLQLNEAARFNSVRYGKENAEKSTLMEMKAYHAIRKAVETADSSAWATLKTQPLLLDEIGTAFSIYKTDEDIKTQLQGKLADNVIDVLLENLNFDKFIQLSLKALYKILPLMEQGLRYDEACSQIYGDHFGKKEQKNDRLLPQIPADEIRNPVVLRTLSQARKVINAVIRLYGSPARIHIETARELGKSYKDRKEIEKRQEQNRAEREKAVDKFKELFPNFIGEPKAKDILTMRLYEQQNGQCLYSGKSLDLHRLLEKGYVEIDHALPFSRTWDDSFNNKVLVLAGENQNKSNQTPFEWLGKDEQKWALFTARVNSCRFPYSKKQRILTKKLDDEGFIQRNLNDTRYIARFLVNFVNDNLHLTGKGKRRVFASNGQITAFLRGRWGLTKVREESDRHHALDAVVVACSTVSIQQKITRFVKYQEGNLQTAERIDRETGEIIPLHFPDPWAFFREEVMIRIFSEMPQEDLVIKLPDRPQANHEFVQPLFVSRMPTRKMSGQGHMETIKSAKRLDEGISVSKVPLTQLKLKDLENMVNRDREIALYEALKARLTEFKDDPAKAFAEPFYKKGGVQVKSVRVEQVQKSGVVVRNGNGVADNASMVRVDVFIKGGKYFLVPIYTWQVAKGILPDRAVIAYTPENEWELMDDSAQFQFSIYPNDLIKLTTKKAIFFGYYSGFNRLTGAINIKEHDLQISKGDKGVHLGLGVKLALSLEKYQVDELGKNIRPCRPTQRQNVR

SEQ ID NO: 7506 - protein, 905 aa, synthetic construct
  REGION 1..905: note = Synthetic
LRKKAAISAISAAIIRNQRGDYSHTFSRKDLQAELILLFEKQKEFGNPHVSGGLKEGIETLLMTQRPALSGDAVQKMLGHCTFEPAEPKAAKNTYTAERFIWLTKLNNLRILEQGSERPLTDTERATLMDEPYRKSKLTYAQARKLLGLEDTAFFKGLRYGKDNAEASTLMEMKAYHAISRALEKEGLKDKKSPLNLSSELQDEIGTAFSLFKTDEDITGRLKDRVQPEILEALLKHISFDKFVQISLKALRRIVPLMEQGKRYDEACAEIYGDHYGKKNTEEKIYLPPIPADKIRNPVVLRALSQARKVINGVVRRYGSPARIHIETAREVGKSFKDRKEIEKRQEENRKDREKAAAKFREYFPNFVGEPKSKDILKLRLYEQQHGKCLYSGKEINLVRLNEKGYVEIDHALPFSRTWDDSFNNKVLVLGSENQNKGNQTPYEYFNGKDNSREWQEFKARVETSRFPRSKKQRILLQKFDEDGFKECNLNDTRYVNRFLCQFVADHILLTGKGKRRVFASNGQITNLLRGFWGLRKVRAENDRHHALDAVVVACSTVAMQQKITRFVRYKEMNAFDGKTIDKETGKVLHQKTHFPQPWEFFAQEVMIRVFGKPDGKPEFEEADTPEKLRTLLAEKLSSRPEAVHEYVTPLFVSRAPNRKMSGAHKDTLRSAKRFVKHNEKISVKRVWLTEIKLADLENMVNYKNGREIELYEALKARLEAYGGNAKQAFDPKDNPFYKKGGQLVKAVRVEKTQESGVLLNKKNAYTIADNGDMVRVDVFCKVDKKGKNQYFIVPIYAWQVAENILPDIDCKGYRIDDSYTFCFSLHKYDLIAFQKDEKSKVEFAYYINCDSSNGRFYLAWHDKGSKEQQFRISTQNLVLIQKYQVNELGKEIRPCRLKKRPPVR

SEQ ID NO: 7507 - protein, 1103 aa, synthetic construct
  REGION 1..1103: note = Synthetic
LHVNAFFRYIAVVVYEIAEKQMTAFKPNPLNYILGLDIGIASVGWATVEIDDKENPIRLIDLGVRVFERAEVPKTGDSLAAARRAARSIRRLIRRRAHRLLRTRRLLKHEGVLKPEDFDENGFIKLLPNTPWQLRAAALDRKLTPLEWAAVLLHLVKHRGYLSQRKNEEQTADKELGDLLKGVADNTHALQTGDFRTPAELALNKFEKESGHIRNQRGDYSHTFSRKDLQAELVLLFEKQKEFGNPYVSDDLKNGIENLLMTQRPALSGDAIQKMLGHCTFEPAEPKAAKNTYTAERFIWLTKLNNLRILNQGSERPLTDTERTTLMDEPYKKSKLTYARVRKLLGLDDTAFFKGLRYGKDNAESTTLMEMKAYHAISRALEKEGLKDKKSPLNLSPELQDEIGTAFSLFKTDEDITGRLKDCLQPEILDALLKHISFDKFVQISLKALRRIVPLMEQGKRYDEACAEIYGDHYGEKNSEEMLYLPPIPADEIRNPVVLRALSQARKVINSVVRRYGSPVRIHIETAREVGKSFKDRKEIEKRQEENRKDREKAAAKFREYFPNFVGEPKSKDILKLRLYEQQHGKCLYSGKEIDLGRLNEKGYVEIDHALPFSRTWDDSFNNKVLVLGSENQNKGNRTPYEYLNGKDNSREWLEFKARVETSRFPHSKKQRILLQKFDEEGFKERNLNDTRYVNRFLCQFVADHMQLTGKGKRRVFASNGQITNLLRGFWGLRKVRVENDRHHALDAVVVACSTVAMQQRITRFVRYKEMNAFDGKTIDEETGEVLHQKTHFPQPWDFFAQEVMIRVFGKPGGKPEFEEADTPEKLRALLAEQVSSRPQAVHEYVAPLFVSRAPNRKMSGQGHMETVKSPKRLDEGMSVLRVPLTQLKLKDLEKMVNREREPKLYEALKARLEAHKDDPAKAFAEPFYKQDKAGNPTQQVKAVRIEQVQKTGVWVRNQNGIADNATMVRVDVFEKAGKYYLVPIYSWQVAKGILPDRAVVQGRDEEDWTVMDDSFEFKFVLYANDLIKLTAKKNEFLGYFVSLNRATGAIDIRTHDTDSTKGKNGIFQSVGVKTALSFQKYHIDELGKEIRPCHLKKRPPVR

SEQ ID NO: 7508 - protein, 830 aa, synthetic construct
  REGION 1..830: note = Synthetic
VAQNHQLLQSDDYRTPAELALKKFAKEEGHIRNQRGAYTHTFNRLDLLAELNLLFAQQYQFGNPHCKEHIQQYMTELLMWQKPALSGEAILKMLGKCTHEKNEFKAAKHTYSAERFVWLTKLNNLRILEDGAERALNEEERQLLINHPYEKSKLTYAQVRKLLGLSEQAIFKHLRYSKENAESATFMELKAWHAIRKALENQGLKNTWQDLAKKPDLLDEIGTAFSLYKTDEDIQQYLTNKVPNSVINALLVSLNFDKFIELSLKSLRKILPLMEQGKRYDQACREIYGHHYGEANQKTSQLLPAIPAQEIRNPVVLRTLSQARKVINAIIRQYGSPARVHIETGRELGKSFKERREIQKQQEDNRTKRESAVQKFKELFSDFSSEPKSKDILKFRLYEQQHGKCLYSGKEINIHRLNEKGYVEIDHALPFSRTWDDSFNNKVLVLASENQNKGNQTPYEWLQGKINSERWKNFVALVLGSQCSAAKKQRLLTQVIDDNKFIDRNLNDTRYIARFLSNYIQENLLLVGKNKKNVFTPNGQITALLRSRWGLIKARENNNRHHALDAIVVACATPSMQQKITRFIRFKEVHPYKIENRYEMVDQESGEIISPHFPEPWAYFRQEVNIRVFDNHPDTVLKEMLPDRPQANHQFVQPLFVSRAPTRKMSGQGHMETIKSAKRLAEGISVLRIPLTQLKPNLLENMVNKEREPALYAGLKARLAEFNQDPAKAFATPFYKQGGQQVKAIRVEQVQKSGVLVRENNGVADNASIVRTDVFIKNNKFFLVPIYTCKLRKASCQIKLLLLIKMKMNGKKWMKVLSLNSAFSRMILSS

SEQ ID NO: 7509 - protein, 701 aa, synthetic construct
  REGION 1..701: note = Synthetic
LQDEIGEAFSLFKTDEDIRGRLKGKLPDEQLDALLEYVSFDKFVQLSLKALRKILPLMEQGKRYDEACAEIYGDHYGIKDDKQAQFLPPVSADEIRNPVVLRALSQARKVVNAVVRRYGSPARVHIETAREVGKSFLDRKKIEKRQEENRKDRERSIAKFREYFPNFVGEPKAKDILKMRLYEQQQGQCLYSGKAIDLRRLNEKGYVEIDHALPFSRTWDDSFNNKVLVLAGENQNKRNQTPFEWLGGDEKRWREFTARVEHCRFPRSKKQRILMQKLDEKDFKERNLNDTRYVNRFLCNFIAQNMLLTGEDKNRVFASNGQITNLLRGMWGLKKVRESNDRHHALDAVVVACSTVAMQQKITNYVRQKEMNVFDGEMVDKTTGEVSRLHFPQPWDFFRQEVMMRVFGKPDTPSENNEEADTPEKLRALLADKLSSRPEAVHEAVTPLFVSRAPSRKMSGQGHMETIKSAKRLSEGKSVLRVPLTQLTPKLLENMVNREREPQLYEDLLGRLNAHGGDPAKAFAAPFFKRDKAGNPTQQVKAVRVEDVQKSGVIVREGNGVADNATMVRVDVFEKGGKYYLMPIYTWQAAKGILPNKAVIAHTDEANWQEMDTSFTFKFALYPNDLVLASLKKETYFGYFAGLDRSTGNISLRVHDLEKSKGKDGVYRIGVKTALSFQKYQVDELGKTIRPCRLKKRPPVR

SEQ ID NO: 7510 - protein, 687 aa, synthetic construct
  REGION 1..687: note = Synthetic
MLFLISDIIKKIKKGEIKSSDKIEKDTKFMEMKFWHKIKETLEGNGRKTEWQSLSSNHNLLDEIGTVFTICKNDERRKVLLTGKIKEDQDILDILCDHVDFTCTVNLSLEALKNILPFMEQGDDYDTAWRKVYPPQSTKKESVLPPIPADEIRNPVVLRALSQARKVINGVVRRYGSPARIHIETAREVGKSFKDRKEIEKRQEENRKDREKSATEFREYFPNFIGEPKSKDILKLRLYKQQHGKCLYSGKEINLGRLNEIGYVEIDHALPFSRTWDDSFNNKVLVLGSENQNKGNQTPYEYFNGKDNSREWQEFKARVETSRFPRSKKQRILLQKFDEDSFKKRNLNDTRYVNRFLCQFIADRMRLTGKGKRRIFASNGQITNLLRGFWGLRKVRAGNNRHHALDAVVVACSTVAMQQKITRFVRYKEMNAFDGKTIDKETGEVLHQKAHFPQPWEFFAQEVMIRVFGKPDGKPEFEEADTPEKLRTLLAEKLSSRPEAVHEYVTPLFVSRAPNRKMSGAHKDTLRSAKRFVKHNEKISVKRVWLTEIKLADLENMVNYKNGREIELYEALKARLGAYGGNAKQAFDPKDNPFYKKGGQLVKAVRVEKTQESGVLLNKKMLIPLQIMETWYVLMCSVKWIRKEKISILLFPSMLGRLLKTFFPILIVKDTGLMIAIHSVLACISMI

SEQ ID NO: 7511 - protein, 1092 aa, synthetic construct
  REGION 1..1092: note = Synthetic
MEKQMTAFKPNPLNYILGLDIGIASVGWAMVEIDDKENPVRLIDLGVRVFECAELLKKGDSLAAARRKARSIRRLIRRRAHRLLRARRLLKHEGVLKPEDFDENGFIKLLPNTPWQLRVAALDRKLTPLEWAAVLLHLIKHRGYLSQRKNEEQTADKELEALREGMKSNTQALQTGNFRTPAELALNKFEKESGHIRNQRGDYSHTFSRKDLQAELVLLFEKQKEFGNPYVSDDLKNGIENLLMTQRPALSGDAIQKMLGHCTFEPTEPKAAKNTYTAERFIWLTKLNNLRILNQGSERPLTDTERATLMEAPYTKKLTYAQARKLLGLDDTAFFKGLRYGKDNAESATLMEMKAYHAISRALEKEGLKDKKSPLSISPELQDEIGTAFSLFKTDEDITGRLKGCLQPEILDALLKHISFDKFVQISLKALRRIVPLMEQGDDYDTAWRKIYPPPQPVNKEPVLPPIPADEIRNPVVLRALSQARKVINAVVRRYGSPARIHIETAREVGKSKAERDKLDRQNNERKNDRDRRIKDIQKYFGFDPKPKDILKLRLYEEQNGKCLYSNLKSEKGKCLYTGEAIELSRLFEDNYVEIDHALPFSKTWDDSLNNKVLVLKASNQNKGNQTPYEWLDGKNNNLKWREFVARVQSCNFPHSKKQRILLQKFDEKEFKKRNLSDTRYINRFLCQFVANHMRLLSDGENRVFASNGQITNLLRGFWGLRKVRADNDRHHALDAVVVACSTVAMQEKITRFVRYKEMNAFDGKTVDKETGEVLHQKTHFPQPWEFFAQEVMIRVFGKPDGRPEFEEADTPEKLRALLAEKLPSRPKAIHEYVMPLFVSRAPKRKMSGQGHDATLFSAKHFKKSKEAVKRKLLTEIKIADLDNMINKDRERELFEALKNRLSQYNNDPQKAFDPKTNPFYKKGGQLVKSIRVTEPKKMKTGLLLNKDAAVAKNSDMVRVDVFEKGGEYYLVPIYSWQVAKGILPDRAIVQRKDEEDWQLIDDSFNFKFSLHPNDLVEVITKKARIFGYFASCHRGTGNINIRIHDLDNKVGKNGILEGIGVKTALSFQKYQIDELGKEIKPCRLKKRPPVR

SEQ ID NO: 7512 - protein, 1092 aa, synthetic construct
  REGION 1..1092: note = Synthetic
MAAFKPNPINYILGLDIGIASVGWAMVEIDEEENPIRLIDLGVRVFERAEVPKTGDSLAAARRLARSVRRLTRRRAHRLLRARRLLKREGVLQAADFDENGLIKSLPNTPWQLRAAALDRKLTPLEWSAVLLHLIKHRGYLSQRKNEGETADKELGALLKGVADNAHALQTGDFRTPAELALNKFEKESGHIRNQRGDYSHTFSRKDLQAELNLLFEKQKEFGNPHVSDGLKEGIETLLMTQRDSIPDESAILRMQGKCTFEKNKSRAAKHSWSAERFIWLSKLANLRITDEFGTRKLTEIERQILIDLPYKLKTVNYQQVRNALTTLSPNALFNIGYHQKDKKGEIKSSDKIEKDTKFMEMKFWHKIKETLEGNGRKTEWQGLSSNHHLLDEIGTVFTICKNDERRKALLSGKIKEDQDILDILCDHVDFTCTVNLSLEALKNILPFMEQGDDYDTAWRKVYPPQSTKKESVLPPIPADEIRNPVVLRALSQARKVINAVVRRYGSPARIHIETAREVGKSFKDRKEIEKRQEENRKDREESATEFREYFPNFIGEPKSKDILKLRLYKQQHGKCLYSGKEINLGRLNEIGYVEIDHALPFSRTWDDSFNNKVLVLGSENQNKGDRTPYEYLNGKDNSREWQEFKARVETSRFPHSKKQRILLQKFDEKEFKNRNLSDTRYINRFLCQFVADHMQLTGKDKNRVFASNGQITNLLRGFWGLRKARAENDRHHALDAVVVACSTVAMQQKITRFVRYKEMNAFDGKTIDKETGEVLHQKAHFPQPWEFFAQEVMIRVFGKPDGKPEFEEADTPEKLRTLLAEKLSSRPEAVHEYVTPLFVSRAPNRKMSGAHKDTLRSAKRFVKHNEKISVKRVWLTDIKLVDLENMVNYKNGREIELYDALKARLEKYGGNAKQAFDPKDNPFYKKGGQLVKAVRVEKTQESGVLLNKKHAYTIADNGDMVRVDVFCKVDKKGKNQYFIVPIYAWQVAENILPDIDCKGYRIDDSYTFCFSLHKYDLIAFQKDEKSKVEFAYYINCDSSNGRFYLAWHDKGSKEQQFRISTQNLVLMQKYQIDELGKEIRPCRLKKRPPVR

SEQ ID NO: 7513 - protein, 1132 aa, synthetic construct
  REGION 1..1132: note = Synthetic
VQQYVQILIPNRHPVKHFICMVILTQDIFILTKHHITEKLMAAFKPNPINYILGLDIGIASVGWAMVEIDEEENPIRLIDLGVRVFERAEVPKTGDSLATARRLARSVRRLTRRRAHRLLRARRLLKREGVLQAADFDENGLIKSLPNIPWQLRAAALDRKLTPLEWAAVLLHLIKHRGYLSQRKNEEQPADKELGALRAGMKSNTQALQTGNFRTPAELALNKFEKESGHIRNQRGDYSHTFSREDLQAELVLLFEKQKEFGNPHVSDGLKEGIETLLMTQRDSIPDESAILRMQGKCTFEKNKSRAAKHSWSAERFIWLSKLANLRITDEFGTRKLTEIERQILIDLPYKLKTVNYQQVRNALTTLSPNALFNIRYHQKDKKGEIKSSDKIEKDTKFMEMKFWHKIKETLEGNGRKTEWQSLSSNHNLLDEIGTVFTICKNDERRKALLSGKIKEDQDILDILCNHVDFTCTVNLSLEALKNILPFMEQGDDYDTAWRKVYPPQSTKKESVLPPIPADEIRNPVVLRALSQARKVINAVVRRYGSPARIHIETAREVGKSFKDRKEIEKRQEENRKDREESATEFREYFPNFIGEPKSKDILKLRLYKQQHGKCLYSGKEINLGRLNEIGYVEIDHALPFSRTWDDSFNNKVLVLGSENQNKGDRTPYEYLNGKDNSREWQEFKARVETSRFPHSKKQRILLQKFDEKEFKNRNLSDTRYINRFLCQFVADHMQLTGKDKNRVFASNGQITNLLRGFWGLRKARAENDRHHALDAVVVACSTVAMQQKITRFVRYKEMNAFDGKTIDKETGEVLHQKTHFPQPWDFFAQEVMIRVFGKPDGKPEFEEADTPEKLRTLLAEKLSSRPEAVHEYVTPLFVSRAPNRKMSGAHKDTLRSAKRFVKHNEKISVKRVWLTEIKLADLENMVNYKNGREIELYEALKARLEAYGGNAKQAFDPKDNPFYKKGGQLVKAVRVEKTQESGVLLNKKNAYTIADNGDMVRVDVFCKVDKKGKNQYFIVPIYAWQVAENILPDIDCKGYRIDDSYTFCFSLHKYDLIAFQKDEKSKVEFAYYINCDSSNGRFYLAWHDKGSKEQQFRISTQNLVLMQKYQIDELGKEIRPCRLKKRPPVR

SEQ ID NO: 7514 - protein, 1035 aa, synthetic construct
  REGION 1..1035: note = Synthetic
MEQLNYILGLDIGIASVGWAVVEIDHNEDPIRLIDVGVRTFNKAEVAKTGESLSLIRRLARGSRRLVRRKKMRLLTAKRLLKSEGILSDLDFNKGAILNLPNNCWELRVKGLDKKLSDKEWAAVLLHIIKHRGYLSQRKHDRKTDDKELGALLSGVSKNHSLLEEGEFRTAAELAINVFCNSKGHIRNQWGDYSHTFSRLDLQKEIKQLFVSQRELGNPYTSSSFEENIISLLMKQKEAISGNDILKMLGKCTYEKNEYKAAKNTYSAERFVWLTKLNNLRIVDDGVERALNSSERKLLIDEPYKKAKLTYAQVRKILELPDSAVFKGVRYFADNAESSTLMEMKFWHSIRKALESNNLKDEWLVLKTKPELLDEIGTGFSIYKTDDDITSYLSNKLDKKVLDILLVEVSFDKFIELSLKCLRKIIPLMEKGYRYDEAYKYIYGEVNIEYNLNDIKNPVVLRSFSQSRKVINAVIRLYGSPARIHIETARDIGKSFKERKAIEKQQEKNRLEKVRAAEHFKQLFPNYVGEPKAKDILKVRLYEQQQGKCLYSGKILDIKRLMEHGYVEIDHALPFSRTWDDSFNNKVLVLANENQNKGNKTPYEWFNGKDNSDSWKRFLALVNNSGFSAVKKQHILMKEIDEEGFKQRNLNDTRYITRFLCNWVENNIPLLGKGVKRVFAPQGKITALLRSNWGIRKVREDNDRHHAIDAIVVACTTVSIQQRITNYVKNSEINRKIKRQNYLKFPEPWKFFREDISIRVFSNNPIEELKQQLSDRPEANHQFVTPLFVSRAPVRKMTGQGHEDTIRSAKRISEGISVLRVPLTKLNDKSLELMVNREREKELYDALKQRLLEFKNDPEKAFAEPFYKKGGQQVKTVRIERVQKNGVLVNNNTGIADNGNIVRVDVFLKKKKYFLVPIYSWQVAKGILPNKAIVAHKNECDWADMDGSAQFLFSLYTNDLIEVVLKDSTILGYFSSIDRATAALIIKEPDMEKSKGKEGIHRVGVKTARSFIKYNVDVLGKNISRCRKAKRLPVR

SEQ ID NO: 7515 - protein, 1240 aa, synthetic construct
  REGION 1..1240: note = Synthetic
MKRVGLDLGTASLGWALYDDEAFAEAALGETATSCIESGVLVFPEGMDRDTADNLKSWAALRRQKRAARRLIARRKLRKFLMLRALIEAQMCPLSEAGLRRWKQEGRYPLDDEAFMAWLRVSPEQNPYADRAAAAQQRVDRLTLGRALYHMAQRRGFKSSRKERLAELEAAAGEKVDTTSAAAKELSAMKAEIAELTKALEAKQLTLGQYLYALYQQQVAFIRHPEQFAKEPEPVRRRKTGRKEHYQVEFEQIASVQELPADLKEKFSRILFFQRPLRVQRHTVGWCTLEKGRPYYSAEGKQKQGHRYRRCLEGHPAFERFRALALLNNLRVSTEPFDAAGTKQPPRLAPGEGRALTPEERDRLIATLCHKTQKRLREALTAVFGKKTPLRFNFRDSDDAPMMPTTAGFQKLNIPESEWQTALNALVDFDDIDRLIAWAQKRWNFSEKEAIAFVRIAPSVERVSYSLHAIHNILPYLERGFNLKKAIFCGNLRQVVPADHLEDVLAGLEACEAQYAQEKQANAQAWASKAGPKPRLQPLTERYRAYLAERWGVDQAHFEQLYVDTQAPDTEDAVLPPVDLGTIRNPLVSRSLTMLRRLLNTLRREGKIDAQTHIFIELARTVNDANHCRAIELFQKAQAEKRQQAAEKLKEMGKTPTDDLILRYLLREEQGGFCVYTGQPIDDDALCSYDIEHTIPRSRGGSNELSNLTLCNATYNRHIKCNRLPSECPNANAEWSSPELPNPCPQLSLSAPIRKWQQELEELNKALAKKPSRGDNPEKFASRRQAYLLKQLRRDYLRAKLRGFTLTAEEVECSGFAPRQLVDTGIITKRAVAYLRLRYPYVYSRNGAVTASARKAWGLQAEEAKKERTAHIHHAVDACVIAALDNKTFAEFCARLKVAETTHSEAPIPPPFAHFKEHIERSTQSLLVRHLPTNCQLRPFYFRTARLPHDVRVRLQAEGRPLPRLKTLAVRGSLHNDTLYGRIQQGGEIVTTSRKDIQAQQTKADLEKLFKTAADKALGTHLAAQLQHFVDAGVPANQLPFQTYRHPNGLSVRHLRVIVSKPSDPKPLRPQIEDRKGCVYCSGSDALYLELVPDAKGKYKPQYVTLLAKAKAGAITLDQPLQDGAFRIYVSQMVLIYDKTPEELKQLPTTALAKRLYVVQQVEDRGSIYLRYHQEARGRTQLANDLAAIGLPRSGLATFNVTAAVPLLHVSPGNYLSHCCFEGKDFILTLDGRIEWLTHD

SEQ ID NO: 7516 - protein, 1062 aa, synthetic construct
  REGION 1..1062: note = Synthetic
MTGARAMDWVLGIDVGTNSIGWAAFEAGEQTKPIRLLSGGVRLFDWGRESQNAVSLMKSRGEKRRGRRRLRAARWRRDRLCQVLTRLGAAPSDPGPPEVWRLRARAASEPLSGSDVGRVLLHMARHRGFRGSILRPIEPASDEANEQNRWNDAERDLRFAMAQGGHLTVGELLAKRALEGKAVRARRGEGAAPTRALIAEEFDRIRSVQQAALEWTEEDWATIRDLILEQRPLRPPIAGRCSVFPESDERMPLIRPLAQRFRILQTLCNLRLREEPNAAARMLTTEEFEVLLDILDKGGAHSWASLRRAIGIRTRGAHFTIERERAVGAKKADSREVKGCLAASLLGPVIPSWQDLSLEERDRLVARLLQHRANRRALLEFLSAEPWPEEVRAAIADAVQFELTTERLSLGEKAVSLIVPELKPGVPSHEAFERGVGLHHSDRRPRELLDRLPYYGKLLPGRVSGGTGNPKDDDCKRYGTVNNVTVHIALNELRKVVNALLHRYGRPRRIVIETARELKANTRRLQEIAAEQARRERENKDILKQIAEMPRDRGFQISRRERLLRMRLARRQEYICPYTGIVIGQSDVLSAAYQIDHVIPRRRGGTDAFDNLVLCAESANREKGNQTPYEAWGETPAWHAIEHFLSRIEKRHPGLAWRFAPDAMARIERQADDGDGWLPRQMTDTSYIARTAMEYLGHVAPDVVATRGQLTGYLRAHWDFPKERLDHRHHFVDAAIIAVTDRSIINQLSRYQARRGGLPPPSEAEIEIPYPGFTEEVERCYESIWPSRRPDHSLSGPSGQLHRETPLAQVRQDDGTIRLATRIPVRDLLTSNGAPLADDKLLAALDRFRSQRFRRRFEAEIEKLRAAEPGLGLGRAALKVAEDPQWGPSGIRAISCWFNEKRYEPQAIYTVPRSQGSPAAHRAAIDPNANAWAEIRQDHRGRWKVRVVPKIEAARIAPPDPASDSDLVMLLRSGDLVAWETPGGREVGYLKVMKSNGGLFFWPLRLAANMKAAPLSLNVPIKQRDGIYFSGEGLRKSCARPVTVSVLGRLRDPGPGWAEAFQ

SEQ ID NO: 7517 - protein, 1080 aa, synthetic construct
  REGION 1..1080: note = Synthetic
MKQGQIAFSFDIGHSSIGWAAFQVSDAPGTFHSLLGTGVVLFPKDACLASARRGFRRSRRNIAARRSRIDRLKNYLAGLGVLSRDQLDANSNSYPWLLAARILASDGKKTLTWEELWSVLRWYAHNRGYDGNALWAGDDADAGDKEDTDKVKNSIALMEKHKTATMAETVCKALGLDPMGEVKASRIYFKGNNAAFPRGVVTEEVRRILAAHAGKLPKVDDALSDILLRNAATSGLELPARFKGGLLFGQYVPRFDNRIIPACRITGKNTPLKRCPEYLLYRWGRLLNNLTVFGADGQIRTLLPAERQALHSRMEADGFFTKRTLNAALKDVTGCTPANTESFFLTEEMEEALVLDPVKKLLATNQIMKDLWPQLSAESREKAQSSLSAGKKIRLGDILAEMETAGQDTTAASDALASHQKKAKKKNADLATRRLSADYPKGRAAYCREILAKTFDESISGKDSTKEGGCLYETEEIRNRLLREPLVQQTNNHLVRHRLLVFERLLAHMVEEFAGGDEKRIAATVVEVVRELQEFSGLNSKEITHKLNEKLGNFRSVVKNLEEAIANSEERVAITGSLIRKARILEDQGFVCPYTGTHLSYNHLLADRLEIEHIIPRSLRPSDALSSCVMTFRSVNDMKGQRTAMQFICEEQGREVPGHENIQITTKKAYVDYVAKHKKQYPQKSDDRRRCERRAELMLMERYDQRNADFTERDLTQTSHLNKMAIRLVKQRIGIDAKHLPGNVTAFIRQKLHIDECLFNAVPRLQTAAKGQPKSSKRKKKAEEAPVEPIQDDMPPRKLTKADIRELTYLHHAMDAVTQGLALLLFAPEDWPLLVKRNLPDSEQRHLKARYPFLDFSADKHISIQDLPEDTLHTISERLAECRVVRHIPAKMHGIIVDQTTWGTVAAGAITTLRQKTTEKNARCDENGKRFIKTTEKKRSLLLGGPDAPDGKLAKIKGAILVTENWGCALDPSPTVIPHFKVYPQLRALREKNGGRPIRILRKGSLIQVKAGTYQGIWSVASIKDNADGICLDINAADKVKLENRSDDSKINVRLDSLRKSGLKILKPKLTGACPTTSSP

SEQ ID NO: 7518 - protein, 1081 aa, synthetic construct
  REGION 1..1081: note = Synthetic
MKQDQIAFSFDVGHSSIGWAVFQIADTPESFHSLLGTGVVLFPKDSCLASARRGFRRARRNIAARRSRIDRLKNFLAGLGVLSRQQLDANPNSHPWLLAARVLASGGQKTLTWEELWTVLRWYAHNRGYDGNALWAGDEADSDETDDTEKVKNANALMERHETRTMAETFCKALGLDPLGDVKASCIYFKGNNAAFPRDAVTEEVRRILAAHAGKLPKVDDVLSDVLLKNAAAADLELPARFKGGLLFGQYVPRFDNRIIPACRITGKNTPLKRCPEYLLYRWGRLLNNLTVFGAAGQIRTLLPAERKALHARMEAEGYFTKRTLNAALKDATGCAPANTESFFLTEEMEDALVLDPVKKFLATNQVLREVWPHLSAECRKQAQTALYSGKIIRMDELLAAMETAGQDTAAAREALAVLQKKAKAKDADLATHRFSAKYPNGRAAYCREFLAKTFAESMAGKDSAKEGGCLYETEEIRNRLLREPLVKQTNNHLVRHRLLIFERLLDQMVAEFAGGDKKRIAATVVEVVRELQEFSGLNAKEIAQKLNDKLGNFRSVVKSLEEAIAHSDEKVAITGSLIRKARILEDQGFICPYTGASLGYPDLLNDRLEIEHVIPRSLRPSDSLSSCLMTFRSVNDMKGQRTAMQFICEEQGREVPGHGNLQITTKKAYEAFVAKHKKQYRYGTDDRRRCERRAELMLMERYDQRNADFTERDLTQTSYLNKMAIRLVKQRIGIDAKHLPGSVTAFIRQKLHIDECLFNAVPRLQKAAKGEGKQPQRKKGAAEPPAEPVNDDLPPRKLTKTDIRELTHLHHAMDAVTQGLALLLFAPEDWPLLVKRHLSDSEKRLLKARYPFLLFNGDNDFSIQDLPEAALKTISDRLAECRVVRHIPAKMHGIVVDQTTWGIVAAGAITKLRQKTTEKNARYDENGRRFVKTAEEKRSLLLGGPNAPDGKLAKIKGAILITENWGCALDPAPPAVIPHFKVYPQLRALREKNGGRPVRILRKGSLVQIKDGRYQGIWIVTGIKDAAKGIHLDLLAPDRVKEESGCDDSKREVDLETLRNSGLKILKPKLTGTCPTTLSP

SEQ ID NO: 7519 - protein, 1142 aa, synthetic construct
  REGION 1..1142: note = Synthetic
MKIMLQNFAGASYFFPRRKTSLFRYPLKNNPSKTNIGKSKTMDPANLALSFDIGYASLGWAVFLLKDPFPSLLGSGSVLFQKDSCLASSRRAFRRARRNIAARRSRVARLKKYLASLGVLEREQLDENACAYPWLLAARVLASDGKEKLSWQELWHVLRWYAHSRGYDGNALWAGDALDETGADDEDTQKVKAARALMEKYGKTTMAETVCADLQLEPFGEKRASRRYFKGNNAAFPRETVRDEVRRILLAHAGVLPKVDDALAATLLNDVPENLCAALRLPARFSAKGGLLFGQYVPRFDNRIIGHCRITGKNVPLKNCREYLLYRWGRLLNNLTVFARDGSIRTLSADKPNGRPSEREKLDAEMRSRGFFDKKKLNDLLKEITGCEPANTESYFLIPEMEDALILDPVRKLIATKKLVKDFWGYFSERGKKIFAAELAKGKTLKLSDCIKRMDGWGGWKTKPLFAAALEKLKAAEMKKKPEKRRNLLNLRIKAEFPTGRASYCREILKKTYEEALAGKDSTQPGGCLYETPEIRERLLRGNAVGDDAGTVATEQWLAGQTNNHMVRHRMLIFSRLLRDIIREYAEGDAARVKDVVVEVVRELKEFSGLSAQEIATKLNEKFANFNSVAEKIEAAAQEKGVSVSASLIRKARLLEDQGFACPYTGKNISYNELFSGALEIEHIIPRSLRPSDALSSCVMTFRAVNDMKGQRTAMQFMKECAGKDVPGTNLQIQPLANFKEWVEAHRSQKLRRGFSKEDQARCKRRAELLLVERYEERNADFTERDLTQTSHLNKLAIRLVKRELGIDARHLAGAVTGFVRKNLSIDECLVAAVPRMQRAQRVSEHDSRKLLKSQMRELSHLHHAMDAITQGLTGILFRVEDWKLLVKRHLTERERAVLAAKYPTLLRFSANGEIALKPLPDSLLSEITARLKECRVVQHVPAKMHGLAVEQTTWSIVSQDEATRKVSLEQHTTDLKKGRYKDDGTRFVKNCEEKPALLLGFGVPEEQKSKLQAIKGVVKICENWGCALDPEPVVIPYFKVFPRLRELRERNGGKPVRVLRRGQQIEVLSGKFKGVWTIVSIKDATRDGILLDICAPDKVRQTEHGTTDSKVGVLLKSLLRAGLKILKPPLTGFACPTTSSQ

SEQ ID NO: 7520 - protein, 1089 aa, synthetic construct
  REGION 1..1089: note = Synthetic
MSLADIALSFDIGHASIGWSVFQIADPFPLPLGAGVMLFPADSCLASSRRGFRRSRRNIAARRSRVARLKKFLLGLGVLDKEALDENSVSWPWLLAARVLASDGAETLSWQELWSVLRWYAHNRGYDGNALWAGDAIDAEETGDNEDSQKVEAARELMARYGKNTMAETFCAALGLDPFGEKRASRIYFKGNNAAFPRETVENEIRKILRAHVGRLPGVDDAFIDVLLKNVPEEIRVSQKLPARFSSRGGLLLGQYVPRFDNRIIGKCRMTGKNVPLKNCREYLFYRWGRLLNNLTVFDASGNIRTLSAEERKALDAEMRSKGFLDKRSLNLLLKQITCCEPANTESFFLIPEMEEALVLDPVKKLVSKKNYLKDLWPCFSRRGKKIFASRLARGEVLTLGDCIGKMDAWGEWPEKSRFDAVFETLKLAENKKKPEKRRNLLKLRIAAEFPSGRASYCKEILQKTYEEALEAKDSTQPGGCLYETEEIRERLLRGSVSETESSGNEERWIASQTNNHMVRHRLLIFSRLLRDIVAEYADGDIRRVGDVVVEVVKELKEFSGMSAQEIATKLNEKFANFNSVSRKLEAAAEEAGVPVTGSLIRKARLLEDQNFTCPYTGKQISYNELLSGVLDIEHIIPRSLRPSDALSSCVMTFRAVNDMKGQRTAMQFVKEFAGKDVPGTNLQILPIKDFEAWTEAHKRQKLRKGFSKEDQNRCRRRAELLLLEKYEERNADFTERDLTQTSHLNKLAIRLVKRELGINARHLAGAITGFVRKNLCIDECLVAAVPRMQRAARVGEHDPRKLLKSEMRDLSHLHHAMDAITQGLTGVLFRTEDWKLLVKRRLSERERRLLSTKYPDLLRFSSEGEIGMKPLPDLLMKAVEARLAECRVVRHVPAKMHGMSVEQTTWSIVSPSAENGKVALAQHTTDMKQGRYDASGKRFVKCASEKPSLLLGFETPEGKPGKLKSIKGVVKISENWGCSLDPEPTVIPHFKVFPRLRELRRLNAGKPLRILRRGQLIEVLAGKFKGIWMVVSIKDNQGGIALDLNVPDKIRVENKTSDSKINVRLNSLIRSGLKILKPRLTGVKCPII

SEQ ID NO: 7521 - protein, 1113 aa, synthetic construct
  REGION 1..1113: note = Synthetic
MFSAEGPNPRSTQGIPMNPTDTTARRDLVFAFDIGHSSIGWAVLREGAKYDLGALRVVAAGTVLFQKDSCLASQRRANRRTRRTIAARRARVANLSAHLEKLGVLTSAQLRANTTSAPWLLAARVLASGGARKLAWPELWAVLRWYAHNRGYDGNALWAGDEAAPADDPEAAEDTEKVENARKLLEQYGKSSMAETMCAFLGLDPLGRKQASTRYFKGQKAAFPRDVVVAEVRRILEAHKGVLPKVDDALVLALLEAAPDPKRTFRGGLLFGQKVPRFDNRLIPHCRITGKNTPNKSSRAFLLYRWGRLLNNLVVYDGSTRAARTLTPDERRALHEKMLAEGFFDKRSLNRALREVTGCEPYNTESYFLTEEMEEALVLDPVKKLVATNQILKAIWPVLPDHAKTWAENRLRKRRPLTAEAIFDEMRAHGDDPAPARAALAAIRGRGRSRSRAAVAPEKKHLAASFPSGRAAYASPILLKAFGQCLDGIDPASPEGCLYETPEIRGRLLAEAGNIDHLTNNHLVRHRLRIFRRLLGQMLDEFAGGDKTSVGSVVVEVVRELQTFSGLDSVAMAKKLKQQLGNFRSVAKELEKEAAAAGVLVTGSLLRKARILVDQGFRCPYTGVKLEWDHLFTGQLEIEHIIPRSLRPSDALSSCVLTFRSVNDMKGQRTAAQFIKECQGQSIPDIDRPELRVLAQERYRKNVDAIKKPAKKYSPSKDDFKRCRRRAELLLLESYDQRNADFTDRDLTQTSHLNKLAIRLVRHDLGIDAIHVPGSVTGFLRPKFSLDSCLSAAVPRIQAEQKKRRAQAAERLGIRLGEGELPEDAEERLTSASRLVKQEIRDLTHLHHAMDAVTQALSYLLFDPADWKILLKRHIPERDRLRLQAKYPILAFSRDGDLSIPAIPPALLQSAVQALEQKRVVQHVPSRMHGISVEQTTWRILDASNPDQIKLDQQRRDERTGLPTRKKAEEKASRLLGGPFAPDNSKLKAIKGAVTIKNNWGLALDPVPTIIPFFKVFSRIRELRRQNQNRPIRIIRRGTLLRIERGNYAGTWRVLSPKSTQDYGLCLDLVNTDNPKDSNARFPDFRGNAKIEKLLQGGLTILKPTLTGSCPTT

SEQ ID NO: 7522 - protein, 1156 aa, synthetic construct
  REGION 1..1156: note = Synthetic
MNYFLGLDLGSGSIGWAVIEKQNGIPVRIIALGSRIVPLTPNESDNFSQGKAVSINQQRTQKRTARKTLDRYQMRRALLCETLTDNDMNPTHELMCASKEELWKMRSDAATQQISLKEIGRVLYHINQKRGFKLAKNEASSTDTTEQTYIQSINQRCAAIAGITIGQYIYSELIKNPEFRYRQLVYSREKYIEEYDTIMKCQQQFYPDVLTDELISKIRNEIIFYQRKLKSCKHLVSYCNMELHEIKVADGRIVISGPKTAPKSSPLAQVCKVWESINNIVLCNKKGDTFSISDEQRMAIFQFMERNEKLKVTNLYKILGISKKDGWWGGKAIGTGLQGDTTRIKIEKALNGKYPHLLKFNIDNSGKCVNKDTGEELPCVKDTAFNEPLFKLWHTLYSISDIEELKAALRKNFNITDEYVLDNLSSIDFVKEGYANKSHKYMRKILPQLQKGVMYAHACEIVGSSNCSDYKATKRANNGALLLSPIAKGELRQPVVEKVLNQMVNVVNALIEKYGEFEEIRVELARDLKQNREERNEDYKRMTTQNKKNLEIAKRIQQEYKLYPTKARIRKYRMWEETEHRCIYCGAPVSIKEFLSGIDAEKEHIIPRSLLFNDSFSNTTCACRSCNHDKGQMTGFDYAESKGKAFFDDYINRINKLADKKEISRSKFKNLTTKREDIPQDFIERQLRETQYISRKAVEMLQSLYADKPSGKLYVKTSGGIITDFLRHQWGWDTVLHQSNFKRFEKAGLIENVPVITKGEKHFEKRIIGWNKRIDNRHHAIDALTVACTQQSHIQRLNTLNANKEAFTKLDATTNEGYRAFIKRVAQEAPFTTAEVLEAADNIIVSFKPITKSTTPGKRKVFKNGKPIIKQTGILVPRGELTEETVYGLIQRYDGKGGFNACSVVRYPLSKITSQAVADSIVDEGIKQIVKKRLKEHNDNAKIAFSTPLYSDVAQTKEIKGVRCFSGHPRASLAIVKRDENGKPIGFSPTGNNHNVAFYLNENGKPVELVCSFYHAIQRRLFNIPTIIENPSEVWDLIETSGKEYSEEFLSQLPNPKWTFAFSLQRNEMVIIGLTKNDFEYALQNGDKKTLAQHLYKVQSISHNSYCFTRHTETKYDKKHTNKADERFMRYASASSLLRDFTAKVSINVIGDIIEK

SEQ ID NO: 7523 - protein, 1145 aa, synthetic construct
  REGION 1..1145: note = Synthetic
MIGKRMYRFAFDLGSGSLGWAVFELNSSMEPVGLKDLGVRVFPTGRDPQSKESNALGRRQPRQQRKQIDRRKKRRIELEDQLVAAGLMPPATDASQKCKRCSPPAEAPGFSEADEICTRCKFFAINPYEARNRAARGKTDVYDLGRAIWHMSKHRGFKSNRKADRTNEDDTGKIAPASAALRKTLADHNAPTYGAWLAGRQEQGQQVRVRPVGEGAKSAYDFYPARVMLKDEFDHIWRVQAPHHPNLSNEERDAIRDCVFFQRPLKPVKPGRCTFFPDNYRLPKWHPLAQEFLILQQLNMLRIIDDSGERALDLTARDLIARHLMSGEKLTWSSSKKGLRGVLRLPLEVRINLQEGGLRELAHNAVVAPLAVKTAKKEAPLAGIWHELDPRRQLLLLKIVAVTHSPERTVERLENWIGLSREIAEKVEEITLPDGHLMLGECAVRAILKVLRKEVVVYSDAVKVASERGLFGDGVVIHHSDLRPEDDPGLPDLPRYNELPALRRMVGTGTGDPDDPPDIRFGRISNPTVHVALGQFRRVMNALISHFGKPRQVVIETTRDMAKSARELKEIDNEIKENTKRNDKWRAELEDEGIVATGARIGDRFLRMRLWEELGTSNADRICPYSGRPISLHQLHSDEIEIDHILPFEDTFDDGPANKTVCFRDANRIKGKSAPGDAWSGKELEAVIARVKSAPGMKHKLWRFLPGAFEKWQQDKGFEDRQLHATGYLARVVRAYAEALFPKDGTSNIWMPSGRMTAMMRRRWGLYLPDHNAKTRDDHRHHALDAATVGMIDRRMIQKLQSYARQIGAEDLDRVLPAPPPPFVGFSEQVRDQVSELTVSHRPNHAISGRLHEDTAYGLVRDRPENQAARTIGNLVKRKPVSDLSSDEIGQIRDVPLRDALLEHTDGRRKGKKDRGDALNEWQKAGEQDIDPNSPERLAKQRMWIAENYPDYETQSKKSRARIRARANVELGIGVIPNHARRARILVRDETARPILGRVGHPREGEPYKWMIPDENAFIEILEDVGGKWFRYGVDIWSAASKTARPWNEAHPEARFIMRLFKRDTIQLFDWDKTEKAIVPGSNQIMLVTSIPNSVTNNYVRFQPVNDATSDNSTTAAFDTLRLRRARRVRIDELGRVRIVPHGTV

SEQ ID NO: 7524 - protein, 1115 aa, synthetic construct
  REGION 1..1115: note = Synthetic
MKRFAFDIGSGSLGWSVFRLEGDGRKPVELVDMGARIFPTGRDPKSRESNALGRRGPRQQRRQGDRRKKRRGALEGVLAAHGLMPPAGDDEGRQDFFSTDPYEARARAARDEAALLYDLGRAIWHISGHRGFKSNRKADRTNKDDTGKIADATRNLREMLVQEGAPTYGAWLAGRHAQGAPVRIRLNNEKGYDFYPNRAVLEEEFDHIWRMQAQYHPNYLTDKARDEIKSVLFFQRPLKPVKPGRCTFFPDEDRLPKWHPLAQEFLILQELNRLRIIADKGECSLDLTQRDLLLNHLMSGKKLTWAGVRKALGIPPDIGINLETGGLKKPAHNDVAARLAVGTKKNPAPLEEWVRRGADKQVLLLSILNDSETPDVAIRRLQDECGLAADIAERVEKVTLPTGHIRLGLRATRAIVRAMRDEVRVYSAAVGYASASGLFGDGVVLNHSDLRPEGDPGVARLPRYYEVPTLRRMIGTGTGVPADPPEIRFGKISNPTVHIGLGQFRRVMNALIDRHGKPDQVVIETTRDMAKSARELNEIETEIRKNTNRNDRWREELEECGLLPPGGRAGDRFLRMRLWEELGKTCADRLCPYSGRPIGLTDLHSDRVEIDHILPFSDTFDDSPANKTVCFRAANREKAGRSPGDAWGDTTLGAIIDRVKDAPGMKRKLWRFLPGALEKWQEDKGFEERQLHATGYLAKVVRAYAEALFPKDGTAHIWMPNGRMTALMRRRWGLHLPDHNAKDRNDHRHHALDAVVVGVIDRATVRMLQTHARRIGAQQLDRVLPEPPEPYDGFRDQVMDRVRNLCVSHRPDHAISGRLHEDTAYSLVRDIPENAAALNIGNLAARKPVTALTAKEITRVRDQRLREELRKVTEAVKGDKNRENALSEWSSRTGAQDHLAQQRDWIAEYYPDYEQRSKRQRARIRAKANKDLGNYGFKNVRTVRVIKPKKSAKPVKSAPYKWMIPDGIAYMDVLENPDGKWFCHATDIWAAQTAPEEPWKEDHPEAKFIMRLYKNDTLQLFELDKTGLPVPGSNRIKKIVQLDRSSSRVYLVGVNDAGEYRKRHEDPDDPFRWDLAKIGKLKARRAHKVRVDELGRVLTIPHGTMPRVPSKKKPS

SEQ ID NO: 7525 - protein, 1088 aa, synthetic construct
  REGION 1..1088: note = Synthetic
MRQHRFAFDLGSGSLGWAVYELAPSSSGKPRPTKLVDLGVRIFPTGRDPQSRESKASGRRQPRQMRRQLYRRKKRRGELEGKLVRHGLMPDKSNHAQRKKFFAISPYEARSKAAQGEAELYELGRAIWHMSKHRGFKSNRKTDRANEEDSGKIAEGSKQLRQSLADETAATYGDWLAKRHAKGDLVRVRLVGAGAKASYDFYPLRDMLEDEFTRIWNTQAQHHSHLNDAMKEDIRDTVFFQRPLKPVDPGRCTFFPDENRLPRWHPLAQEFLILQALNHLKWTDERGEEHSLSLDTRNVIAKQLMDGVKMTWAGLRRVLKIPSSAIVNIQGDSKKEKQGALKEPPYNLVAWKMENKTRKKGIEIPAPLPRWHTWDEAVRMQVLTILDEGIEPEATTKRLIDECGLDQDTAAAVEKISLPEGHLRIGESAAKAIVRELRADVIVYSEAAERAGLHHSDLRPDDAKGLDALPPYNRLETLQSAIGTGTSNPDDPPDKRYGCIANPTVHVGLGQFRRVINALIRRYGKPKQIVIETTRDMAYSAQDIKDHERARAANTQRNDAWRKELEAEGVMEPGAKAGDRFLRMHLWEELGESPAARCCPYTGRPIALHQLHSDQVEIDHILPFAATFDDSRANKTVCFRKANREKAGRSPSDAWSGDKLQGIIQRVVAAPNMKHKVWRFREGALKDYLDKRDFEDRQLNATGYLARVVRRYAEALFDKDGTSNVWVVPGRMTAKLRHRWGFYLSNDNYKNRDDHRHHALDAAVIGLIDRALVQQLQTWAGKYGASEINKHLLPPLPEEWEPIRDKVRQRIAQVQASHRPNHASRGRPHHSTGGALHEETAYGQVPEEEQEAQGLGNLVFRKSVEALEPGEINRIRDGHLRAQLKDYTQSHLGNKKALREALQQWGEDFRGYETEKNANRRHGTRSLRIVKRDQSARQIPGQRKWVIPGENLFVEILEQGGKWFGYGVDRWGYASRTAKPWQEAHPGAKFIMRLYKGDTIQLYDWHKERKAIIEDPGRNRVKRVIRIGIVAQALMIAGVNEGGTLVKRHNDPEDRFRWDIPSFDRMRQRRARRVRIDETGRLRVVPMG

SEQ ID NO: 7526 - protein, 1079 aa, synthetic construct
  REGION 1..1079: note = Synthetic
MYRFAFDLGTNSLGWAVYRLTNDTRPASIERTGVRIFPNGRDPQSKESNAAGRRMPRGARRRQDRSLGRRKRLLDDLIGFGLLPSDADARSAVFAANPIEARARAAREQVALEQLGRALWHMSKHRGFKSNRRADKDADEKGKIAIASAALLERLRADGHPTYGAFLHARLVRGEGTRIRPAGDGAKLSYEFYPTRALLEAEFDHIWAIQAGFHPSLTEAMHERLRDTIFFQRPLRPVRPGKCTFFPDQDRLPRWHPAAQEFLILSQLNHLRIVDDQGEQPLDITARDLVARTLMAGTKLSWSGLKKTLKLPSQAEFNLEKGGLKELARNDVAARLLGDTKKPGPLATLWPTLDSATQEEILWQISEVADPEELICWLMERLGLSREVAERVEKIPLPDGHLRFCKTATQAIVEKLRCDVIPYDEAVRRAPLLGGAGLDHSDFQAEEGVDTLPPYNRLPVLQRMIGNGTSDPKDTDLLRYGRITNPTVHIALGQFRRVMNALIAEYGKPAQVVIEATRDMAKSAEELNKIEKTIRDNEKRNDRWRAELQKAGLLVEGARIGDRFLRMRLWEEIGRGPADRLCPYTGRPIALHQLHSDEIEIDHILPFEQTFDDSPANKSLCFRDANRRKGKLSPAAAADRQPDFFDLAAIIGRTKHLPANKAWRFLPGAMEKWEETRGFEDRQLNATGYLARVVRAYTEALFPKTDAEGKRRSHVWVLPGRMTAMLRHRWGLNLGDHNRKSRDDHRHHAIDAAVVGVIDRRMVQVLQTHARNLGVERLDRVLPAPPEPFEGFRDAVLAAVEKVNVSHRAQHGSIDPTDPSQTSGRLHEDTVFGLVRDVPENQAERTIGNVVVRKPITGLTEKEIGQVRDVKMRLSLQDATSLARDKSLPEAERKKRLPEALAKWVQETGHRKLRILKPEAGVRPVHDRDGKPYKWLVPGEISWLDILEAPDGTWFQHATDIWAANSGGAEPWNVAHPSARFIMRVHKNDTIQVFDWDDRNKCVVEGSNQIKRIVRLEPSANRMRLVGINDAGKFDERHNEPNDPFRWDLATISKLKLRRARRVRIDELGRVHTIPHGTV

SEQ ID NO: 7527 - protein, 1078 aa, synthetic construct
  REGION 1..1078: note = Synthetic
MASGSRCSMKRFAFDIGSGSLGWAVFHVDNAGRSPTELIDLGVRIFPTGRDPQSSESNAMGRRQPRQQRRQIDRRKKRRVELEERLQAHGLMPAAGEVDGRAVFFSIDPYCARDRAAGGRAELQDLGRAIWHMSKHRGFKSNRKADRTNEDDTGKIADAAKALREKLANAGAPTYGSWLAGRHAQGEPVRIRPVGEGAKTSYDFYPTRAMLEAEFDHIWRLQSKHHPSLTEEAREKIRDTLFFQRPLRPVKPGRCTFFPSDERLPKWHPLAQEFLILQQLNMLRFLDERGERPLDKDTRDLVMNHLMAGEKLTWARLRRTLKIPAGTEINLEKGGLKEIAHNATASRLAGTAKKPGPLSDLWPHWKEEARNMLLSVLDTAASPEEAIDRLTGEFDLPRDIAERVEKIALPSGHLMLGLRATRVIVQAMRDEVVVYSDAIERASGRGLFGDGVVVHHSDLRPQGDPGLPRLPRYYELPALQRMIGAGTGNPDDPPEVRFGRIANPTVHIALGQFRRVMNALIDRYGKPDQVAIETTRDMAKSARELNEIDAEIRKNTKRNDAWREELEESGILSPGARAGDRLMRMRLWEELGRTPADRLCPYSGVPISLTQLHSDAVEIDHILPFEDTFDDSSTNKTVCFRAANRIKGKRAPGDAWSGEELEAIIERVKGAPGMARKLWRFLPGALEKWQAQRGFEDRQLHATGYLAKVVRAYAEALFPKDGTSNIWMPTGRMTAMLRKRWGLHLPDHNSKTRNDHRHHTLDAAVVGVIDRRTIQILQTHARRIGAKELDRLLPDPPEPFAGYRDQVLERVAKINVSHRPDHTSGGKLHEDTAYGLVQDLPENRAARTIGNLVVRKPVTAMTAKEIGQVRDQKLREELLAATEGVRSDKKKLAEALKSWSERTGHLRLRILVEDKSARPVRAHAGKPHVGKPYKWMIPNEIAYIDVLEDIGGRWLHHATDIWTPQDAEPEDWRKVHPEATFVMRLFKNDTVQVFELDNEGSPIPGSNMVKRVVRMEPSANRVRLASCRDAGNLDQRHKDEDDPFRWDLATISKLKARRARRVRIDELGRVRIVPHGMI

SEQ ID NO: 7528 - protein, 1075 aa, synthetic construct
  REGION 1..1075: note = Synthetic
MYRFAFDLGTNSLGWAVYRLDDRSHPASLEKLGVRIFPNGRDPQSKESNAAGRRGPRGSRRRQDRTLGRRRRLLDDLIEFGLLPSDADARSAVFAANPIEARAKAAREQVALEQLGRALWHMSKHRGFKSNRRADKDADEKGKIATASNALMERLKSESHPTYGAFLHARLARGEGTRIRPTGEGAKLSYAFYPTRALLETEFDHIWATQAAFHPTLTDGKRERLRDTIFFQRPLRPVRPGKCTFFPDQDRLQRWHPAAQEFLILAQLNHLRIVDDHGEQPLDITTRDLVARTLMSGTKLTWAALRKTLKLPTQAEFNLEKGGLKELARNDVAARLLGSAKKPGPLASLWPTLDNAMQVEMLGRIADTADPEELIGWLMDRHNLSRNAAEKVEKIPLPDGHLRFCLEATQAIVEEMRKDVITYDESVRRAPELGGAGLDHSDFQAVEGVDTLPPYNRLSVLQRMIGNGTGDPNDPELVRYGRITNPTVHIALGQFRRVMNALIAEYGKPAQVVIESARDMAKSVKELNKIEGDIRKNTARNDRWRAELQAEGLLAEGARVGDRFLRMRLWEEMGKGPADRLCPYTGQPIALHQLHSGEIEIDHILPFEDTFDDSPANKTLCFREANRIKGKRAPGDAWSGEDLAAIIARTKHLPANKAWRFLPGAMQKWEETRGFEDRQLNATGYLASVVRAYAEALFPKTDDEGKRRSHVWVLPGRMTAMLRHRWGLNLGDHNRKSRDDHRHHAIDAAVVGVIDRRMIQVLQTHARRMGVERLDRVLPAPPEPFEGFRAAVLRAVEKVNVSHRAQHGSADPSDPSQTSGRLHEDTFFGLVRDLPENQADRTIGNVVVRKPVLDLTEKEIGQVRDVKLRLSLEKATRSARDRSLPDAERKKRLPEALAKWVQDTGHRKLRILREEKSVRAVCDRDGKPYKWLVPSENAFMDILETPDGTWFQHATDIWAANSGGAEPWNVAHPNARFIMRVHKNDTIQLFDWDNKNKCVVEGSNRIKRIIRLSPSNSVIYLVGTNDAGDFQKRHNDADDPFRWDFANVGKLKLRRARRVRIDELGRVHTIPHGTI

SEQ ID NO: 7529 - protein, 1094 aa, synthetic construct
  REGION 1..1094: note = Synthetic
MKRFAFDIGSGSLGWAVFRIDDKGRTPTELLDLGARIFPTGRDPQSRESNALGRRYPRQQRRQIDRRKKRGVELEGRLVAHGLMPPADDVEGRARFFRIDPYRARDRVARDRAELHDLGRAIWHMSKHRGFKSNRKANRTNEDDAGKIADAAKALREKLADTGAPTYGAWLAERHGNGDPVRIRPAGEGAKISYDFYPTRAMLEAEFDHIWRMQARHHPNLTKEAREKIRDTLFFQRPLKPVKPGRCTFFPDDERLPKWHPLAQEFLILQQLNMMRFLDERGELPLDQEKRDLLMNHLMAGEKLTWAGLRRTLKIPAGTEINLEKGGLKEIAHNATAARLAVGTKKNPAPLADSWHKIDPRRRLLLLKILAVTANPERTRGRLENWVGLAPDAAANVEKVTLPPGHLMLGLRATRAIVQAMREEVIVYSAAIERASERGLFGDGVALHHSDLRSEGDPGLLRLPRYYELTALQRMLGTGTGNPDDPPEIRFGKIANPTVHIALGQFRRVMNALIDRYGKPDQVVIETTRDMAKSARELNEIDAEIRKNTKRNDAWREELEEGGILAPRARAGDRFMRMRLWEELGKTPADRLCPYSGKPISLTQLHSDEVEIDHILPFEDTFDDSPANKTVCFRAANRIKRKRAPGDAWSGEELNAIIERVKGAPGMARKLWRFLPGALHKWQEQRGFEDRQLHATGYLAKVVRAYAEALFPKDGTSNIWMPTGRMTAMLRRRWFRNLPGHNAKTRDDHRHHALDAAVVGVIDRRTIQMLQTQARRHGTEELDRLLPDPPEPFPEYRDQVLARVAKLNVSHRPDRPITKREAMARRERGEKHIPSTVNGRLHEDNAYGIVQDNPENQAARTIGNLVKRKPVIDLSKDEIGQVRDERLRQELLNATEGKRDDKKAREAALREWSDRTGHQRIRLLVMDNTAMPVDGRMGHPRENEPYKWLIPGENAFVDILESPDGRWFHHGTRVWEAASCKDRQWKEVYPEARLIMRLYKYDTLQLFQWDPKEKAVIPGTNTIKVVRSIPDSPTNKNVRLVGANLAIPFSDRDKQRDGEQGWEAVAYDVLRKRRARRVRVDELGRVRIVPHGVI

SEQ ID NO: 7530 - protein, 1115 aa, synthetic construct
  REGION 1..1115: note = Synthetic
MVWIFHLIAGKTTPLLLLGVSRYRGIYWLGKYFGGPMHRFAFDLGTNSIGWAVYRLAADMLPASLERTGVRIFPNGRDPQSKESNAAGRRTPRGARRRQDRSLGRRKRLLDDLIKFGLLPSDAESRKEVFAANPHEARAKAARDQVELYELGRALWHISKHRGFKSNRRAENDGDEKSKIAIASAALLKRLRSEGHPTYGDFLHARLARGEGTRIRPTGEGAKLSYAFYPTRDLLEGEFDHIWVTQAAFHPSLTEDMRRRLHDTIFFQRPLRPVRPGKCTFFPDEDRLPRWHPAAQEFLILSQLNHLRIVDDHGEQPLDITARDLVAHTLMAGTKLTWSGLKKTLKLPSLAEFNLEKGGVKELARNDVAARLLGDTKKPGPLATLWPTLDSPTREEILWQISEVADPDELICWLMERLGLSREVAERIERIPLPDGHLRFCKMATQAIVEELRLDVIPYDEAVRRAPLLGGAGLDHSDFQAEEGVDTLPPYNRLPVLQRMIGNGSGDPNDPDLLRYGRITNPTVHIALGQFRRVMNALIAEYGKPAQVVIEATRDMAKSAEELKKIENTIRDNERRNDRWRAELQDAGLLAEGARIGDRFLRMRLWEEMGRGPADRLCPYTGRPIALHQVHSDEIEIDHILPFEETFDDSPANKTLCFREANRRKGKLSPAEAAVRQPDFFDLPAIIARTKHLPANKSWRFLPGAIQKWQETRGFEDRQLNATGYFAHVARAYAEALFPKTDDEGKRRSHVWVLPGRMTAMLRHRWGLNLGDHNRKSRDDHRHHAIDAAVAGVIDRRMVQVLQTHARNMGVERLDRVLPAPPEPFDGFRDAVLSAVEKVNVSHRAQHGSIDPRDPSQTSGRLHKDFAYGEVRDVPENQTDLTIGNVVRRKPVIGLEKDDLDKVRDVKLRESLRAATEGVKDDKAKLTAALFEWSQKTGHRTLRIIKPASTARPVYGRPGKPRAGEPYKWFIPDENVWIDILQSPNGKWFGFGIDVWAANSGTGQTWQELHPDAKFIMRLHKNDTIQLFDWDDNEKCIVPGSNRIKVVNSIPNSPTNKNVKLVGLNDAGKFAGRHNDKDDPFRWDWPPYDRLRLRRARRVRIDELGRVHTIPHGTV

SEQ ID NO: 7531 - protein, 1090 aa, synthetic construct
  REGION 1..1090: note = Synthetic
MYPGTGWYGKHFGGAMHRFAFDLGTHSLGWAVYRLDADLLPVSLEKLGVRIFSSGRDPKSKESNAAGRRGPRAARRQRDRRLGRRGRLLGDLINLGLLPQDAQARNAVFAADPHEARARAAREQVSPEQLGRALWHMSKHRGFKSNRRADNDADEKGKVATASNALLERLRSEGHPTYGAFLHARLLRGEGTRIRPTGEDTKLSYEFYPTRAMLEAEFDHIRATQAAYHPSLTNDKWERLRDTIFFQRPLRPVRPGKCTFFPDQDRLPRWHPVAQEFLILSQLNHLRIVDEYGESPLDITARDLVARTLMGGTKLSWAALRKTLKLPSQAAFNLEKGGLKELARNDVAARLLGDAKKPGPLASLWPTLDSATQVQMLGRIADTADPNELIGWLIERHGLTREVAERAERIPLPDGHLRFCLKATQAILEEMRREVITYDEAVRRAPLLGGAGLDHSDFQAEKGVDILPPYNRLPVLQRMIGNGTGDPNDPDLIRYGQITNPTVHIALGQFRRVMNALIVEYGKPAQVVIEAARDMAKSAEELNRIESEIRKNTQRNDRWRKELQQAGLLVEGARVGDRFLRMRLWEELGKGPADRLCPYTGQTIAPHQLFSDEVEIDHILPFEETFDDSPANKTVCFRVANRIKGKRAPGEAWSGTDLAAIIARTKHLPPNKAWRFLPGAMQKWEETRGFEDRQLNATGYLARVVRTYAEALFAKTDDEGRRRSHVWILPGRMTAMLRHRWGLNLGDHNRKLRDDHRHHAIDAAVVGVIDRRMVQVLQTHARKIGADGLDRVLPAPPEPFEGFRDAVLSAGEKVNVSHRPQHGSIDPSDPSQTSGRLHEDTVFGIVRDVPENQADRTIGNVVVRKPVLGLTEKEIGQVRDVKLRRSLEEATRSARDKSLPKKERDKRRAEALAAWSKETGHRKLRILKPEAAVRPVLDREGRPYKWLVPGENAYMDILEGPDGTWFHHVTDIWAANSGGAEPWNIVYPDARFIMRVYKNDTIQLFDWDEKNKCIAEGSNRIKRVVRLSPSNSVLYLVGINDAGDFKKRHDDTQDPFRWDLANIGKLRLRRARRVRIDELGRVHTIRHGIV

SEQ ID NO: 7532 - protein, 1098 aa, synthetic construct
  REGION 1..1098: note = Synthetic
MPVRFAFDLGTTSIGWAVYDLDPALWKTVHKARLTGLRKLGVRLFDDGRDPQTGDSHAANRRLPRAMRRQQDRRLARRDRLERDLMETGLLPPPGLERDRLFTCAHPYQTCAEADDADCRNPYRLRALAATGKISLHDLGRALWHISKHRGFASNRKTDPDEDDTGLIKSAARALAETLTETGHATYGTYLWSRLKAGEGVRVRPQGEGAEKHYDFYPTRQMLDNEFDAIWTEQAKHHSELTDAVRDRLRETIFFQRPLRPVDPGRCTFFPQKPRLPRWHPSAQAFLILQQLGHLRIIRETHEERLDPDKHRVLFDALNGGQKMTWTQVRKTLGLTSQDDLNLHSGGLKHLHFNQVAAALLGTKKPGPLAEQWPGYDTATREQILAKLADTENPDALRDWLTGTLALDAHTAAAVEKVRLPDGHLRFCREATEAMVAEMRSGDVLTYNEAVNRAPLLSGIDFTDSRPEKGVCTLPYYNELDHMQRLLGNGTGNPEHPHDMRLGRITNPTVHIALNQFRRVINGLIAEYGKPAQVVLEATRDLGRSPREKAEIEKTIKANEKRNDRYRADLEEAGYLKPGQRVGDLFLKMRLWEELGRNEADRCSPFTGRPIGLHDLHSDAVEIEHILPFGETLDNSPANKTLAFRDENRRKGKLSPGEAAELGIFDQEAMIERTKHLPRNKAWRFLPDAMEVFEEQKSFEDRQLHATGYLAKVVRGYAETLFDKTDVDGTERRHIWMLPGRMTALLRHRWGLNLSDHNRKNRDDHRHHAIDAAVIGVIDRAIITQLQKAAKQHGADALSRVLPAPPEPFEGFRDAVMTAIRDVRASHRARHVTADATDPSQTSGRLHEATAYGPVRDVPENQADLTIGNVVVRKPVTALTAKEIGLVRDVAIRHDLQEATAPARAPDLPKTEADKVRAKLLAEWSARTGHRRLRLLKAEASVRAVHDSNGTAYKYHAPGENACLDIIDVDGTWRCHALTLWDANSGQNTHWRDLYPDASFIMRLHKEDTLQLFDWDDEEGTVIPGSNAIKRVVRLSPSNNVVYLAGLNEAGKLQQRHGNEEDDFTWDFANISKLKFRRARRVRIDELGKVHTIPHGKV

SEQ ID NO: 7533 - protein, 1073 aa, synthetic construct
  REGION 1..1073: note = Synthetic
MASKFGVKMFRFAFDLGSGSLGWAVFELEEIGHKPIALADMGACIFPTGRDPKSKESKAAGRRQPRQQRRQTDRRKKRRVELENRLVGAGLMPPADDEEARRAFFDLDPYLARDRAARGRAELNDLGRAIWHISKHRGFKSNRKTDRSNEDEKGKISEASAALRRLLAERGAPSYGAWLAERHRAKQPVRVRPVGEGIKTAYDFYPIRSMLEDEFDHMWRVQAPHHSHLTQNAREEIRDTVFFQRPLKPVKPGRCTFFPDDYRMPKWHPLAQEFLILQQLNMLRIIEGSVERSLDLTARDLIARHLMSGERLTWAGLKRQLNLPSDTKLNLEDGGLKELPHNATAARMVGTKGKSGPLAVVWPGWRDEDRLRVLEVLDEAMTPQAAIDRLVSHCSLELALAEKVEKIPLPDGHLMLGKRAINAILTVMREQVVVYSDAIDRASERGLFGEGVVVKHSELRPEGDPGLPNLPRYNELQVLQHMIGTGTGDPRDQPDIRFGRISNPTVHVALGQFRRVMNALIVRYGKPAQVVIETTRDMAKSARELNEIESEIRKNTKRNDEWRAELEAEGIVAPGARIGDRFLRMRLWQELGASNADRICPYSGRPISLHQLHSDAIEIDHILPFEDTFDDGPSNKTVCFRAANRIKGKRAPGDAWSGEELAAIIARVKGAPGMKRKLWRFLPGALEEWQEQKGFENRQLHATGYLARVVRAYAEALFPKDGTSKLWMPPGRMTAMMRRRWGLHLPDHNAKTRDDHRHHALDAVTVGMIDPRMIQRLQTYARRIGSEELDRVLPDPPEPFAGFSEQVRDRVAKLHVSHRPDHAIGGRLHEDTAYGLIRDVPENLAALTIGNVVVRKPVADLTAKEIGQVRDEAIRQELLAETLNRTSDKKVLAETLKAWSKRSGHRRLRIIKPAATARPVHDKDGQPYKWMVPGEIAWLDILEDGEGQWFHHAVDIWAAQQATPADWEAEHPGSRFVMRLFKGDTVQLFDLGQDGNIVPGSNTIKRIVRLSPSNSVLYLVGVNDAGDYQKRHADNDDPFRWDFANIGKLKYRRARRVRIDELGRVRTVPHGTA

SEQ ID NO: 7534 - protein, 1049 aa, synthetic construct
  REGION 1..1049: note = Synthetic
MTKRRFSFDLGTNSIGWSILSLDSSGKPIDLIDCGARIFPDGRNPKDKQSLAVARREARSARRRRDRYLKRRDELMGRLVTFGLMPSDRDGQKQLEHLDPYALRATGLDDALHPHHLGRALFHLNQRRGFKSNRKTDRGNDDSGITKIGMKNLQDALKAEGCRTLGELQHRHHQANQTPAADTAPQSVRAKVRGEGAKAYYDFYPSRDAIADEFDQLWDAQAAFHPDILTADAREKIHDTIFFQRKLKTPDVGKCTFNNAERRLPTAMPIVQHFRILQFVGDLRLIDAGLVRHPLDRDQRTLLYRALLAKPKLTFKAIRKTIGIGSEFTFSHETEKQTDVKGDLTAAILGTPKYFGPKWRDMSMADQTEIVDKLIHEENEEILIETLHNRFGFDRTKCEAIADAKIPDGYSRLGKTALETLVEIMRDDHLPYDLACKKAGYDHALLPDGEILDELPYYGIALERHVAFGDGESDNPEKRYGKIANPTVHIALNQLRHVINALIARYGHPDQVVLEIARDLKQSKAKRDEINKQQKKNQDKNDQRRTKLQELGIAINGENMLRLRLWDELDEHNIAARSCPFSGENISISRLFSPEIEIEHILPFSRSLDNSPANKTLCLRGANRAKGNRTPWEAFGRDGETGYDWAEIATRGARLPHNKSWRFAPDAMERLERDGDFLDRQLTDTQYLSRIAREYVSKICDPNAVWVTPGRLTAWLRRHWGLESILSTGNATKNRDDHRHHAIDAIVIGVTDRGILNRISRAAAIAEAEDLDRIIADMPEPFADFREKVRHKVDEIIVSHKPDAGFVPGHRHGAATPGALHNDTAYGIVETNAKGISTVVTRKDVMSFGSKKDIETIRDLTIRQSLVDAVADTGAGAPFKDALRNWSVQTGTKRVRVETKLSVIPIHDRAGKVYKGYKGDGNLCAEIYQRPDGKWGDEIISRFDAVQPGFTPQWQRNFPTARRVMRLFRDDMLMVDIDGTMTVCKVVQLSSGMITLTRHHEANTDSRNRDKDDPFKYTYCSGDALRKRRARKLFVDPLGKLRGDTPEDG

SEQ ID NO: 7535 - protein, 1050 aa, synthetic construct
  REGION 1..1050: note = Synthetic
MSSYRFSFDLGTNSIGWAVFELDPKTRPVALADCGVRIFPDGRNPKDKQSLAVARREARAVRRRRDRYLKRRSELMERLVAKGLMPESRDDQKALEGLDPYALRAAGLDDALPPHHFGRALFHLNQRRGFKSNRKTDRGENSETGITKIGMKKLHEALLSEGCRTLGELQHRHHEANQTPAMDTNPKSVRSKLRGEGAKAVYDFYPSRDAVEDEFNKLWDSQKRFHPDLLTDSARDAIRDAIFYQRKLKTPDAGRCSFNPAEERVARAMPIAQHFRILQFVGDLRLIDNDLVRHPLNNDQKKALYRDLLAKGKLTFKAMRKTIGIGSEYAFSHESEKQSEFRGDETAARLAGPKYFGPKWRELSFNDQSEIVDRLLHEENEETLIQYLQDRFGFDHDRCEVIADAPLPDGHTRLGKTALETLVEIMRDDHLPYDQACTKAGYEHALPPDGVILDDLPYYGIALERHVAFGDGKSENPEKRYGKIANPTVHIALNQLRKVINALIARYGHPDQVVMEIARDLKQSKAKRDDISKEQKKNQDRNDQRRKKLQEAHIAVNAENMLRMRLWEELDEDNAAARACPFTGETISMARLFSPEVEIEHILPFSRSLDNSPANKTLCMVWANRAKGNRTPWEAFGRDREPGFDWPEIAARAARLPKNKSWRFGPDAMERLEREGDFLDRQLTDTQYLSRIAREYVTKICDPNQVWVTPGRLTAWLRRNWGLNGILPTGNATKNRDDHRHHAIDAIVVGLTDRGILNRVSRSAALAEAEDLDRSIAEMPDPFDGFRDNIRHILEQIIVSHKPDAGFVPGHPKGNTTPGALHNDTAYGIIKTDAKGMSEVVTRKDVLSFKGTKEIESIRDAATRQSLLDAVAGVPSGLAFKEALRDWSVRTGTKRVRVTFNMSVIPIQDRDGKAYKGYKGDGNLCAEIYERPDGKWGDEIISRFDAVQPGFTPQWQRDHPAAHRVMRLFRDDMIMAEIDGVMTVCRIVKMSPGKVVFTPHHEANTDSRNRDKDDPFSFHTCSGESLRKRKAQKLFVDPLGKIRGYRAKEG

SEQ ID NO: 7536 - protein, 1049 aa, synthetic construct
  REGION 1..1049: note = Synthetic
MSSYRFSFDLGTNSIGWAVIALEKNLRPNGLVDCGSRIFSDGRNPKDKQSLAVARREARAMRRRRDRYLKRRDELTDRLIAHGLMPRNADERQSLVDLDPYALRAKALDEHIPLYHFGRALFHLNQRRGFKSNRKTDRGSTETGITKVGMKKLQEALANEGCRTLGELQHRHHQANQSPTADANPQSVRAKLRGEGAKAAYDFYPSRDAVEDEFNQLWQSQKRFHPKTLTDEACESIHDAIFFQRKLKIPKVGKCTLNPAEERHARAMPITQRFRILQFIGDLRLIDGDLRKHPLTPDQRDALYREFLAKNKVTFKRMRVLLKAGPEMTFSHETEKQTEIKGDETAAILAGPKYFGPAWRELPLADQSEIVEKLIHEQDEETLVDFLQSRFGFNREKCEAIADAPIPDGYARLGKTALQTLVTIMEEDDLPYDQACKEAGYDHALLPDGEILDELPYYGIALERHVAFGDGESDNIEQRIGKIANPTVHIALNQLRKVMNALIALYGHPDQVVLEIARDLKNSKSRKDDIAKQQKNNQDANDRRRKDLLATDTSINAENMLRMRLWEELNPNDPLNRACPFTGDPISRERLFSSNVEIEHILPFSRSLDNSPANKTLCMTWANRAKGNRTPWEAFCRDGEKGYVWDDILARAANLPKNKSWRFAPDAMERLERDGDFLDRQLTDTQYLSRIAREYVSKVCDPNQVWVTPGRLTAWLRRNWGLESILPTGNATKNRDDHRHHAIDAIVVGVTDRGILNRISRAAAIAETEELDRIIAEMPEPFDNFRDQVRNKVEKIIVSHKTDTGYTPGRKNGDATPGALHNETAYGIIETDAKGISEVVTRKDVLSFKSTKDIDAIRDPATRQSLLDAVAGKTTAIDFKEALRDWSHTTGTKRIRVTSKLSVIPIRDANGTVYKGYKGDGNLCADIYERPDGKWGDEIISRFDAVQPGFEPAWKRQYPAARRVMRLFRDDMIILEHNGLMIICRIAQLTAGKVIMAIHYEANTDKRERDKEDPFSFLRCSGDSLRKRKAKKLYVDPLGKLRGHIPEDG

SEQ ID NO: 7537 - protein, 1409 aa, synthetic construct
  REGION 1..1409: note = Synthetic
MKNSAHILGLDLGTNSVGWALLNANQFRIAGNGSRIIPMTGDVMTDFAKGKLQSAASQRTAFRNVRKNIERVKQRRYRLLQVLHILGFLPQHFSQQIDFVNHRGHFIDEAEPLLPYRCDASGRHTFIFEESFREMLADFAIHQPQLVADGRKVPHDWTLFYLRKKALTQPVSREELAWIILNFNAKRGYYQLRGMGESEEKDDGTVFARIQVAAVEAMGPSKRRRGQTIYCIRFDNGCELNRESECPPFAVGDQVDVLCTTKTDKNGQPKLNEQGKPQVVVSIPDADDWTFRKKKSECDIELSQCTVGAYIYNHLLAEPDDKIRGHYIHTIERKFYRGELEQILHKQQEFIPELTDKDLLQKCALALYTTPERAAQHITKGGLTDFIVRDILFYQRPLKSQKKLIANCPYERYRHVDYATGELVEHRIKCVPKSHPLFQEFRLWQFISQLRIYQREAQVGERLVPDYDVTDRLLPDAESRAQLFDHLFAKKEFSQKDLLGFKPFKLSVEQRKGFRWNYPEEKTYPANRTLMSIPKEYRDCFDEKLWHLLYSVTDPEEIVKALNRFARERGISDADAFVEALRKVVFAETGYGAYSLKALKHLLPLMRCGHHWKSDAFDAFTLHRLELLQTEPNSFSETARKQCAGITGVAVCQGLPLHKACYLLYGRYAESDDLTVWHKPEDIDYYLRHVFKQHSLRNPVVEGVVTETLRVVRDIWKTYGRIDEIHVEMGRDLKQNSEERKQTFDRNSENERANYRARRLLQEFAKPEFDVENVRPYSPLQLEVFSIFESTILNDAANSEEKLQYKDVINDLGLASKADKVSHSDILRYRLWLEQKYRSPYTGMFIPLSKLFTPAYEVEHVLPKARYYDDSMRNKVICEKEVNKLKDKMTGYEFIIRRGGEVVKGAFGQTFTLLTREAYEAFVKTHYAKLPGKMKILLMEDIPQEFNNRMLNDTRYISRLIMTLLSKVVGEEGEEGAKSKHIINTNGRMTSELKRQWGLNEVWNHLITPRFERLNQRLNTTEFGEMREVDGKRFFQTQVPLHLPPVNRKRIDHRHHALDAIVIACTTLNHVTYFNSVAAKDEVQGARYDLRRLLCEKTRTDDCGNYTWTFKKPWETFTHDVELALDNVVVSFKHAERVLGQTKDGHITIRKPLHKATIYGAVQLPRAGKEAMVAGRKELDESFNAKKIQSITDTGIQSILLRHLANNGGDPKVAFSVEGKVRLQQQLKELNLGKPHKPIYKVRVSEPLGLKFAVGKRGCRKAQFVETEKGTNLFFAIYQRPNGDRNFQTVSLREAVVNLVELHQPAAETLADGSKLLFVISPNDLVYVPAMGEVPVIDQLDSKRIFKMVSCYDDRCSFLPQSVASFIYPKVEYLSHNIIENTDDGISIKKYCLKLEVDRLGHITNIIGL

SEQ ID NO: 7538 - protein, 1253 aa, synthetic construct
  REGION 1..1253: note = Synthetic
MNAKHYILGLDMGTNSIGWAAIDAETQQIIATGSRIIPMDERSITDFDKGVLQSSAAQRTLYHRMRITNERAKQRRERLLRVLNILGFLPEHFRQQIDFEKHFGQFKNHSEPLIAYCPDATGKKEFLFRQSFEEMLNEFRQVHPELVAEGKKIPYDWTLYYLRKKALTQPVSREELAWILLSFNAKRGYYQLRGMSDELQTADDQKQFCVLTVMQVNQGKEVKAGSQTYEYHIVYDNGKEETKKGKQAPYPIGHQFEAICTTKTNKDGTTTFSTSTPDPEDWTLVKKKTEHDIKLSGKTVGAYIYDEILAQPSVKVRGKLIHTIDRSFYRNEMEQILRAQTAFHKELRDDVLLRRCANELYRRPERQPRIEQLVKQGFLHLLVDDVLFYQRPLKSKKSEIADCPFEQYHYVNRSTGECVDEPVKCIPKSHPLFQEYRLWQFIHNLRIYQKEAEVNGRMVLNYDVTDHFLPNHEVRCQLFDYLNERADVKESVLLKFKPFGLSKKADLERYRWNYPSENTYPCNKTLYTIPKDYRRYFNQKLWHILYSVSDPEQIVKALRSFATEHQIPDTDAFVASLTSVVFSEKDYGSFSEKALKKLLPLMRCGSRWQSSAIDEATQERIQHFLHKPSHEDISDSVRKALANCHCIEDFQGLPVYQACYAVYGRHSEAADLTAWKSPDELAYFLRYTFKQHSLRNPVVERIVLETLRIVEDLWRKYGKMDEIHVEMGRNLKQNAEGRKRDYDRNQENQAANYRARRLLQEFARYETDIENLRPHSPYQQDLFRLYEEEVLGNYADEVKKDKQIAKTIQSLGRPLEACKVTASEVHRYRLWLDQKCKSPYTGQPISLARLFTRDYEIEHVIPKTRYYNDSMNNKVICEAEVNKDKGNMTGYEYILQRGGSIVQGAFGKTFTILKREEYEDYINLHFKHNRAKKANLLMEDVPAEFSERMLNDTRYMSRVVLSLLSKVVRDDDEVSSVSKHVLPTNGSITTRLKSDWGINDVWNDLIAPRFQRMNERMHTDAFGEMRNESGKRFFQPRLPLDIPQIDKKRIDHRHHAMDAIVIACTTRNHITYLNSVSSHDGYNATRIDLRTKLCLKHHTDANGNYQWLFKKPWDSFTQDVRAALSNIVVSFKQNLRVLTSSKKGGSSIRKPLHKETFSGKVLLQQVKTISLKDALADWHQIKDKTLRQEIKRLLAEVYPAGNVSQLIKHFKLQKNLFNGKDIRKVEVYTYSQGEETQVANRKLLDKTLTLKQI

SEQ ID NO: 7539 - protein, 1160 aa, synthetic construct
  REGION 1..1160: note = Synthetic
MKNSAHILGLDLGTNSVGWALLNANQFRIAGNGSRIIPMTGDVMTDFAKGKLQSAASQRTAFRNVRKNIERVKQRRYRLLQVLHILGFLPQHFSQQIDFVNHRGHFIDEAEPLLPYRCDASGRHTFIFEESFREMLADFAIHQPQLVADGRKVPHDWTLFYLRKKALTQPVSREELAWIILNFNAKRGYYQLRGMGESEEKDDGTVFARIQVAAVEAMGPSKRRRGQTIYCIRFDNGCELNRESECPPFAVGDQVDVLCTTKTDKNGQPKLNEQGKPQVVVSIPDADDWTFRKKKSECDIELSQCTVGAYIYNHLLAEPDDKIRGHYIHTIERKFYRSELEQILHKQQEFIPELTDKDLLQKCALALYTTPERAAQHITKGGLTDFIVRDILFYQRPLKSQKKLIANCPYERYRHVDYATGELVEHRIKCVPKSHPLFQEFRLWQFISQLRIYQREAQVGERLVPDYDVTDRLLPDAESRAQLFDHLFAKKEFSQKDLLGFKPFKLSVEQRKGFRWNYPEEKTYPANRTLMSIPKEYRDCFDEKLWHLLYSVTDPEEIVKALNRFARERGISDADAFVEALRKVVFAETGYGAYSLKALKHLLPLMRCGHHWKSDAFDAFTLHRLELLQTEPNSFSETARKQCAGITGVAVCQGLPLHKACYLLYGRYAESDDLTVWHKPEDIDYYLRHVFKQHSLRNPVVEGVVTETLRVVRDIWKTYGRIDEIHIEMGRDLKQNSEERKQTFDRNSENERANYRARRLLQEFAKPEFDVENVRPYSPLQLEVFSIFESTILNDAANSEEKLQYKDVINDLGLASKADKVSHSDILRYRLWLEQKYRSPYTGMFIPLSKLFTPAYEVEHVLPKARYYDDSMRNKVICEKEVNKLKDKMTGYEFIIRRGGEVVKGAFGQTFTLLTREAYEAFVKTHYAKLPGKMKILLMEDIPQDFNNRMLNDTRYISRLIMTLLSKVVGKVRLQQQLKELNLGKPHKPIYKVRVSEPLGLKFAVGKRGCRKAQFVETEKGTNLFFAIYQKPNGDRNFQTVSLREAVANLVELHQPAAETLADGSKLLFVVSPGDLVYVPAEGEVPEIDKLNRKQIFKMVSCTENRIFFLPQTVASPIYPGTEFGSLNKVEKNDEGVTIKTRCLKLVVDRLGQITNIIGL

SEQ ID NO: 7540 - protein, 1479 aa, synthetic construct
  REGION 1..1479: note = Synthetic
MNAKHYILGLDMGTNSIGWAAIDAETQQIIATGSRIIPMDERSITDFDKGVLQSSAAQRTLYHRMRITNERAKQRRERLLRVLNILGFLPEHFRQQIDFEKHFGQFKSHNEPLIAYCPDATGKKEFLFRQSFEEMLNEFRQVHPELVAEGKKIPYDWTLYYLRKKALTQPVSREELAWILLSFNAKRGYYQLRGMSDELQTADDQKQFCVLTVMQVNQGKEVKAGSQTYEYHIVYDNGKEETKKGKQAPYPIGHQFEAICTTKTNKDGTTTFSTSTPDPEDWTLVKKKTEHDIKLSGKTVGAYIYDEILAQPSVKVRGKLIHTIDRSFYRNEMEQILRAQTAFHKELRDDVLLRRCANELYRRPERQPRIEQLVKQGFLHLLVDDVLFYQRPLKSKKSEIADCPFEQYHYVNRSTGECVDEPVKCIPKSHPLFQEYRLWQFIHNLRIYQKEAEVNGRMVLNYDVTDHFLPNHEVRCQLFDYLNERADVKESVLLKFKPFGLSKKADLERYRWNYPSENTYPCNKTLYTIPKDYRRYFNQKLWHILYSVSDPEQIVKALRSFATEHQIPDTDAFVASLTSVVFSEKDYGSFSEKALKKLLPLMRCGSRWQSSAIDEATQERIQHFLHEPSHEDFSDSVRKALANCHCIEDFQGLPVYQACYAVYGRHSEAADLTAWKSPDELAYFLRYTFKQHSLRNPVVERIVLETLRIVEDLWRKYGKMDEIHVEMGRNLKQNAEGRKRDYDRNQENQAANYRARRLLQEFARYETDIENLRPHSPYQQDLFRLYEEEVLGNYADEVKKDKQIAKTIQSLGRPLEACKITASEVHRYRLWLDQKCKSPYTGQPISLARLFTRDYEIEHVIPKTRYYNDSMNNKVICEAEVNKDKGNMTGYEYILQRGGSIVQGAFGKTFTILKREEYEDYINLHFKHNRAKKANLLMEDVPAEFSERMLNDTRYMSRVVLSLLSKVVRDDDEVSSVSKHVLPTNGSITTRLKSDWGINDVWNDLIAPRFQRMNERMHTDAFGEMRNESGKRFFQPRLPLDIPQIDKKRIDHRHHAMDAIVIACTTRNHITYLNSVSSHDGDNATRIDLRTKLCLKHHTDANGNYQWLFKKPWESFTQDVRAALSNIVVSFKQNLRVLTSSKKGGSSIRKPLHKETFSGKVLLQQVKTISLKDALADWHQIKDKALRQEIKRLLAEVYPAGNVSQLIKHFKLQKNLFNGKDIRKVEVYTYSQGEETQVANRKLLDKTLTLKQIESITDSGIRKILMRHLANYQDAAGKYRTEEAFSPEGLAEMNAHIRELNDGKPHQPIYKARFSEILGQKFAVGQNGAKAKQFVEAAKGTNLFFAIYANEDGKRSYETIPLQDVIARRKRKEEVAPSVNEHGERLLFTLSPGDLVYLPTEEGVVPQVLDKKRIYKVVSFSKCRCFFVPQSFSTTLYDKCEWGSMNKIELTDNKENIKALCVKLKVNRLGEIIEIIDGQ

SEQ ID NO: 7541 - protein, 1084 aa, synthetic construct
  REGION 1..1084: note = Synthetic
MSMADYILGLDLGPNSIGWAMLEAEVRDEDGTTSVIEKGFLDTSHAGHPPLGARVFEAGLDNLNTSKEKSLSQKRRTSRSMRRNHARRNARRKTLLRHLIHADLFPGSPEERESLLKQNPYELRTLALDERLDPHQLGRALYHLTQRRGFKSNRKSGKAKEDKGILKEIGQLAKDIENHGSRTLGEYFYHLSQDESGSFRPLELGWLRVREQHTRRDMYEDEFKKIIDSQRRFHPGILLDELVENLHKAIFFQHPFELTDERRMRAPAGANLHRAPSVRPCPLEPDEKCCPKAEWIAQRFRILKEVNNMKIAENYGLERSLSEEERQSVIERLSLSENVTFDQIRATLAKQGCDPEALFNLERGDRKKLNGNIIDSKLSATLGKKKWKELEATSKQNLRNALLHSEDPESLEATLIDSGFDEEKAEKLADWNPPDGYIGFSEKALSLLVPHLEIGLDEYEAIQKEYPDRPEGHEVDQLPALSSKDLPHDLRDITNPIVRRALVEVRKVLNALIREHGKPRRIVVELARDMKAGPEERKKYSRQRYERENLRDRARKEVEGLGGNPNNRNDINRWLYWTEQDHSCPYTNRRIPQDELFRGGEWEVDHILPHWQSLDDSMNNKVLVLRVANEKKGDRTPAQWLGVESEEFRKLIQRVEGMVRKNGLPYPKLLRMKQDEVKVDDFALRQLNDTRYISKAVVKYLNLLFPPKLRVGELAVQSSRGSLTWELRRHWGLNNVLDDMLDKNGNPVLSPELDEDGEPKKSRKDHRHHAIDAVVVALSSRRNLKRYQDYWKKHNRAAQRPFFEDPWDGLRDEVSHHAKAINVSHRVVRKVDGPLHEETFFGRALDQDGKPFSDTYVTRKPIESLTGKMVKHIRDRCVKTLIETRLTEKGWDGKANSLPKDWSTEGIHIPSKASAEGIPVRKVRIEEIHSNVVDLGHRFAKSGSNHHIAFFEVPSQNSGEQPQLEAKIVSRMEVAKKVRQDKLPPISRIHGAGGHFLMSLCRKDSVLLSDHTGSNKRLCIVQNISTGTDEMPFYLVFRDARDSRPASEGNKAPYQRLVSEVAWHRLKLEKVQVDPLGRISKAND

SEQ ID NO: 7542 - protein, 1082 aa, synthetic construct
  REGION 1..1082: note = Synthetic
MADYILGLDLGPNSIGWAMLEAEVHNVDGSASIIESGFFDTSHAGHPPMGVRVFEAGLDNLNTSKEKSLAQKRRTSRSMRRNHSRRNARRKALLKHLVKNGLFPKDPDEREVLYKQNPYKLRTIALDKKLDPNQIGRVLYHLAQRRGFKSNRKSGKAIEDKGILKEIGQLAKDIESHGSRTLGEYFFNLSQDDSRSFRPLELGWLRVRNHHTRRDMYEDEFQKIIESQQRFYPETLTDELIKELHGSIFFQHPFELTDERRKRAPAGANLHRAPSVRPCPLEPNEKCCPKAEWIAQRFRILKEVNNLKIAENFGLERALSEEERQTVIERLSTSENVTFDQIRATLAKRGCDPEALFNLERGDRKKLNGNIIDSKLSAALGNKKWKELEVTTKQNLRNALLHSEDPESLEATLVDAGFDGGKAKKLADWNPPDGYIGFSEKALLLLVPHLEAGLDEYEAIRKEYPDRPEGHEVDQLPALSSKDLPYDLRDITNPIVRRALVEVRKVINALIREHGKPRRIVVELARDMKAGPEERKRYSRQRFERESLRDRARKEVEELGGNPNSRNDINRWLYWTEQDYSCPYTNRRIPQDELFQGGEWEVDHVLPHWQSLDDSMNNKVLVLRTANEEKGDRTPAQWLGVKSEEFRKLIQRVEGMVRKNGLPYPKLLRMKQEEVDTGDFALRQLNDTRYISKAVVKYLNLLFPPELRKGELAVQSCRGGLTWELRRRWGLNNVLDDMLDKNGNPVLSPEYDEDGEPKKSRSDHRHHAVDAVVVALSSRRHLKRYQDYWKIHHTEGQRPYFKDPWDGIRDDVAHHAKAINVSHRAVRKIDGPLHEETFFGRALDQDGKPIPNTYVTRKPIENLTGKMVKHIRDPHVRSLIESCLREEGWDGKANALPKDWWTEGVNIPSKASADGIPIRKVRIEEVHSNVVDLGHRFANSGSNHHIEFFEMPNQDSTEQPLLNSRIISRMEAAKRVRQDKLPPISRSHEAGGHFIMSLCRKDSVLLNDHTDSNKRLCVVQKISTGTEGMPFYLVFRDARDSRPASEGNKTPYQRLVSEVAWHRLNLEKVQVDPLGRISIAND

SEQ ID NO: 7543 - protein, 1255 aa, synthetic construct
  REGION 1..1255: note = Synthetic
MGKKQLRYRVGIDAGLYSVGMAAIEIDDSSDNPYDALPIRLLSCQSVIHDGGVDPSAQKSADSRKKIAGVARRARRLNKRKRLRLKDLDVTLVNLGYPVQRAKNLIDEIKDPLIPWRARKTLLEGYIENEAQRKLNLTVAIRHIARHHGWRNPYSNVSSLAEAAKKPSSFYFEYFDRLQLWLRSEDLPCYEGVSFKEIKNKAATKKDAATEENEETKEKSYEVVRPELWDSPDCVYPTVPELITVLVSPEEKYLLPDKKYALRKRKEANSKKGATYIGKLHQSDNYYELNRIFEVQKVPNEERKAIFDKVFSQVNPKDVGAAKELVGNDQLDPTQKRASKASIEYQKYVILTTLHNLRIKDGDISRELSLEEIAKVFEFLCSDKANGKSSELDWHDVADVLGIEKNQLAGVGGTTEEGEPISVKVPPSLKSIKALKSVKGYNDKLSVVKEWWEDSSDYAREFFIESLSNSGMPNPGNDPEFQAATGAVEQLYEQLGELDESVLSELDKIKIVSGRAAYGLRTLHTLNQLMLNEGLNLHEARKKAFGIEDDWTPEGNPLGTKLGNPAADRTIAIVARWLKACEKEWGAPETVNVEHTREGFKSEKVSREIRKENDKRYDANKSVRDEIYREVYGLDGTTSDSISKADVRRYLAIQRQNSQCAYCGKKIDFYTAQMDHIVPRKGPGCSNVISNLVAVCEQCNVSKSNILFYEWASKEKRSEVSGRVDTWLKDGYFSSDKQFKSYKRDVKARLNQKNEDEPLDSRSAESVAWMARELIKQIETHFSYKGKVGFSTEGNNDFVVKRVNAFNGRLTAEARRASGLERKMPWMDGDKRKTRLDRRHHAVDAAVIAMLRPSVAKTLMERQSIRDTEVVQGYYSDKMDEWKKYEGFKFADIEIYRRWRDEQMSRLIAVLAEDMRRGAVKVLYPIRLRLGIGKAHDDTIFEMAKKPLGSSWTPVAIDKVESPQIWQALTELEDYDEIKGLPVNDNRTIVVKGKRFGRDHLVGVLAQPNDIDKVESAVRMPVRGGYAGIGSTIHHSRIYKTPKYNSKGKLTGFTFESVRVFQVDLLKHRGKDLFSIELDQSSYSLRNATLNIRKALQNGEAEYLGWLVTNSIIVVDNSDSFFDPEKNKKINLIMRAFPECREFVVTGFGTNAKLTVRPAQISSENLPDYKEYWRDALGRQKNKEVNSDMESDSVEFASGEFTKEELKTLFEALEKGVPLAINALMQTSPWVVYRNTLGQTRYKSNNHMPTSWLVE

SEQ ID NO: 7544 - protein, 1363 aa, synthetic construct
  REGION 1..1363: note = Synthetic
MKKILGLDIGSGSIGWAFVNEAENNDPKGLSKIVKLGVRVVPYGDNMVKKDALGNISTSKEPIKDFEKGMALSLNARRTQMRGMRRNLQRYKLRRENLVAILKENGLITDITALFEATKNSTFETLRLRAKAAEDRIELEEFARVLLMINKKRGYKSSRKAKNEEEGAAIDSMGIAKQLYDHNLSPGEYVVQLIENGKTTIPKFYPSDLRAEFESIWKYQSTHYPEVLTAKVLNDLNNFSRSQTTKYFLNQLQTDSSKLVGNPKEKKEAKYRLRAKAIHEKLPLEDLIHVFAEINGDISNSSGYLGAISDRSKELYFKRITVGQYLYEQVANNPHAQLKKQVFYRQDYLDEFEKIWEVQAKAHPILTKKLKTEIRDTVVFYQRRLKSQKHLITDCELEKYHKAIPKSSPLFQEFRIWHNLLNIRLSKTNEGEYVLNEEQLNILGHKLSFKEQISGAELVKELKLEKGWKCNFSKIEGNRTNCKMLSAFLRIVEHEGYELNPDSETLLIDLKAIFSSLNFDTQVLEFDIPFKDEGFDKHPNFQLWHLLYSAEDDRKLKDVLANKYGFNESASAILANISFESDYGRYSSRAIRKLLPLMQEGNDLSESLALIGYQKIKPEIIEELELLKLGALRNPVVEKVLNQVINLINAILKHPEMGRPDEIRIELARELKKNAEQRRDMTKGIADATANNDRIRKLLSSEFGIQKVSKNDIIRYKLWEECGYVSIYSGEIIPKSELFGNKYDIDHIIPRSKLFDDSYSNKVLCERAWNEEKGNKTAKEFLEVKLSADDFASYLKRIEDLKAKKEGISKTKFLKLSWDSADIPEDFIKRQLQESQYIARKAKEILQQISLKVSTTIGPITDRLRTDWGLVDVMKELNWNKYQSLGLTEEIVDKTGKKHRKIRDWNKRNDHRHHAMDALTVAFTKPSFIQYLNYLNARDRHDQIGKEVFGIQSKELFKDDANKWRFKSPMPGFRNEAKKHLEEILVSRKANNKVVTLNVNKIKIGSGKFRKQIIETPRGQLHNETIYGSLKRYKTKLIPINASLDLETILKVANKGHREALLLRLEENDNDPKKAFSGKNSPSKKPILFKGGIETLPSKVKISYLEEEFSIRKDVNPENFKNVKSLEKIIDAGARRALEKRLEESNDAKTAFSDLEENPIWLNEEKRISIKSVKISGVKNAEALHRKRGIDGELILDDQGKEIPTSYVSTGNNHHAAIYEDSEGNLYDEVVSFYEAVQRYKQDKTVVWNPNSLGHPLKFTLKKNEYFVFPAEGFDPLEIDLRDPENYSIISPNLYRVQAVSRLAYGTAIIREYVFRHHLETLVETNKALQNITYKKIKSLEPLKQIVKVRVNYLGEIVQVGEY

SEQ ID NO: 7545 - protein, 1074 aa, synthetic construct
  REGION 1..1074: note = Synthetic
MHTKETVWGFDIGKGSLGEAVRVGNEFKHVLSMEIDADFAEIKTAAATRRAWRTREAHKAREMWLEKCLSDADIEILGRRKVDIVDGTWKLVSRGDGRLEREFPADGENVCYNSIALRCKLLLGEKLESWQVFKALNSAIQNRGYDAQIPWGDEDGKSSETKRSGKSDSAKKSGEDESYAERLALFEREFDKLLAEVENREKYDFPCFFKAAKMGLWSPENPDKVGIRIDNTAEKAKGYVVPRNAVIAEFRALVNAAAKQYPKLKGKADFIMFGKAEEAYASYKPELRRKFGLRRGADSDWTALGQKTPRFDNRIIGKCKLIPRLNVCKIKPLKECKTEDDFLPHTITLALKLLNLRFFRGAGIDSLSFDEFLRAFEIARQNKFALNKTNLKKFFKTIGAEIMDENQSSVEQPREGGRAAYSRPAMRLLRDLIFSGKSPAEFYASRICKIENTDKNRGLVAEDLAFIKLMGDIPWNGIFVPDVDTFNFANIRESERADKINKLIGSQNDPIVRHRLAFFYERIKLLESKFGAPDKIVLEFVRDDFLGSKAKKEMSQGIKKRFEEKKKLAEELDSQRAEFGNKYASKKMLLKFELYKKQRGRCVYTDNALPLSELENLEVEHIFPRSRGGADAMYNYVLTDENTNKQKGERTPFEWLSSDKTKWESYCDRVRSLTQSLGAKRCKLLVSPNAEELMQKYTALAETAWISKLAQKICCIHFGFQFGGLKGEKKVWTVSGNTTAMIRGRYGLNRLLHNEEISEDLPLLDRIVKEKNFEEKNRDNKKHHALDAMCICFAPTSNAKKALSRKNILPEEIAKNPESDDARKFFAKYLAEVVPTKVAIKKPELEQTIYSKRVIGGRQTIVKKCNVRDLAYKGQNPKYDFDTLTKRIKDIINPVSKRVIEDFAKTEPTEAEWEDWCKYEAAIPSKNGSPTRLLRVLVEIGNPEEYKDLSKDGCGAYRKGDSHKGQFIWKNKKGRYIVAPIYAHASKAKVLDDLQNNPDCAEICGFFRTNCLVKIPNDVADKDGKILLKAGFYKSNTIKTEGRVKLTNPNGIITEIGLQHLMNAGMKRVETNTI

SEQ ID NO: 7546 - protein, 1073 aa, synthetic construct
  REGION 1..1073: note = Synthetic
MHTKDIIWGFDIGKGSLGEAVRVGNEFKHVQSLEIAPDFAETKTTAAARRAWRTREAHKARELWLEKCLSEAGIEVLLRRKVGVVDGAWKLVSKGDVRLEREFPPAGEDLCYNSIALRCKLLLGEKLESWQVFKALNSAIQNRGYDANIPWGDEDAADGGDGSSRKSSDSDASGDGESYAEKLAHYEREFDGILAELDNREKYEFPCFFKAAKMGLWSPENPDFVGVRIDNTAEKAKGYVVPREAVVREFRALVNAAALQYPNLKGKADFIMFGRACEPYASYNPELRKRFGLKRGAATDWTALGQKTPRFDNRVIDKCKLIPRLNVCKIKPLDECKTDDDFLSYTITLSLKLLNLRFFRGAGVDSLSFDEFLRAFELAKNSKFKLGKAALKKFFKTIGAEVMDESQSEIEQPRNGGRAAFSRPAMRILRDLIFSGKSPAEFYATELGKIANTDKNKGLVAGDLDFLKLMSDAPWSGIFIPDVGLSDFADTSEAARAAQINKLIGSQNDPIVRHRLSFFYERIKSLEAKFGVPDKIVLEFVRDDFLGKKAKSDLNKAIKTRFDEKKKLAEDLDSKREEFGLKYASKKMLLKFELYKKQGGECVYTGNALPLSELENLEVEHIVPRSRGGPDAMYNYVLTDEKTNKEKGDRTPYEWHSLKGAEWDSYCDRVRELTKNLGAKRCRLLLAPNAAELVEKYTALAETAWISKLAQRICCLHFGFQFGGLAGAKKVWTVSGNTTAMIRGRYGLNRLLHDEEAAEDLSLFDRICMEKKFEEKNRKNKKHHALDAMCLCFAPTSNAKKASAYKNILPEEITRNPESDEARKFFGRYLATVIPNKVAVEKSKLEQTIYSLRKGRIVKKCNVRDLAYEGINPKYNYTKLVKRIESIVGDVSKRIISDFVLSNPDLKESEWEDWCKYEAAIPSKNGAPTKLLRVLCEVGSPEEYKDLSKDGCGAYRKGDSHKGQFIWKTQKGKYMVAPVYAYASKAKVFAALKSNPDCAEVCGFFRQNCLVEISNDVIDKSGKMLLKSGIYKSNTIMSDGRAKFTNSDGISTNPISIQYLMPAGMKRIKLDTV

SEQ ID NO: 7547 - protein, 1062 aa, synthetic construct
  REGION 1..1062: note = Synthetic
MNNNNTQIWGFDIGKASLGEAVWCGGKFKHVESLILDKDFAEIKTSAGRRRQARTRKAHKAREEWLEKCLEDCGIEILKRRKVGIVNGQWKLISKGDARLEKEFPAEGEEVCYNSIALRCKLILGEKLESWQIFKALNSSIQHRGYDENIPWKETQNESKKEDGDYFKKIVLYESEKEDILNRLPQECKREDFDFPCFFKAKKMGIWSEENPYKVGLRISNNAQKAKGYVIPRKYVENEFVRLVQMASLQYPKLKDKQMFILYGISETPYASRFKDARKKFGLKRGADSDWTALGQKIPRFDNRMIGKCKLIPRLNTCKIKSPEKIKSEEDLLHYDITLALKLLNLRFFKDSEICALSFEEFKKLFEIGKSNKYKISKTDLKKFLKSIGASVLSQDHSEIEAPRTSGRSSFSRPAMKILKELIFSGEPPSKFLKAKIDKIANTDPNKGIIREDLDFIRIMGDCPWNGIFIPDVETYKYASQTQESSEAQINKLIGSQNDPIVRHRLSFFYERIKALSEKFGVPDKIVLEFVREDFMGKQAKKDLSLSMKKRFEEKIDIAKKLDDIGYKGNKMLLKMELLQKQGFACLYTGEALQETDLPILEIEHIVPRSLGGPDAAYNYVLTSESTNKAKGNQTPYKWLSPDRDKWRAYTERVRARAAELGSKRCRLLLSENAEELINKYTALAETAWISKLAQRIVCMHFGFQFGGNTGEKRVFTVPGNITAKIRSAFGLNKILHNIDADKKNMSEFDIVKLDYELDKKNRKNKKHHALDAMCLCFAPTGPNAQKLGIGALLPPEIAAKAEEFFRGYIEKVVPNEVAPKKPKLEESIYSKRTINRKECIVRKFNLVDLAYKSGLKPVYDISAIEKLLEDKPKKIPPIINPTVRRIVRDFVSTNPNEDEWRNWCKTVRMPSKNRNGTRIIRVLVYVGTPEEYKDLSKDGCGAFRKGDSHKGQIIWMDKNGRYKVSPVYVHSSKSQTMESIKSNPDFIKIAGFFKSHCLVEIESPVVNGKGDVLLSPGTYMINTIMAAGMAILSDTNGVKSPAININYLMNAGMRRISIKYK

SEQ ID NO: 7548 - protein, 1061 aa, synthetic construct
  REGION 1..1061: note = Synthetic
MKVMEAENGNHIWGFDIGKGSLGEAVLMGAEFRHVTSLLLDEDFGEIKTAAGLRRQMRTRKAHKAREKWLERCLLEFGIEPLKRREVGIVNGRWMLISKGDERLEREFPPDGEDICYNAIALRCKLLLGEKLESWQIFKALNSAIQNRGYDENIPWKESDVSLPKKDDDDYAKKLSQYSREKGELLESFEDGEKYDYPCFFKAYKMGLWSPENPERVEIRIGNDAQKVKGYVIPRKDVEREFESLVEAASKWHPAMKGKAMYIMYGIAETPYASFKPALRKKFDLKRGAESDWTALGQKIPRFDNRIIDKCRLIPRLNVCKIRPLSEARGEGDLLHYEITLSLKLLNLRFFRNSNVESLSFEEFKAAFEIAKSAKYKMGKAALKKFLKSISASVLSEDQSEIEAPRESGRASFSRPAMLLLKELIFSGMPPAEFYAKKAGEISNADPNKGIVASDLDFIKLMGNCGWNGIFIPDVETYRFANNGADSAKLINGLIGSQNNPIVRHRLAFFYERIKFLESKFGVPDKVVLEFVREDFMGKEQKKRMQIEMKKRASEKMLIAKKLDEAGYKGGNLLLKMELLEKQGGICLYTGEPLLPSELGVLEIEHIVPRSRGGPDAQYNYVLTREKTNKEKADRTPFEWLSSDPVKWAGYSDRVKARAGQLGRKRCELLLEKNAEELVEKYTALAETAHISKLAQKIVCLHFGFQFGGLGGTKRVFTVPGALTARIRSFYGLNKILHNEDLAKDALSYEEVLKRGEELDKKNRKNKKHHALDAMCLCFAPTGVNSKRARIDMLLPPDIRGESEAELFFRKYLDRLIPVDVAPKKPRLEDGIYSMRAVGGKKFMARRVNLVDLAYTVGQKPVYDISVLIGKKNPKEKKIINAQIRKLVADFARTNPTEDEWRKWCGECRLPSKNGIGTRVIRVLLNYGEPAEYKDLSKDGRGAFRRGDGHKGQIVWESTDGKYYVVPIYVHASKAKLLAELDANPKKKRVCDIFTSHCMVKVGNTYNDKGELLLHEGVYMVNTIQTDGRGKLTNTNGEKSNLININYLMKAGMRKVSVKDL

SEQ ID NO: 7549 - protein, 1059 aa, synthetic construct
  REGION 1..1059: note = Synthetic
MEKEKNNHVWGFDIGKGSLGEAVRVGGDFKHIASVLLDPEFGEIKTAALARRQMRTRKAHKAREKWLEECLDGTGVEILKRREVGIVDGQWRLISKGDERLEREFPPNGEEVCYNSIALRCKLLLGEKLEGWQVFKALNSAIQKRGYDENIPWGEAEEKSSKKDEDDYAQKLSQYEREKSELFESFADGEKYDFPCFFKAYKMGLWSPENPRRVEVRIDCRAQKAKSYVVARKYVEREFECLVEAAAKFFPKLKGRAKFILYGVSETPYASYYGNMRKKFGLKRGAESDWTALGQKVPRFDNRIIDKCRLIPRMNVCKIRPLNEARNEKDLLYYEVTLALKLLNLRFFRNSNIEQLTFEEFKKAFEIASGAKYKMTKTAMKKFLKSISATALGDDYAEIEPPKESGRASFSRPAMDILKELIFSGMPPREFYGRKIPEISNTDKNKGVVASDLDFIKLMGDCPWGGIFIPDVQTYQFANAAFPNPDAQINKLIGSQNNPIVRHRLTFFFERIKFLESKYGVPDKVVLEFVRDDFMGEKEKKEMRIAMKKRAEEKMMIAKDLDEHGFKGGNLLLKMELYRKQNGICLYTGDALPLSELATLEIEHIVPRSRGGPDAQYNYVITREKTNKLKGDKTPYEWLSSDAKEWASYTDRVNACAKALGKKRCRLLLEKDAEELVEKYTALAETAHIAKLAQKIVCMHFGFQFGGLSGTKRVFTVPGALTSRIRKFYGLDRILHNAAAESENLSFEEFLKFSEDLEKKNRKNKKHHALDAMCLCFAPTGVDSRRAKLGEILPEKLRSEKAAREFFKSYLDKIMPVDVAPKKPRLEDGIYSKRIIGGKACMVKRNNLVDLAYKSGLKPVFDIPTLIKLVDKKEKGIINPQIRKMIGEFAATNPDESAWRKWCEEVRLPSKSGLGARVLRVLVYYGEADEYKDLSKDGCGAYRKGDGHKGQVVWESVDGKYYVEPVYVHASKAGVMAALNANPKKKRICGMFNSHCTVDVGDVYNDRGDFILPAGRYMVNTILTTGRCVLTNADGEKRNPININYLMRAGMRRVELSEL

SEQ ID NO: 7550 - protein, 1054 aa, synthetic construct
  REGION 1..1054: note = Synthetic
MFMDILGNKVWGFDMGKGSLGEAVRIGNEFKHVCSLLLDADFGEIKTAASLRRQYRTRKAHKAREKWLEDCLRKCGIEVLQRRQVAFVDGKWQLVSKGDIRLEKEFPTDDENICYNSIALRCKLILGEKLESWQVFKALNSAIQNRGYDSEIPWKETEVKSKDNSDYAIKLQAFEREKDELLLNLPSIDEAIRSKFDYPCFFKAYKIGLWNPVNPNQVDSKISHTANKAKGYVIPRNYVEKEFIKLVEMASLQYPKLRNKALFILYGITEKPYASFDFDLRKKFNLKRGAESDWTALGQKIPRFDNRIVDKCKLIPRFNVCKVKHIDEIQQDKDFLYYEITLAMKLLNLRFYRNASVQSLNYDEFKILFEIGKANKFKITKTNLKKFLNSINAEILDENQAEVAQPKDSGRASFSRPAMQLIKELIFSGQSPADFYARKVSSISNVETKKGLVVEDLDFIKLMGDVDWNGIFIPDVETYKFAKNFSEDNSAQINKLIGMQNDPIVRHRLSFFYDRIKYLEAKFGVPDKVVLEFVRDDFIGKEKKKELNIAIKKRYSEKLKIAEKLDEIGFKGSKMLMKLELFQKQGDICLYTGEPLLPTEIPSLEIEHIVPRSRGGPDSAYNFVLTREATNKEKANRTPFEWLSGDSQKWVSYSDRVMSRSKELGKKRCQLLLKENAEELVEKYTALAETAWIARLAQRIVCMHFGFPMGALIGKKRVFTVSGSVTSRIRGMYGLNKILHNTEIDKTLSEVDILKLNDSLETKNRTNKKHHALDAMCLCFAPTSKEVLNKNREILPVEIAKDAENYFRRYLDNIIPNKVATMKPRLEETIYSKRKIGKKEYIVRKYDLESLAYKGINPKYDVEAIKKLANSENIINVVAKKIIRDFVNDNPTEQEWKDFCNTVKMPSKNGNGSRLKRILLLVGNTAEYKDLSKDGCGAYRKGDSHKGQIIWKTKSGKFKVEPIYAHSSRAKVSKELMKKPEFDSVAGIFRTGCLVEFTNDVMNDKDEFLLERGIYSLNTIRSDGMMKCTTSNGIPSKPININYFMEAGMRCVIL

SEQ ID NO: 7551 - protein, 1063 aa, synthetic construct
  REGION 1..1063: note = Synthetic
MNIIENHVWGFDMGKGSLGEAVRIGDEFRHVQSLIIDKDFAEIKTAAGLRRQMRTRKAHHAREKWLEKCLADCGIEILKRRKVDIVDGKWTLVSKGDSRLEKEFPAYGENVCYNSIALRCKLLLGEKLESWQVFKALNSAIQNRGYDENLPWKEGDTTKKKDDDSDYAEKLKMYEREKDEMLLNLPDLNERSDFDYPCFFKAFKIGIWSPENPRKVELRITNQAQKAKGYVIPRKCVEEEFVRLVEMASLQYPKLKGKAMFILYGISETPYASLYEPLREKFNLKRGAETDWTALGQKIPRFDNRIIDKCKLIPRLNVCKIKPLNEAKADEDFLHYDITLALKLLNLRFFRNSSIESLCFEDFKKLFEVGRKNKYKISKTNLKKFFKSISAEVLSEDQSQIEAPRASGRASFSRPAMKILRELIFSGKSPAEFYEEKLAEISNTDPNKGLIDGDLDFIKLMGDCPWGGIFIPDVETYNYARQIDASADERINKLIGEQNDPIVRHRLSFFYERLKSLSQEFGTPDKIVLEFVREDFMGEKAKKEMNKAIKERFAEKLDLAKKLDESGYKGNKMLLKLELLQKQGGQCIYTGLPLQTSDLPNLEIEHIVPRSRGGPDAQYNYALTTESINKQKADRTPFEWLSADKAKWQEYCARVRSRAKELGKKRCELLLKENAEELVEKYTALAETAWISKLAQRIACLFFGFQFGGNSGTKRVFTVSGNTTSRIRGTFGLNRILHSDDSDRENMSEFDFVKLSKELEEKNRKNKKHHALDAMCLCFAPTARDVKKVDFKTLLPKKISESAPEYFKGYLDKIVPNEVAPKKPRLEDSIYSLRKIQGKNCIVKKFNLVDLAKKKVNQKSVYDLNAIAKLLEEKPKKIPPIINPVIRKLIKDFVATNPSEQEWKDWCENLRIPSKNGEGSRVIRVLVYVGEPDEYKDLSKDGCGAYRKGDAHKGQIIWQTKSGKYKVAPIYVHASKRRILEALKNNPDFEKVAGEFRSHCLVKLDKPAVNDKGEELLADGIYMLNTIMTAGKAILTNPNGIKAPEININYLMRAGMRRIKMDY

SEQ ID NO: 7552 - protein, 894 aa, synthetic construct
  REGION 1..894: note = Synthetic
MQPPRNRFATGASARRKITKMVKRVARLRQTFWRDTENPDVVKIRIDNTAEKAKGYVVPRSAVIAEFRALVDAAAKQYPALKGKADFIMFGVSEEPYASYNPELRKKFGLKRGAESDWTALGQKTPRFDNRVIDKCKLIPRLNVCKIKPLPECRTDDDFLPYETTLALKLLNLRFFRGAGVDSLSFDEFLRAFEIAKNNKFELNKTNLKKFFKSIGAEVIDESQSKIEQPRSSGRASFSRPAMRILRNLVFSGKSPAEFYETELVKITNTDKNRGIVAEDIKFLKLMGNVPWGGIFVPDVGVFDFADSTECSRAVQINKLIGMQNDPIVRHRLSFFYGRIKSLDAEFGTPDKIVLEFVRDDFLGKKAKADLSKAINDRAKEKKKYAEELDSQRENFGPKYASKKMLLKYELYSKQKGECIYTGRALGFSDLEQLEVEHIVPRSRGGPDALYNYVLTDEKTNKDKGDRTPFEWLSSKGVEWDAYRDRVRGLTKELGAKRCKLLLSPNAEELVEKYTALAETAWISKLAQRICCIHFGFQFGGLTGEKKVWTVSGNTTAMIRSRYGLNRLLHNEDVPKDISLSERLKLESEFERKNRDNKKHHALDAMCLCYAPTSNTRRAASYKNILPAEITRNPESDEARRFFGGYLANVIPNKVAIEKPTLEQTIYAKRLINGKETIVKKCNVRDLAYAGRNPQYSYLTLVKNIKCIVGKVSKNIISDFVLSNPDLNESEWENWCKYDAVIPSKNGAPTKLLRVLCGARNPEEYKDLSKDGCGAYRKGNLHKGQFVWKTKQGCYVVTPVYAFESKIKVWDDMRRDPNCEEICGFFRQNCLVEIPNDVYDSKGVLKLKAGVYRSNTIRADGFVKLTNSDGFSPNPISIQYLMSAGMKRITLNTI

SEQ ID NO: 7553 - protein, 1074 aa, synthetic construct
  REGION 1..1074: note = Synthetic
MGTKEIVWGFDIGKGSLGEAVRIGNEFKHVQSLEIPPEFAETKTAAALRRAWRTRHAHKARELWLERCLSNAGIEVLGRRKVDIVGGRWKLVSEGDRRLEREFPADGEDCCYNSIALRCKLLLGEKLESWQVFKALNSAIQTRGYDAKIPWGNDDGKTSDSAKGGKSEAAKEEESYAEKLALYEREFDGLLAEVDNRKKYDFPCFFKAAKIGLWSPANPDAVKIRIDNTAEKAKGYVVPRSAVIAEFRALVDAAAKQYPALKGKADFIMFGVSEEPYASYNPELRKKFGLKRGAESDWTALGQKTPRFDNRVIDKCKLIPRLNVCKIKPLPECRTDDDFLPYETTLALKLLNLRFFRGAGVDSLSFDEFLRAFEIAKNNKFELNKTNLKKFFKSIGAEVIDESQSKIEQPRSSGRASFSRPAMRILRDLVFSGKSPAEFYEIELGKITNTDKNKGIVAEDIKFLKLMGNVPWGGIFIPDVGVFDFADSTECSRSVQINKLIGMQNDPIVRHRLSFFYERIKSLEAKFGTPDKIVLEFVRDDFLGKKAKADLSKAINDRAKEKKKYAEELDSQREIFGPKYASKKMLLKYELYSKQKGECIYTGRALGFSDLEQLEVEHIVPRSRGGPDALYNYVLTDEKTNKDKGDRTPFEWLSSKGVEWDAYRDRVRGLTKELGAKRCKLLLSPNAEELVEKYTALAETAWISKLAQRICCIHFGFQFGGLTGEKKVWTVSGNTTAMIRSRYGLNRLLHNEDVPKDISLSERLKLESEFERKNRDNKKHHALDAMCLCYAPTSNTRRAASYKNILPAEITRNPESDEARRFFGRYLANVIPNKVAIEKPTLEQTIYAKRLINGKETIVKKCNVRDLAYAGINPKYDLGKLKDRIRDIINPVSKRVISDFVNSNPNLSESEWEDWCRHEASIPSKSDKATRLLRVQCAVGDPAEYKDLSKDGCGAYRKGKSHKGQYIWKTKDGRYVVTPVYTFASKIRVYDDMRRDPNCEEICGFFRQNCLVEIPNDVYDNKGVLKLKAGIYRSNTIKTNGQVNLTTPNGIKFNGISIQYLMSAEMKRITLNTI

SEQ ID NO: 7554 - protein, 1075 aa, synthetic construct
  REGION 1..1075: note = Synthetic
MEMHTEQKVWGFDIGKGSLGEAVRIGNEFKHVLSMEIDEDFAEIKTAAAARRAWRTREAHKARETWLEKCLADAGIEVLGRRNVDVVDGAWKLVSRGDERLEREFPAYGENVCYNSIALRCKLLLGEKLESWQVFKALNSAIQNRGYDTQIPWGNEDGKSAEAKRSGKADADKKNTEEESYAERLALFEREFDELLAEIDDREKYNFPCFFKAAKMGLWSPEKPDDVGIRIDNTAEKAKGYVVPRAAVIAEFRALVDAAAKQYPALEGKADFIMFGKAGEAYASSKSELRRKFGLKRGAASDWTALGQKTPRFDNRIIDKCRLIPRLNVCKIKPLKDCKTEDDFLPHTTTLALKLLNLRFFRGAGVDSLSFNEFLRAFEIARENKFALSKTNLKKFFKTIGAEVMDENQSCVESPRDSGRASYSRPAMRLLRDLIFSGKSPAEFYAEEAAKIKNTDKNAGLVPEDLAFIKLMGDTPWGGIFVPDVDTFNFANIRESERADKINKLIGSQNDPIVRHRLSFFYGRIKLLEERFGMPDKIVLEFVRDDFLGGKAKKEMQQGMKKRFEEKKELAEELDSQRAEFGNKYASKKMLLKYELYKKQRGRCVYTDNALPFSELENLEIEHIFPRSRGGADAMYNYVLTDEKTNKEKGDRTPFEWLSHDKTNWESYCDRVRKLTQSLGAKRCKLLVSPNAEELVEKYTALAETAWISKLAQKICCIHFGFQFGGLKGEKKVWTVSGNTTAMIRGRYGLNRLLHDEEDAKDLPLLDRIVKEKEFEKKNRDNKKHHALDAMCICFAPTSNTKKALSRKNILPEEIARNPESDEARNFFAKYLAEVVPTKVAIKKPALEQTIYSKRVIGGRETIVKKCNVRDLAFSGQNPKYDFDKLVKRVKDIVNPVSKRVIEDFAKTEPTEAEWEDWCKHEAAIPSKNGSPTRLLRVLVEVGNPDEYKDLSKDGCGAFRKGDSHKGQFVWKNKKGRYVVAPVYAHASKAKVFDDLQNNPDCSEICGFFRTNCLVKIPNDVVDKDKLLLKAGFYKSNTIKTEGRVKLTNPNGIITEIGLQHLMNAGMKRVDTNTI

SEQ ID NO: 7555 - protein, 1220 aa, synthetic construct
  REGION 1..1220: note = Synthetic
MKKIIGLDLGVASIGWAFIKEAENENEINELVDIGVRIIPLSTDSKTQFEKGQAITLNQDRTLKRVARRNLDRYQLRRKSLVSALKALNMLPGQELFNLNALELYGLRNKAVNEKIELNELGRILLHLNQKRGYKSSRKEKAKNTENSITKESDYLSGISTRSRYLLENNLTIGQKIYNDFVSNFKENKDQILSHTIKNEVYPRHDYISEFNKIWDTQQKYYPTVLTEQIKLKIRDEIIYHQRPLKSQKGLVSICEFEAKTCKIKKDDKLIEKVIGPKVAVRSNPVAQMCRLWESINTISLESKEGNQIYIPNIQQKHLLYEYLCDNEKLGINDLRKILKLDKSYRSNQQLEKVGIKGNDTLIKIKKALESAELSEEVIRALTQLQTAMHTVPFDEKIKACINNYQTKSKYRKFSAESVVVDMQTGEELELMEIGQEIEKEPLYEIWHLLHSIDNEDELEAAILKHKRLTDLGLTEKAAEELSKVVFKSDDYGNKSVKAIRKILPYLMNGYVYSDACALAGYNHSDSSTKEQNLKRELLDQLPLLKKGELRQPVVEKILNQLINIVNAIIKEPHMGRPDEIRVELARELQQSAEERSDTYSFMNKRSAENDEIAKEILKYGLKPTGHRIKKWRVWHETHGYSLYTGKTLGLAEFLNAEAVDIEHIIPQSKLFDNSLSNWAISERDENIKKGNMTAYDWMKSKGENAFNEYVKQVNHFYQQYIEKNPKEKGIYRAGFSKRKRDYLLMSSDKIPSDFINRQLNETRYISRKSTELLKQICFNVKVTGGSVTDYLRHHWGYDNILHDINFERYKNAGLTYINEDKKERIIDWTKRMDHRHHALDALVVACTKQSLIQRLNNLNKSKEFSENLKDIENKGLKKVVSETKLFNTITVQKKLSETLVSFKAGKRVVSRRKNKIGNQTRLEPRGPLHEESVYGLIRRIAEKPVKLNAKFDLKVIENIVNPAQKQLIIERLQQLNNDPAKAFDKLNKNPIWIDKEKEIALTEVKVYEPATVIKYKLNETFKEKDADYIVDGKIKELVKQRFKEKGAAALKNLENDPILYNGIPVKSVRCFAELTAYETLKYDKEKNKAIAVVKPGNNHHVTICEDENGKRYELETVTFWEAVARAKNGIPIYSTPKESNHKVICHLEENEIVEVKSEEFVSRFFRLQKLTSGNYWFMNIFNTQRDETLIGKKSKTAIQFSPGSYEGKKVKINILGKIK

SEQ ID NO: 7556 - protein, 1316 aa, synthetic construct
  REGION 1..1316: note = Synthetic
MKHIIGLDIGTNSVGWAFVKESKKDKIELIDIGTYIFPIGTIVDAKSNKEKTKNEQRREYRGTRRNIFRYKLRRKKLKSILNSIDLIPDFKKNYKIKGKYQSTELYKLRSEAIEKKIPLEEIGRIFLLLNKHRGFKSNAKKFEKESEDEGIVKTSIKSLKDLMNKADAKTLGQYFYKMHELSNVKYNSGDWHNPDELIDERAYSENGKIVLNNSRGIRRQFGRYTEREMYLNEFDLIWSAQKKYYLDTHHDLFTGSAKEYKEILERYNDELKDINNENSKQIKYKEKLKAIKEFKNSNYWKIRNYCIYYQRPLRSQKKFLSNCQFEKNKKVIPASSPLFQEFRIWKVLSDLRYSDERNNIFSEILPVEWKKILAEKLETIERVRINKPSKKGKDSEKICLLDLLELRDSSIKFNLHIEESEKDIKGNLTYYAFCQSMGAEKFNELKDKNKLNDLWHHIYIAKDDEWLKDTLLYKWQFSKNINFSENEAIVSKLIEFGLENDYGSYSSKVIKKILPFMKKGNDEYTSLLLSGYLKSPDEEKEKVVLKKKISQLKYQELRNPVVEKSISQVIKIVNKLLEKYNDLIDRDNLEIRIESTRELKKPRSEREKILRNNRDKDLKRQEYADFLNLKSKDGTFNFNKRIEKYDRLIYKFELWLEMKMDPNDPLFLEFEKISKKGDNEKQRLWCECNRICPYTSKVISLKMLFSPEIEIEHIIPLSRSLDDSYNNKTITFSSVNKEKGNLTSYEYMNLKNDFENFRKRIKDFPKSKIANFEMKNVSKEFSGNQISNTSYIAKFTRTKLSEVSNSVQFTNGAATSQLRKYDWNLDQLLDQVRYEEKTGIEIDKIIQYYKTERNTFYNWYHETKDKIDEKLNIFNIPDDVLMEYDKKFNENILETVIKLKSYEEFRNKSGKKDRSDHRHHAIDSFITACCSRAIIKKLSDANRVREEFGISQFNHSRNISRDLVDCPFDYIKLKNSIMNIIVVHNISQKLISSNVNNIKSGKKNLKQKTYGPQGSLHKDGIYGKLKNPENQNISKNDAYVKRIPLYSKNGSSMEVSFTDLKSLEKIYDPNLKEIMKKRIEKYGNGKKAFSIENLTIDPLYVYSTKKYPEGSITSINGASLPVIKNIRVLNKNSRNLVQLPAKDEQSKIINLNRYSETDGNYIMIFYELKETIKNKIKITRDYRILSFFEAVNRKRTGVKLFEEMVEKDGKLLPLMENCNWLKQGDLVAIYNNPDEKEKILDGDKFFIKKCLYKITELNNWANLNYEYGLVKLSHVNKVKNTSEKYTTTGDFRKFYHSSLNAIKIRLNELGEIIRIG

SEQ ID NO: 7557 - protein, 1129 aa, synthetic construct
  REGION 1..1129: note = Synthetic
LCSATVGICPLRGSIELVKPVTVISTAALPDRGLNTMKYRLGLDLGSNSIGWCLLKLEPRCVLDAGVRILTPNEEAGRDPQSKTSLAAERRDARSARRRRDRFLRRQKRLLQVLTAAGLMPADTAARKALETLDPYWLRAEALDRKLTLHEIGRAVFHLNQRRGFKSNRIADGDDAEKSATKQGMKALRERLEAEGARSLGELLARRHRRDRQGHRLRDGGGWAVPEPVRFRPTSQGSKNLYDLYPAREMVAEELEKIWAAQAPHHPELTGGLLESLRRIVIDQRPLRTPPVGRCSLRPEVQMVERAGLTLDQGERAPKAHPLFQRVRILQEVANLRVGWAGARDRALTLTERDAIVAKLMASGGTLVAFDKLRAAAKLPEESRFNHELSGRKGFQPDQTAVKLAMKKAFGKPWRSLERDRQIEVVERLLGIEDPEDLIAWLQEICNLDPDAAEAVSELRLPQGHGQLGRSILADLVAVMESQSKEAVDPETGELYRRPLTYDEAVEALNLHHSNLRVDGTVARLPYYGAALARHVVSKPDAPDGSQERIGRVPNPTVHIALNQLRKIVNALIEIHGPPEEIVIELGRELKLSRQRKEEIERDNRANERKNAERRERLAKLGVADSHDARLRLRLFDELPPDERVCVFTGTPLNVERLFDGSVEVEHLLPFSQTLDDSFMNKALCTRAANRQKGNRPPAEAWSGEVLREIVERAERILQRKAWRFQPDAMARFDADGGFLARQLIDTQYMSRLAKTYLEQVCERVWAPPGRLTAMLRAKWGLNDLLPDHNFTNPNQPKNRKDHRHHAIDAFVVACTDRGLLNRMARASGRAESLDLDRLFPDGGFPEPFPGFRADLSAALERIVVSHKPDHGLPPGAQDNVQVTSGQLHEATAYGEVKEEIDGKPYNLVTRKPVLQLTDGDIGRIRDARLREDLQARMAAAAGGGKLTDAERRAVLEAFANDHGLRRLRILKTEASVRRVEHRGADGQVFTKAYTPGGNHRVEIFTLPDGSWGGEGVTVHDANQPGYRPHWREEYPGARLFMRLHNGDLLEADFEGKHEIYRVYRLEPSAKRVRLAGHKEAGSIDQRHNDPDDPLRWIFATYERLRDAGARPVRVDVLGRVSTLLEPVG

SEQ ID NO: 7558 - protein, 1115 aa, synthetic construct
  REGION 1..1115: note = Synthetic
MQQYRLGLDLGSNSIGWCALHLERTTTTDGRPAHQPVGLLDAGTRLLTPQEEAGRDPQSKESLAADRRAARSARRRRDRFVRRQRRLMQTLITAGLMPEDVEKRKELERLDPYWLRAAALEGPLNAYELGRAIFHLNQRRGFQSNRLADNQDAEQGAIKQGIAELTQALDAEAATTLGQLLAKRHGRDKYGHRTDQAETPQTVRFRPQRNGTKVTYPWYPSRQLIEQELDAIWQAQQPHHPQLTGDLLQDIKRIVIEQRPLKTPPVGRCTLRPAVAEVELDGVTVDLGARAPKAHPLFQRFRMLQDVAQLRVIARPGQPARYLTLEERDKLIGVLSCRSTNRVTFESLRKALKLPGEARFNYELAGQTGFPPDQTAAKLAHKNALGKQWPALPRDRQIAVVEHLLAVEDPDALAEWLRDTLGIDTDKAKHLTTVRLPDGHGQFGRGVLRDLVQGMETQSREDGGDPETGEVYARPLTYDEAVAAIGHHHSDHRRDGLATRLPYYGEALPRHVISNPAAPDGSQERVGRVANPTVHIALNQVRKLVNALIDSYGPPTEVVIELSRELKQNQEQKAKDQQRNRENETRNEQRRARLAELGVPVSRDSMLRLRLYEELPPDERVCVFTGTPIGCQDLFTPQIEIEHILPHSKTLDDSFANKVLCTREANRQKGKRPPVDVWSGTELEEIVARAQRIVPAKAWRFQPDAMEKLAEHGDFLARQLNDTKYMSRLAKTYLEQVCDQVWVVPGRLTAMLRGKWGLNVLPREDNRKTEAEAESDTAAKNRNDHRHHTIDAFVVANTDRGLLNRIARASAQAEELDLDRRFPQGAFPEPYPGYRDDLWARLRTMVVSHKPDHGLAPGAQADVHQTAGRLHEQTAYGRVDEEIDDKRFNLVTRKPVTDLTNKEIGQIRDARLREKLHAHLQAAETREGTLTGARRRALLDEFARDQQVYRVRLLKTEKSVRTVRHTDSLGRTFEKAYVPGDNHRVEIFELPDGTWQGEGVTMHDANQPGYTPDWPDKNPNARLVMRLHPGDCVEADFDNGLGSCVYRVHRLEPSAKRVRLAAHNEGGSIQARHEDKDDHLQWVFATWSKLKTANARRVHVDVLGRVKPARDGEPR

SEQ ID NO: 7559 - protein, 1102 aa, synthetic construct
  REGION 1..1102: note = Synthetic
MAAPYRLGLDVGSNSIGWCAVTVDGNGVPSGVLDAGVRILTPNEEAGRDPQSKQSLAANRRVARSSRRRRDRFLRRQKRLMETLIAAGLMPSGEADRKANERLDPYWLRAAALRAPLPLHEIGRAIFHLNQRRGFLSNRIADGDDDEGSAMKAGMKALAEQLEASGAPTLGAFMAERNSRDREGYLVDRLGKRIGKAHGNPKPHPTDTGVRFRSRSEGNKVLYDLYPTRAMVEHELDAIWQAQAPHHDALTNALLKRLKRIIIEQRPLQKPLVGSCTFRPHEERAPRALPFFQRFRILMEVANLEIERPGRRSRKLSIQQRNALVSSLSEKASQVTFAAMRKALKLPADAAFNLEHGKRKGLDPDQTAAVLAKTSKTGKGTSFGKGWRGLSRHRQTEIVENLLTEPDERALTRWLRQECGLTEDAAEAAANARLPQGHAHIGRSMLADLVDVMENISAEAVDPKTGEIYPRPLTYDEAVEHLGLHHSNMEAGRHARLPYYGTAMARHVIANPRAPENSQERIGRVPNPTVHIALNQIRAVVNALIEAYGPPTAIVLELARELKQNKKQKDETTRQNRENEKANEEIRAELAQMGLAYSHGNRLIMRLYRELSPTERICVYTGRPISRTMIEASEVDVDHILPRSRTLDDGFANKVLCTRQANREKGNRAPAEVTEWQGERLREIHERAKRLFPRKAWRFAPDAMEKFEAKDDFLARQLTDSQHIARLAKDYLGHLFGEDRNKRVWATPGRLTAMLRGFWGLNALLSDHNRIGNDSDGGSVKNRDDHRHHALDAFVIACTDRAILQRVATASGRAEELDLNRWAEKGRFPEPFEGYKDALRAALDAMVISHKPDHGLGRGAQGNVHVTSGKLHAETAYGLVDADIDGKHFNLVTRKPIDQLSDREIGQVRDARLREALEQIVYEAGRDGIKPEAALAEYGRRNGIRRVRILKTNETARKVTHGDGFEKAYIPGDNHRIEIFSLVDGEWSGEGVSVFDANKPGYEPDWRRRHPEARLVMRVHNGDLVEADFGEGRRIWRVVRLEPSAKRIRLVRDTDAGNFEKRHKAGDDPFRWNFATFKRLQAADARRVRVDPIGRVSYAEDT

SEQ ID NO: 7560 - protein, 1097 aa, synthetic construct
  REGION 1..1097: note = Synthetic
MEYQRYRLGLDMGANSIGWCAVAFDAEGQPCGVLDAGVRILTPNEEAGRDPQSKQSLAADRRAARSARKRRDRFLKRQKRLMTLLIRAGLMPEDASERKALEALDPYWLRAAALDGRLEPYELGRALFHLNQRRGFKSNRIADSGDDDKGAVQTGIRDLTSALQDSGARTLGELLAQRHGRDKSGHRKTTGKSDGKSTSKGDGAPQPVRFRPTAKGAKNLYAFYPSRTMIEDELKQIWKAQQAHHPRLTDELLDGIERIVIEQRPLKKPPVGRCTLRPDADMRQVAGLELDYGERAPKAHPLFQRFRILQDVSQLRVVRAGDAERPITRQERDALVAKLMSSGGNVVAFDKLRTAIRLPDDARFNYELAGRKGFQPDQTAVKLSARKCFGSAWRSFPRERQIEVVEKLLAVEVPEELTEWLHETFDLGAEAAEAISEARLPQDHGNFGRGVLADLVAAMEDGEPVDPATGEVLDRPLLYSEAIQVLDRHHSDFRPEQKVARLPYYGGVLTRHVISKPTAPEGSQEHIGRVPNPTVHIGLNQLRKIVNALIETYGPPESIAIELARELKLNKERKDKLARENRKNEKRNEQIREELESVQQAYTPDARLRLRLFKELPPGERVCVYSGDALSVESLFDGSVDIDHILPYAQTLDDSFMNKVLCTTQANRAKGNRAPADAWSGGALREIAERAERLFPKKAWRFQPGAMDRFKEDGGFLARQLIDTQHMARLAKTYLEHVCANVVAPPGRLTAMLRGRWGLNSLLPDHNYAATGPKKNRKDHRHHAIDAFVVACTSRSLLQRIAAASARAEELDLDRVFPKDGFPTPFAGYREALDARLQQVIVSHKPDHGLPPGAQDNIRVTSGQLHEETAYGRVDEEIDGKTYNLVFRKPIAQLTSGEIGRVRDAGLRSKLQQVEYEADQSGEKLADALAKFGETNNIRRVRLLKTEQSVRLVRHGSGFEKAYTPGGNHRIEIFELPDGEWSGEGVTIYDANQPGYEPAWRREHAGAKLIMRIHNGDLIEADFGGGRTIARVYRLEPSAKRVRLAPHNAAGSIEERHKDDDDPLRWIFGSYAKLKEGGARRVRIDVLGRKSYPVDTP

SEQ ID NO: 7561 - protein, 1091 aa, synthetic construct
  REGION 1..1091: note = Synthetic
MNAQDHSAPYTLGLDLGTNSIGWCAVRLDSTGRPSGVLDSGVRILTPNDEAGRDPQSKNSLAANRRAARSMRRRRDRFQRRQKTLMKALVAAGLMPGDEAARKDLERLDPYWLRARALENPLGLHEIGRAIFHLNQRRGFSSNRITDAEDAEGSAMKQGMANLRQALQVADARTLGEFLARRHARDKHGNRVDGMGRRIGKTNANSGAKPNADGVRFRPTADGAKVLYDLYPTRDMVEHELEEIWKAQSRHHSELTDGLLGKLKRIVIAQRPLKKPLVGRCTFRPEEERAPRALPLFQRFRILSETSALEVERPGRPARKLSMQERDSLASLLMTQASTVKFDKMHRALKLPDDATFNLERGGRKGLDPDKTSAVLAKGSIFGKSWRGLSRVRQTEIVEKLLTEADEDKLVEWLEGDCGLEEGAAAAASKARLPQGHGHIGRSMLSDLIDVMETESEEATDPETGEIYPRPLTYDEAVGRLGLHHSSFESNRHARLPYYGSAMARHVISNPAAPEGSQERIGRVPNPTVHIALNQMRAVVNALIDAYGMPAEIHIELARELKQNRKQKDDATRRNRENESANERRRDELAKLNLADTHGNRLLLRLYEELPADERVCVYSGTPISREMLFSGAVDIDHILPRSKTLDDGFANKVLCTRDMNRFKGNRPPAEVWSGEELQEIAERARRLFRNKAWRFAPDAMEKFALGNDFIARHLTDSQHMARLAKDYLGHLYGDDRNRRVFATPGRLTAMLRGMWGLNGLMSDHNRAEEGEPVKSRDDHRHHAIDAFVIACTDRGLLQRVATAAGRAETRELDRWSVKGEFPEPFDGYRDALRARLETLVISHKPDHGLSSGAKGSAHVTSGQLHEETAYGAVNETIGGKAFNLVTRKPIAALSEKEIGQVRDARLREALEEVAYEAKRGEVKLADALETYGKANGIGRVRILKTEKYTTTVRHGNGRYNKTYVPGSNHRIEIYATPDGRWHGEGVSVFDANQQDHTPAWRKETPDARLVMRLHKGDMFEADLGDGPQYYVVRKLSPANSRIEFVPHRYAGKAEVSAYIRAAYSKLQKAGARPVRVDPIGRVTPVGGPVS

SEQ ID NO: 7562 - protein, 1092 aa, synthetic construct
  REGION 1..1092: note = Synthetic
MGGSMTYRLGLDLGTNSIGWCAVRLDDKDRPCGILDAGVRILTPNDEAGRDPQSKASLAANRRDARSARKRRDRFVRRQKRLMDALAGAGLMPDDAPARKELEKLDPYCLRAEALDRRLEPHEIGRAIFHLNQRRGFKSNRITDAGDNEASAMKQGMAELQAALKAENARTLGEYLARRHQRDRDGNRLVDTPRAVRFRPQVDGNKLTYPLYPYRDLIEGELDAIWARQAPFHPGLLTQALLGELKRIIIEQRPLKTPPVGRCTLRPGEDIETSLGFELDRGERAPKAHPLFQRFRILQDACQLRVSRAGEGERKLSLTEYRAVCAALMDGSGNTVGFDKLRKKAKLPEDTRFNYELAGRKGFPPDQTAVKLSNRKAFGKLWRSFPRTRQIEIVERLLAVEDPDELQAWLCEACGLDREAADFVSAVRLPQGHGQFGRGVLADLVAVMESGEEAVDPDTGEVLTPPLTYDRAVKLLDLHHSRLADRATHGRLPYYGEVLTRHVIAKKTAPEGSQDAIGRVPNPTVHIGLNQLRAVVNALIDTYGPPAGIVLELARELKLNKKRKDDIQRQNRENEKKNDEIRAELAAHNFTDTFSNRLLLKLYAELPPDERVCVYSGTPIGKAMLFSGAVDIDHILPHSRTLDDSFANKVLCVRDSNRFKGNRAPGEAWAGDPLQAIVERAERLFPRKAWRFQPDAMARFEQEGGFQARHLVDTRHMSRMAREYLERICDQVYATPGRMTAMLRAKWGLNDLLPDHNFTEANQPKNRKDHRHHAIDGFVLACTDRGLLNRISRASGQAEELNLEHLYPKDSFPIPFEGYRAELENCLRGIVVSHKRDHGLAPGAQTDVGVTSGKLLEETAYGQVDAEIDGKRYNLVTRKPVRSLTPAEIERVRDADLRDRLRELVYRAKQDGTRLEDALAAFERDTGTRRVRILKTEKSVRVVEHSDGVKTFTKAYSPGDNHRIEIFELPDGSWAGEGVTVFDANQPGYAPDWQRRHPGARLVMRVHKGDCVEADFGDGVGIYRVCQLDAENNRLKLALHNEAGSLGKRHDADNAVDPFRWHIKAYSRLKDAGARLVRVDPIGRIMPMGPVS

SEQ ID NO: 7563 - protein, 1082 aa, synthetic construct
  REGION 1..1082: note = Synthetic
MRERYRLGIDMGSNSIGWCALSVNDRGLVDGLLDAGVRVLSPSEEAGRDPQSKVSLAADRRLARSARKRRDRFIRRRDRLMETLIGAGLMPTDKTARKALEKLDPYTLRAEALKRPLAPEELGRALFHLNQRRGFKSNRIADAGEKEAGAVKAGADRLVEALEKAGAETLGAYLAGRHGRNLQGECLKNADCQPVRFRPRREGAKDVYDFYPTRDLVEQEIDTIWCKQSPHLPQLSDSLKARIKRIILGQRPLKKPLVGNCTFNPKEKRAPRALPLFQRYRLLTETANLRVEEAGRPERPLSNDQQRLILGLLSTRSGEVSFEAMRKALKLPEGAAFNLERGGRKGLDPDLTAAKLAHKDLFGKAWRSFDMAKQNDIVHRLLTEEDEAKLLDFLQDDCGLSADRAERVNEAHLPSVHGHKAHLPSGHGHIGETMLARLVEVLENNTQDWEDPQSGEIITAPITYDEAVQRLDAHHSDMRPAATHDRLPYYGDVLPRHVIQKPDANKASQDYRGRVPNPTVHIAMNQLRQIINMLISVYGPPDSINIELARQLKQTQEQKDEWTRKNKKNERERINRRQRLADLGIADTPGNMQLMRLYDELPPDQRVCVYSNTPLSMEMIVSGEVEIDHILPRSKTLDDSFANKVLCTRQANRDKGNRAPADAFSVNQLTEIHARAKTILPRKAWRFAPDAMDRFEAQGGFLAKQLTDSQHMARLAKEYLSHICAADKVTASPGRLTALLRGKWGLNSLLYDHNLYGPDDTPPKQREDHRHHAIDAFVIGCTTRFMLQRVATAAGRAEELDLDRLAPRGEFPEPFPGYREELKARLEAMIISHKPDHGRQGQLHEETAFGRVDEEIDGKRFNLVTRKPIEGLTEKMVAQVRDPRLRDALVDLVKATKETLAAEACVTGQPLEKRDIEKAIARALADYGKDHNVRRVRVLVTESSTRTVRHGPNREFEKAYVPGSNHRLDIYELPDGTWKGEGISVFDVNQPGFQPRWRAAHPDARLVMALHKGDLFEADFGHGPEILVARKLSPANGRIEFVSHRWAGKMTPQTYRRAAFSKLKAAGAKPVRVDPIGRMRQS

SEQ ID NO: 7564 - protein, 1118 aa, synthetic construct
  REGION 1..1118: note = Synthetic
MGTRYSFDIGTNSIGWAVWRTGRDPKGIFGEKDAPLELLGAGVRLFKDGRNPKDGQSLATMRRIPRQARKRRDRFVLRREALVAALIEAGLMPASEKERKALADLDPYQLRAAGLDKALAPHELGRAIFHLHQRRGFKSNRKTDRKSDDRDKGKIATASAALAKKFEDENARTFGEFLWRRHRDPDMKRQAVLKAHDPAKGKPDLRAAKLRQPTRIRLEGQGATALYEFYPTREMLCHEFDALWEAQARHHPMLLTREAGDKIRSILFRQRELKPPLIGLCTFEYAAGEKESRLPKALPSVQAREIYERLGHIRLSTGSGTDRPLKSSERDDLATALLHCGLTKIKVSKTKGLAFKTEFRKALRLGGEVRINFEEMGEEGLVDLRTNRLLVQDDHYGPRWRALSWSGKDAFVKKLLEATDDDKLVARLMTEDGLSAVQARNAASIPLPDGYSRLGPTANAAILQALIDSRDENGFVVTYDKAVRRAGERLGKDWHHSDERDGEILDALPYYGKVLQRHILPGMMDPADRKDEAKFYGRIMNPSVHIGLNQLRRLVNALIERFGPPDQIVVELARDLKMSAREKEQEQRRNRDNREANEKRTKKLVELGQDNNGENRARLKLYDEQQRAGNGVAHCPFTLDPIGITQLFSPEIEIEHVLPRSRTLDDSAANKVLCFRTINRIKRGKTPWEAFHADPKWPDIAANAEKLPPNKRWRFREDAMDVFEARTSGKMDKTTLEQMGLTTGFQARHLNETKHMSRLAKAYLGKICDPDAVYVTPGALTSLLRGKWGLNSILSDDNLKDRTDHRHHAIDAITIGAMTRSLLLELNTLAGKAEQSDYDDVVGKVPWPFDNFRDAVRSVVDRVVVSNKPEHGKQGALHEDTAYGIVGDEAEAEEIGNLVRRKLLVDLTPGEVDRIRDAGLRKAMQAAVAPSRDARGKVSDAKGFAAALDTFAKAQGMRRIRVGKEDMSAVTIHDRQTDKAYKAVAPGENHHVDVVQMRDGAWKGFAVTVFEANQKDFRPQWEREKLGGKLVMRLHKGDAVELESSGVRLVKFVQQIWMKSNLVLLTEHNEGGDLQKRHQDADDPFRWDFANIGKLKERGCVAVKVDELGRVTKRISNT

SEQ ID NO: 7565 - protein, 1061 aa, synthetic construct
  REGION 1..1061: note = Synthetic
MSRIRFSFDIGTNSIGWAVWRTGDGIFGSDTALDLARAGVLIFKDGRNPKDGQSLATMRRVPKQSRKRRDRFVLRRTDLLEALRSNDLIPAHEDEARDLAEIDPYFLRTKGLDEPLTPYEFGRVLFHLNQRRGFRSNRKADRKDNEKGKIAEGSERLRVLLEETNARTLGEFLWSKHRGTPRTRQATRIRVEGEGAKSLYAFYPTREMIRAEFECLWSVQSRFAPERYTADLHDLLCTIIFRQRDLKPPRIGVCTFEPDEQRLPKALPSVEARAIYERLAHFRFSIGPVQERPLTKTERDVVATALMIGKNLTFKAIRKALKVPAQVRINFEEAGESGIEGAATAKFLSKPDHFGPRWLALPFDRRDQFVTKLLDEADEDRLVERLVTEDGLTDATARRCATIPLADGYARLGATANREVLEALIRETDADGHVVTYAEAVRRAGERIGRPWHHSDERDGEIMDRLPYYGRILQRHIMPGSGEPGEKDEAARFGRIMNPSVHIGLNQLRKVVNGLVAEFGHPDQIAVELARDLKLNREQKERLDRENRANRAQNERRVSRLAECGERDTPENRVRLRLFEEQARANDGVAQCPYTGRTIGISELFTADIEIDHILPVSLTLDDSLANRVLCRREANRLKRRQTPFQAFGAKPEWPDVLARVGRYPPNKRWRFKPDALERYGKDGGFLARQLNETKHLSRLAKIYLGKICDPDRIWVTPGTLTGLLRGKWGLNSVLSDDNFKNRSDHRHHAIDAVVIGALTRGVVQRIAHEAGRAEDRDLEKVFTEIPTPFDDFREHVRDRIRAITVSYKPEHGREGALHEDTSYGLVPETDPDRALGNVVLRKPLKSLTPNEVERIRDRGIREKITLLAAPFRDASSRKIGDAKGFAQMLETFAQESGIRRIRILKPEASIEVISDRETGRPYRAVAPGENHHVDIVQMRDGSWRGFAASVFEVNRPGWRPQWERDRLGGKLVMRLHKGDLVEVDDKDGVRRIKVVHQIEISSNRIRLAPHNEGGKLQERHADPEDLFRWDLATIPLLRGRRCRAVKVHPTGRIQPTKTNV

SEQ ID NO: 7566 - protein, 1059 aa, synthetic construct
  REGION 1..1059: note = Synthetic
MGIRFAFDLGTNSIGWAVWRTGPGVFGEDTAASLDGSGVLIFKDGRNPKDGQSLATMRRVPRQSRKRRDRFVLRRRDLLAALRKAGLFPVDVEEGRRLAATDPYHLRAKALDESLTPHEMGRVIFHLNQRRGFRSNRKADRQDREKGKIAEGSKRLAETLAATNCRTLGEFLWSRHRGTPRTRSPTRIRMEGEGAKALYAFYPTREMVRAEFERLWTAQSRFAPDLLTPERHEEIAGILFRQRDLAPPKIGCCTFEPSERRLPRALPSVEARGIYERLAHLRITTGPVSDRGLTRPERDVLASALLAGKSLTFKAVRKTLKILPHALVNFEEAGEKGLDGALTAKLLSKPDHYGAAWHGLSFAEKDTFVGKLLDEADEERLIRRLVTENRLSEDAARRCASIPLADGYGRLGRTANTEILAALVEETDETGTVVTYAEAVRRAGERTGRNWHHSDERDGVILDRLPYYGEILQRHVVPGSGEPEEKNEAARWGRLANPTVHIGLNQLRKVVNRLIAAHGRPDQIVVELARELKLNREQKERLDRENRKNREENERRTAILAEHGQRDTAENKIRLRLFEEQARANAGIALCPYTGRAIGIAELFTSEVEIDHILPVSLTLDDSLANRVLCRREANREKRRQTPFQAFGATPAWNDIVARAAKLPPNKRWRFDPAALERFEREGGFLGRQLNETKYLSRLAKIYLGKICDPDRVYVTPGTLTGLLRARWGLNSILSDSNFKNRSDHRHHAVDAVVIGVLTRGMIQRIAHDAARAEDQDLDRVFRDVPVPFEDFRDHVRERVSTITVAVKPEHGKGGALHEDTSYGLVPDTDPNAALGNLVVRKPIRSLTAGEVDRVRDRALRARLGALAAPFRDESGRVRDAKGLAQALEAFGAENGIRRVRILKPDASVVTIADRRTGVPYRAVAPGENHHVDIVQMRDGSWRGFAASVFEVNRPGWRPEWEVKKLGGKLVMRLHKGDMVELSDKDGQRRVKVVQQIEISANRVRLSPHNDGGKLQDRHADADDPFRWDLATIPLLKDRGCVAVRVDPIGVVTLRRSNV

SEQ ID NO: 7567 - protein, 1109 aa, synthetic construct
  REGION 1..1109: note = Synthetic
MVSTHTEPGQETALRDGGNDFMTSCIPLRFAFDLGTNSIGWAVYRITHFPDPNLAPPTVAELIACGVRIFNDGRNPKDGKSLAEMRRVPRAARRRRDRYLQRRTDLIALLVDLGLLPVDEKERRALVTLDPYRLRALGLDQPLTPFELGRALFHLNQRRGFKSNRRVDRRSDEKGKIETAAGLLRGALKSENARTFGEFLWRRHGGPDGKATPGTRKAVRIRLEGEGAKALYHYYPLREMLEHEFDTLMGRQRAHHPGILTDDAISRIRHTIFWQRPLRPVERGRCTLVPEEERLPKALPSVEERTIYETLNHLRYGEGLLRDKALTKAERDLVAQPLLQGKSKRHVTFDTIRAALKLNSDVRFNREDSGRSDLYDCRSQSAEKLAAKDRFGPRWYVLPLAERDAIVTRLIDEDDEEQVASWLMADHGLDEDAARRVANWSPREGVSRLGRTANAAVLEELKKDVIAYSDAVQFAGKALGVTWHHSDFRDGVIEIPLPYYGQILERQVSFGSGKPEDNAEKRYGRVANPTAHIGLGQLRRVTNKLIKAYGPPAQIVVELARALKLTKEQKDKEQRENARNKTENDRRRAILEEQGQADTGENRLRLRLFEEQQRANGGVALCPYSLKPIGIEALFSAEIEIDHILPYSRTLDDTKANRILCYRAANRHKRRETPYEAFGGAHKAFPEQPDWTDIATAAAGLPANKRWRFAPDAMERYQNKERDFLARQINETRHLSRLARFYLGAATGSTDHVYVTTGQLTAMLRARWGLNAILGDENRKMRADHRHHAIDAITIGAIDRSLLQDIARRAGAREEQDLARTTADVPDPFQNFREIAREKVRAVVVSVKADHGKGGALHEDTAYGLVTNPAEAAEIGNLVFRKPLVALNANEIDSVRDPHLRSELQALAAPYRSDKGKLTDEKGLKAALAAFRVKTSHNGNEVERQVRRVRIGKTKAGEVHIRDRCTGAVYKALLPGDNHHIDIVQMRDGTWRGFAATVFDVNQPGWRPLWERERLGGKLVMRVHKGDMIEVDDADGQRSIKTVHRLSPSNNVLYLASHNEGGELGKRHDDKEDLFRWDFANIGGLKKRNARKVHVDEIGIRSLTRSNAD

SEQ ID NO: 7568 - protein, 1072 aa, synthetic construct
  REGION 1..1072: note = Synthetic
LCKVNSIFRVGIDQLDDQCGAEMGTRFSFDIGTNSIGWAVWQTGDGQYGPDTSLELTASGVSIFKDGRNPKDQKSLAEMRRVPRGQRKRRDRFSLRRADLVKALRDTGLFPPSEGETKALVALDPYEIRNRGLSERLTLSELGRAIFHLNQRRGFRSNRKADRKDAEKGKIAQATKALAAQFAQSDVKTYGGFLWTLHKGPVRSRKGTRIRMEGEGAKALYVFYPTRAMIRHEFDELWQRQAVFEPERLTDAAKVQIASILFRQRDLKPPKVGKCTFVPEETRIPKALPSVEARELYERLNHLRLNDRPLSRRDRDLLATKLLAGDNLTFAQLRKALKLGGGVRINYEEIEEKGIKGADTAFRLNRPDHFGPKWRSLSWDEKDAFVRHLLDEPDEDRLVGQLQADYGLSEAAARNCANIGLPDGYSRLGPTANRAILENLIDEEDKDGHVIPYSEAVKRAGWHHSDERDGVIFDQLPYYARVLERHVMPGSNDPDEPDEAKRWGRITNPTVHIGLNQLRRIVNALVTQFGHPDQIIVELARELKLNAKEQDKQEKENRQNREKNDKRAILLGEQGLAVNRENLMRLRLFEEQQQANNGVAQCPYSGRSINVEALFSDAVEIDHILPISRTLDDGMGNKILCFREANRAKRQQTPFEAFSDTPQWPDILARGQSLRRKGWRFRADAMETFSGEKDFLQRQLNETKYLSRIAKIYLGKICHPDQVYVTPGRLVGLLRGKWGLHSILGDDNRKNRDDHRHHAIDAIVIGSLTRGLINYISHEAGRMEAEDLDRVFGTIPYPVADFRDQVRHSVEAITVRHKPEHGKQGALHEDTAYGLITDEAEARMIGNLVMRKPLKGLTDGEIDRIRNPDIRADLQRLKAPLMDGKGKVKDAKALAAILEAYGQEHGIRRIRIGKFDSSVVKINDRQTGKPYKAVAPGENHHVDIVQMRDGTWQGFAATVFEVNQRGYRPEWEQQKLGGKLVMRLHKGDMVELRDDRTGRRMVKVVQRIEISANRIRLAAHNEGGKLQDRHVDSDDSFQWDFANIPKLKERGCVAVFCDPSGQVRAKKSNVAL

SEQ ID NO: 7569 - protein, 1122 aa, synthetic construct
  REGION 1..1122: note = Synthetic
MGIRYAFDIGTNSIGWAVWRTGRDPKGIFGEKDAPLELLGAGVRLFKDGRNPKDGQSLATMRRIPRQARKRRDRFVLRREALVAALIATGLMPDEKKERKALADLDPYQLRARGLDEKLTPHEFGRAIFHLHQRRGFKSNRKTDRKTNDKDQGKIAAASAALAKKLEDQNARTFGEFLWRRHRDPDLKRQAVLKAHDPAKGKPDLRTASLRQPTRIRLEGQGATALYKFYPTRQMLKDEFDALWDAQARHRPTLLTQEVKDKIEAILFRQRELKPPRIGLCTFEYAAGEKEKRRPKALPSVQAREIYERLNHLRLSTGAGTDRPLKPSERDDLATALLYSGLTKIKVGKTTGLTFTEMRKALRLGGEVRINFEEMGEKGLADLRTNRLLTQDDHYGPRWRALSWAGKDAFVQKLLDATDDEKLVARLMAEDGLSEQQARNAVSIPLPDGYSRLGPTANAAILEALIEEHDENGFVVTYDKAVRRAGERLGKNWHHSDERDGELFDALPYYGKVLQRHILPGEMKPEDKKDEAKFYGRIMNPSVHIGLNQLRRLVNALIERFGPPDQIVVELARELKMSAREKEQEQRRNRENREANEKRAKRLAEQGQDNNGENRARLKLYEEQQRANGGIALCPFTLKPIAISQLFNPNGEIEIEHILPRSRTLDDTAANKVLCFRSINRLKRGNTPWEAFYQQDNWADIAANAEKLPPNKRWRFREDAMDVFEARTSGKMNKKTLEDMGLTSGFQARHLNETKHMSRLAKAYLGKICDPDAIYVTPGALTGLLRGKWGLNSILSGDNRKDRTDHRHHAIDAITIGAMTRALLLELHTLAGKAEQSEYDDVIGRVPWPFDNFRDVVRIAMERLIVSNKPEHGKQGALHEDTAYGIVADTVEATEIGNLVRRKLLVDLTPGEIDRIRDSTLRKEVQVVVAPFRDARGKLPKANEKDYQAALKDFADNHKMRRTRVGKDDISAVAIHDRRSGKAYKAVAPGENYCVDVVQMRDGSWKGFAATVFDVNRKGWRPEWERDKLGGKLVMRLHKGDAVELLDDDGVRRIKIAVRLEARRLRLVTHNEGGDYQKRHDDPEDIFRWDLASISGLKERRCVAVKIDHIGRILKRSSNVAT

SEQ ID NO: 7570 - protein, 768 aa, synthetic construct
  REGION 725..768: note = misc_feature - Xaa can be any naturally occurring amino acid
  REGION 1..768: note = Synthetic
MCTASTSRLRYSFDLGTQSIGWAVLSVDDTGSSARANGLLDCGVRIFDDSRTAKDEKPLGEQRRGPRAARKRRDRFLMRRQRLIQMLIGFELVPSDWSARKKLADLDPYRLRAEALDRRLEPHELGRVLIHLNQRRGFKSNRKSTSAKEKDDEKGMIASAAERLAAEMAGKARTFGEFLWQRHRGPDGKSSPRTRQAVRIRVGGEGRDTLYEFYPLRDMLADEFDAVVQKQRTYHPQLLSEDRVELLKREIFFQRDLKTPKRGKCTFVPSEERLPKALPSVEARVIYEAVNNLRYGVGIRVDTKLTAKQRDEIVQRLLRGRNVTASQLRKITGAPGDSRFQIATGEANGLKDDFVAKSAKLLSVDDAFGAAWHELPMEQKDAIVWKLIGDDDDEVVRQWLIATQGLPEEAARKVASLSFRIGTARLGATANAAVLGQLMSGDVPTYSDAVIRAGKALGENWHHSDLDNPELQEFLPYYAQVLERQVMPGTGAAGDNEAEATFGKIANPSVHRCLRQLQKLVNALIRKHGRPVQIVIEVARDLKLGEQQKKEHHATNKKNREANDARRTELEAVGARVSADSLLRLRLYDEQRRAGDGVAICPYSLGTIEREDVLSDKIEVDHILPYSRTFDDSAANQVLCFRSSNRDKLRLAPHEAFGDHPDWAEIESRARLLPANKRWRFAEDAMERFENEERDFAARQLNETRYISKLARAYLTVVAGKGNVXXXXXXXXXXXXXXXXXXXXXXXXXXXXXXXXXXXXXXXXXXXX

SEQ ID NO: 7571 - protein, 1071 aa, synthetic construct
  REGION 1..1071: note = Synthetic
MQQASPPLRFAFDLGTNSIGWAVYELVGTSSGTLTVSKLVDCGVRLFEDGRNPKDGRSLAEMRRIPRSARRRRDRYVLRRDELIAALVDHGLLPSDPKMRRALADLDPYQLRARALDEPLREFEIGRVLLHLNRRRGFKSNRKADSRDKEKGKIAEGVARLRERLATEGVRTLGEYLWRRHGGPDGSATPRTRLPVRIRLEGEKSQALYDIYPTRDMLEHEYDEIMRAQAAHYPDILTPTVIAELKKIIFRQRELRPVRAGRCTFEPSEERLPRVLPSVEARAIYEVVNQLRYGEGVELKTPLDRAQRDLLAAKLLSGKSISFDRIRSVLKLPPTVRFNLEDAGKKDLKDYASKSGANVGKRFGPKWQQLPLSERDLIVRKLLDESDEEALVSWLRTEYGLDEATARAVASWMPPPGTSRLGPTANAEILAELQADHLCTYSEAVRRAGERLGRNWHHSDFRDEELYIPLPYYGRILERHVAFGTGDPNDPPEERFGRLPNPTVHIGLGQLRRVVNRLISVYGKPAQIVVELARELKLSKKQREEEQKKNRENRQANDRRRQQLEKLGQPDTAENRLRLRLFEEQQRANNGVALCPYTLQPISIEKLFSSEIDIDHILPYSRTLDDSVANRILCYRTANRVKRSKSPAEAFGQDARWKDILASAAGLPANKRWRFASDAMERFEKSERDFLARQMNETRYLSRLARLYLSAACHPDNVYVTTGQLTAMLRARWGLNSLLGDDNKKERTDHRHHAIDAIVVGAIDRSLLQEMSRRAAQAEAEGRHDITRDVPEPFAGFREAVAEKVGSIIVSFKPEHGKTGALHEDTAYGLVKNEAEAAEIGNLVFRKPLVDLNPNEIDRVRDPVLRAELKKIASQFTSDDEKLLDAKGLRAALEEFAKTPAPGRMQGIRRVRIGKKEKNVIFIRDRRSANVYKALIPGSNHHIDVVQMRDGSWQGFAASLFEVNQPGWRPAWERNKLGGKLVMRLHKGDMIELDDPDGKRRIKVVHRLQPSQNRIYLAPHNEGGDLQKRHDDKEDLFRWDLANISRLRERRARKVKVDEIGRVKLAKSNVY

SEQ ID NO: 7572 - protein, 1009 aa, synthetic construct
  REGION 1..1009: note = Synthetic
MTKIFAFDLGISSVGWAYTIRKNDTAEIVDSGSRIFNKAEHPKNGSSLALPRRQARSSRKNTNRKRGRIYKIKLHFAKTMNLDLNDILQDFGDISNFFKNDKHTLSPWQLRNDGLNRKLNKDEWLRVLIHIAKNRAYSSNKVGNEENNGKVLRAIEENNNLLKNKSYLTVGQMMYNEFFEKKNEENKFINVRNKKDSYRRSISRKQTLDETKILFEKQREFNNEFANVELEKFYVKTAFYQRKIKSFENLIGFCKYIEGEKRAPKNSISAQEFIALSKTVNTLANIENSTGLVFDKKETILTVFKTLKDTKTKKITYSNLRNILQLDDMIEFYGLDYHKSNSKTGEIKSKKKIESENIFIELKTLKLFNDIFKNDLNKIPITTLDTITTKITIIKDDKELKKELGKLLSDINLESKEEIIDKLSQISFSGHIELSLKALYQIIPFMKDGKRYDESLILANLEVIKPDSKYKLLPPFNDTMFANSLTNPVVARAISEYRKVLNSMIKKYGSPHKIHIELTREVGKNFQRRKEIEKEQKENRESNEKAKEKCEELGITPNHKNILKLKLWVKQKEISVYSGKKIEIKHLQDENFLEIDHIYPFSRSYDDSQHNKILAFRSENQNKGNKTPYEWLGQQEDKWEEFVSRVFFTELPKNSKKRLINKNFKDKNIGEQKEFLSRNLNDTSYIAKLVKDYTLDYLEFLPLDKNETQYGKGSKQHIVCINGSLTTMLRHFWGLDSKNRDNHLHHAEDAMILSLITNQNVKAYGDYKTNLLEYKTKKAETIANELKQNNDFRTKALLKCGADDFRKIVNQKTNEIFVSLAPRRKVGGAFHQETIYSKEEIEKYYKYDLQKINNYLECGVIVKLNRGYAKNETMPRADIFQKDGKFYIVPVYSMHFATGTLPNKAISGAKDGWKEMDETYKFCFSLFKNDLIKLLVGSAKEPIFCYYIGLDVSSSGRLIYKTHLSSNELRSSIGTIKNLEKYEISPIGNIKKFDFQERQPVKLKTTKRN

SEQ ID NO: 7573 - protein, 1122 aa, synthetic construct
  REGION 1..1122: note = Synthetic
MILNMTHHVAATNRVRYRIGVDVGSYSVGLCAIQFGDTGAPERILAATSWLHDSGVLDNKTATTRLAAAGVARRARRLRRRRVRRLRELDRRLVGWGWPEPAESSDPYAAWRARARLASEFVTDEVERQELLVRALRHMARHRGWRNPFTRVAALQAVTQPSELLEAFRDRVSAECGSAVPADACVAELAVAALDHGKGQPLRMGRSGASRPGKDRGEKAFSFLGGKLMQSDNANEIHAYGRVQGLSADLVHELISLVFAAESPKGSHVRKIGKDPLNDSPRAAKATDSFQRFRIASVIANIRVGAADGGRCLTVDERHAVFDYLMNIKLGEQPTWAEVGKVIGLSRGSLSGTAALDQDSEERLPLRPPIYVTDQNVRMAKNTLATVQNWWMSVDGERRDALVSLLIDGVHDEETAAGTEAWELLNDLDESELAELDKLALPAGRAAYSLDTLRALTQRILGSEDDLHGARKHVFGVSDSWRPPAEPIGEPIGNPSVDRVTKIVARWVEAAEREWGAPERITIEHVREAFVSARSQQDRDREMNRRFAENERKRQLIKTDEKIEARVRSADLRRFEAITRQKGQCAYCGVTITYATSEMDHIVPRKGVGSTNTRTNLVAVCLPCNRSKGSQPFAAWADGSNRDGVSVDEAVTRTHHWTPDRGISRKGWNLFLKELRERLTRTDEDPEIDGRSMESVAWMANELHERVAAHFAEAGTKVSVYQGAVTAGAREAAGIADRIPFIGGGGKTRLDRRHHAVDAAVVTLLDESVARTLAERNNLRVSQDYDPDPANDWRSYCGSGPTAQRRFADWRSDMNRLAEILTDAFTNDRVVVRENVRLRLANGKVHDDTIRPFEVRLPVGGAFTRDQIDAASTPALWTALTRDPDFDEVSGLPASPSRRLRVHGTHYGPDDVVALFDKPRAAIAVRDGWAELGDSIHHARIYRWEERGRAKYGMLRVFAADLYRHRDEDLFSVEPEPSWVSMRVAHASIGRSDLSQKEYLGWLVPGDELLIDMSNLLDGHVGRASEALGLGTLQRWKLTGTSDPAKLSLVPLFVATEGVDKFLGVYPELEDARASIAAILTRWRPSVDVLFRNGFPQVIRRDALGRPRLESRANLPTGWRVG

SEQ ID NO: 7574 - protein, 1140 aa, synthetic construct
  REGION 1..1140: note = Synthetic
MPGLLFVQHCRTVSVVRNDSVMSEVREPKGPKNYRIGIDVGLYSVGLCAIEYDSIGCPVKILASASHIHDSGVLEEKTGTTRLAAAGVSRRTRRLIRRRVKRLKALDLRFRELGWPEPEDDLDPAAPWRARARLASEVVLNERELKTLLWRALRHMARHRGWRNPYTPVAALKRPGASSELFDEFRARVESRTGIVTAGDVTVAELAVAALDNDPASPLRMGKTGKSRPVKERGEKQFSYLGGKLMQSDNANEIHTYAEVQSLSAELVDNLVELVFAAESPRGSHYERIGKDPLDQQPRAPKASDAFQRFRIISVLGNVRVNSGGVQRRLSLGERRASYDFLLNYKAGEQPTWSEVAQVLGYARGEFGGVAALDENFDERLPLRPPVHVTDHNIRQAPKGLAPIRDWWGSASSASRDALVSLLIDGHRNEGSAAGVEAWELMHSFAEDGLLELDKLALPAGRAAYSLGSLRKLTDRMLASEDDLHDARKAVFGVDDDWHPPAEPIGAPIGNPSVDRVTKIVARWIEASESEWGAPAQVTIEHVRDAFVSVKSQRERDNEMRKRFDANEMQRLAIKNNEKIVSRVRIADVRRLDAVQRQNSGCAYCGETITFGTCEMDHIVPRKGVGSTNTRENLVAVCVPCNRSKGSLPFAVWAATTDRREVFVAEAVARTRHWNRDKGISPKGWRRYLTGIRARLERTDADPEIDGRSMESVAWMANELRDRIAAKFHEAHTKVSVYQGAVTFGARQAAGIADKIPFIGGGGKTRLDRRHHVVDAAVVTLLDESVARTLAERNNLRVSSDYEPNRNFDWRSYEGSGPTAIQRFTQWRINMNRLADLLTAVFDDDRIVVKENVRLRLGDGKAHLDGISPFVIHRAVGDSLSRDEIDAASTSAMWTALSRDPDYDPVEGLPANPARRLRVHGTHYEAQDELAFFDKPRAALAVRGGWAELGDSIHHARIYRWEERDQVKYGMLRVFAADLYRHRHKDLFSVEPDQSWISMRAALPSIGRAELSDKEYLGWLVPGDEMLIDMSRLLDGTLGEFSAAFSLGARQRWKVTGFEDSGRVNLAPLYLAKEGLEKFIELNPGESQRRKSLESVFNKRWRVSVNKLFMLGRPVVVRRDSLGRPRLESKANLPVCWSAR

SEQ ID NO: 7575 - protein, 1164 aa, synthetic construct
  REGION 1..1164: note = Synthetic
LGRLNAPRLCRHGEAQPGLPFFFAWWPTGFGGFVGAPCNYAVMASNPARDPRSYRVGIDVGTHSAGLAAVEFDELGRPTKILSAISWIHDSGVLDARTAKTRRAEAGLARRVRRLYHRRDKRLQALDRWLAERGWSSLPDVGDPYLAWRARKTLATEKIVDETLRNAHLATALRHMARHRGWRNPFAGVASLYEVSTPSTFMVGEPGTAKTGPVPGFQQRVEAATGARAAGDVTIAELAVAAIDFDNRVPLRGGKTTNRRVKRRVARVFSYIGGKLMQSDNANEIHAYALTQGLPREVVRQMIDLVFAAESPRGSWLHKVGKDPLNGQPRAPKASDAFQRFRLVSTLANVRVNDVDGQRPLTPGELNAAYQYLLAVDPGDRPTWADIARVIRQPRRSITGAADTNPDGGERLPLHPPVHGTDHNLRQLRKLRPLRDGWAAADGEVRDALIALIVDSYGDESSAVGVTAAAILNSLDETELGELDRLDLPAGRAAYSLDSLRRLADHMLATGDDLHVARKAVFGVADDWVPPADAIGAPVGNPAADRVFKIVARFLMAAEAEWGVPQRVSIEHVRDAFSSEARLREIDRANQKRFQAKLSQRESVGASVKAEGRVRESDVRRFEAVERQNSQCLYCGEPITFETAEMDHIVPRRGPGSSNTRTNLAAVCITCNGSKSNIPFARWAEQCGTPGVSVKEAVSRTTFWRRDNGVPVKVWQRFLRDVRDRLERTEEDPPIDARSMESVAWMANELRDRIAAHFKGLNTSSGTQQVFVYRGALTAEARKAAGVEDRIPWIGGGGKTRLDRRHHAVDAAILTLLDGSVACTLAERMSIRDAQRFHRDGIETWKTYSGVNPAAQQRFSTWRSNMNQLADHLAIHFNQDRVVVTENLRLRIGNGRVHDDTINPMTRRRVGDAFTRADIDAASTPQLWIALTRDPEFDDKNGLPENPSRRLRIQGTWYTADEEIPFFDRPRAALAVRDGWAQADTIHHARIYRWQEKGATKYGMLRVFAADLHKHAREDLFNVAPHPAWISMRTAHPSIGRSNLSDKEYLGWLVPGDEILTRDVIHTPAGLGPVARWKVRGFEDHSRFNVEPCYLSEEGLDRFLDSAELDPDAKDNIREIIAGKGRRNVNSFFNTARPMIVRRDALGRSRLKSSSGLPVCWSVE

SEQ ID NO: 7576 - protein, 1144 aa, synthetic construct
  REGION 1..1144: note = Synthetic
PAAALVEGVAGEADDVEGIHHRDRVRQFFGGGGLEAGEAVHRDHFHLVAPGLVAFGQPGLEHALGAALDHVQQPDRSAVRPCWRQVDDHGHVLVTAAGVSPHVLIHADRGDPGEPCRVVDQHPLTLGKNRVVRRVPTDVQAFGDPGHRQVLDHDPFQSPPQPAARQPRLGLGRLRGVLAPHMSAVGAPVPADEHFQHGRSPAERFVSEPPHHRVTQQTVLAAAVAPVVRIDNPAGDDRPSRFESLTNSDEPQLVEPAEGGQVRGSEGSVRHVEVFQMFGVRTSILGRPRPLPRHRRAGPAHTPPTPPIAMSRQTRAPKATDAFQRFRVISVLANVRIKVGAGQRSLTVGERRSAYEYLMACTPRTDPTWADVAKHLGLPRGALSGTASRDDDAQERMPLRPPVHSTNHAIEGAGKKLTMLKEWWEIAADDARDALIKLLVDGEQDGDTAAGVAAWEFLNELNEEALSALDGLDLAAGRSAYSLPSLRALTQQMLNTTDDLHAARKSVFGIDDSWTPPAEPIGAPVGNPAVDRVTKIVARWLQAAESEWGAPTAITIEHVREAFLSESVVRERDREMRQRFDANERTRLMLKSGESDPTRVRNADVRRYQALVRQKGQCAYCGDTITLTTSEMDHVVPRKGVGSTNTRSNLLAACLPCNRSKGKIPFAVWADQSPRPGVSVAEAIARTKFWTKDPGASPRSWRVFLKEVQERLARTDEDPEIDARSMESVAWMANELRDRIAARFTNAKVSVYRGAVTAGAREAAGIAEKIPFLGGGGKTRLDRRHHAVDAAVVALLDESVARTLAERNNLREAQSYKPDPSNDWRDYRGNGPQARARFEIWRSRMDKLAALLATAFEEDRVVVMENLRLRLGDGKVHDDTIHQLSRRRVSDAFSRSEIDAASTPALWTALTRDPDYSAEEGLPANPNRQLRLHGTRLGPDDVIEFFDKPRAALAVRGGWAQLGDSIHHARIYRWEERGTVKYGMLRVFTADLLRHRDENLFTVEPKPSWISMRAAHPSIGRADLSEKEYVGWLVPGDELLVDNLDAPIVPAVGSVRRWRVRGFEDASRFNVSPVVLAEEGLERFLARVQLDEEEIKQVKDVVCGKGRRAVTKFFASKPVVIRRDALGRPRLRSDAGLPTCWQTK

SEQ ID NO: 7577 - protein, 1242 aa, synthetic construct
  REGION 1..1242: note = Synthetic
MKKILGLDLGTNSIGWAVVNADENGKPVSIERMGSRIVPLSPDDTNEFTKGNAISKNQSRTEKRTARKGYDRYQLRREYLTAELRKSNMLPDERLIKLPVLELWELRAKAATHEIQLTLPEIGRVLYHINQKRGYKHAKSDESADTKQKAYVAEVNARYALIKERNQTIGQYFAEKLKENEIETPKGKFYTFRIKEQVFPRRAYEAEFDQIMECQKVFYPEILTEKEIDKLRNEIIFYQRKLKSCKHLVSICDFEKREYENKEGKIVFGGPKVAPKSSPLFQTCKIWEEVNNITLKNRKNDELYITLEQRKAMVDFLDTHEKLTLKDLYSILGISKQDGWWGGKAIGKGLQGNTTKIALQNALGDFENAEKLLQFNLKNTDSGLTDELTGEVIQVIEANVEKEPLYDLWHTVYSISDREELANALKKKYNIYDEDIINRLYSIDFVKQGFGNKSAKAMRRILPYLQQGLKYSDACEYVGFRHSDSLTKTENEARQLLDKLPPVKKNALRQPVVEKILNQMINVVNALMVEYGQFDSIRVELARELKQSKDERNTTFLQNEAYERLNESIAKRLNSEGITPTKRIIEKYKFIFPTKGCIDKKTGKFVSKNFDALATVNQCIYCGKPFSLSAALNGEGYEIEHIIPRDLICDNSQSNKILSCRNCNSTKNNRTAFDFMRSQDKAVFDAYIERVEKWYEDGIISPSKRERLLLSYEDYLERKKKGKTTEEDKKYWEEFVSRQAGETQYISRESIRILKQCCRNVNVTSGTVTATLRHLWGYDEILHQLNFERYKQAGLTEIVTWTSDHGKNEHSKEQIVDWSKRIDHRHHAIDALVVACTQQGFIQRINTLNADDTKDLMRKQIESAGIKFEEKKVLMDKYLTSFVPFTTKVVADEVKKILVSFKAGKKTASTGRRVKYVKGKKEVLQDGIVIPRGALHEEGVYGQIEINGKKEIVKKYKLGKGAQGFVFTGKETYEKKVNKKTEEVQVVDKVEDVLGSIVDGNIRAKILERLNQGFEEGKDYRNDVKKALDNLNNLDNNPIYADKNKTIPIRTVRCRTGLSAVVPIKRNELGESIGFVKPGNNHHIAIYRDKEGQLHEHTVTFWHAVERKKYGLPVIIDNPSEFWDSIMDKQLPESFLEKLPDVNWIFEMSLQQNEMFVLGMEDEIFEDAIRYKDYSMISKYLYRVQSISGSDYWFRLHVETQNDKSSSAKDAMKYHRVKSLKALFELHPRKVNISVVGKIIEL

SEQ ID NO: 7578 - protein, 1210 aa, synthetic construct
  REGION 1..1210: note = Synthetic
MKLVLGLDLGVGSVGWALIFITDSGEPIKILALGERIVSMDPDNSKEFSAGATCTLNQKKTKAKSVRKGYSRYVQRRDALTAELRHIGMMPDETLIKLPVLDLWQLRANAATEGKKLSLAEIGRVLYHINQRRGYKHGKSDVSSDNKQKGYVKAVNERYCMIQERQQTIGQYFALKLKETAVTTEKGTFYTFRIKDQVFPREAYEEEFDRIIECQKKFYPELLTEKVIDKLRNYIIFYQRHGKSCKHLVSVCDFERKPYKDENGKVFYNGPKVAAKSNPLYQIEKIWEEVNNISLRNKKGEELEITLVQKRELFNYLNTHEILRLTVLYKILGISKRDGWSANDAVKRGLKGNTTFVQLQKALQGVEDCEELLRFQLNNMPTVVCDEVTGESLQMVNPDCIGQPLYRLWHAIYSLKDKRQLKDTLRKNFKIEDDEIIDLLYNIDFTKDGYGNKSVKVIRRLLPYLQAGLKYNEACEYIGINHSNSLTKEENAQRVLLEKLPQIGKNELRQPIVEKILNQMINVVNAIIAKYGRPDTIRVELARELKQSKEERKLMSDGIAAREREKKRDGKILEEEGIHPTKNRLERYRLWKETGERCLYCGNGINLNEFLRGGEVETEHIIPKALLFDNSYSNKTCSCRECNRKKGRRTAYEYVSSLGEERFEVYLNVVKMLYDEGKISKKKMDWLLMKSEDIPQDFINRDLRQTQYISRKAMELLQKVCYDVTVTSGHVTSFIRHIWGYDTILHKLNFNRYKQGGLTEVVQFEHRGGKHEREVISGWSKRLDHRHHAIDALVIAMTKQSVIQRLNTLNTCRDEMYQEVESEKKEWRDDYSLLEQWLRELKHFSVEEVQRVIAKTLVSYKVNKKITSPGTRAVYSKRKKKVVQRGILIPRGVLHEDSVYGKIKIQGDLDPVYVIKYKLGVGAMGFVFTGKETYEETIKSNKKTGLEEVKVKDDIGNTLMSIVDGNIRNRIKQRLNIGFPEGEDYRNNPQKALENLKDLDNYPLYADDACKIPIKSVRCRTGLSAVVPLRYNGEGQAVGFVKTGNNHHVAIYRDRDGGYHESIVTFWQAVSRKRFGIPAIIEQPPALWESISSGLQREIPKSILETFPEPEWTFIVSMQKNESFILGMEEDDYQRAMEEKDYAALGNNLYVVQNISSMVYRFCLSTTTIFDSQKMNKPDKRFLNIQSFQAFFDKNPHKIKIDLLGEIVNN

SEQ ID NO: 7579 - protein, 1247 aa, synthetic construct
  REGION 1..1247: note = Synthetic
MKKILGLDLGTNSIGWAVVNADDNWKPISIESMGSRIVPLSPDDTNEFTKGNAISKNQSRTEKRTARKGYDRYQLRREYLTLELRKLNMLPDEKLIKLPILELWELRSKAATKGNQLSLPEIGRVLYHINQKRGYKHAKSDENADTKQKAYVAEVNARYAMIKERNQTIGQYFAEKLKENEIVTPKGKLYTYRTKEQVFPRMAYEEEFDKIMECQKEFYPEILTNAEITKLRNEIIFYQRKLKSCKHLVSVCDFEKREYETREGKTVFGGPKVAPKSSPLFQICKIWEEVNNITLKNRKNDELYITLEQRKAMVDFLDSHERLTLKDLYSILGISKQDGWWGGKSIGRGLQGNTTKIALIKALGEFENAEKLLQFNLTNSDSNLVDEVTGEIIQIVDTKVEKEPLYDLWHTVYSISDKEELANALKKKYHIYDDDIINQLYAIDFVKQGFGNKSTKAMRRILPYLQQGLKYSDACEYAGFRHSESLKKAENEARQLLEKLPPIQKNTLRQPIVEKILNQMINVVNALMVEFNTYFDSIRVELARELKQSKDDRNATFLQNEAMQRLNESIAKRLSSEGIKPTKRIMEKYKFIFPTKGCIDKKTGKFVTKSFDSLSTVNQCIYCGKPFSLAAALNGEEYEIEHIIPRDLLCDNSQSNKVLSCRSCNSKKSNKTAFDFMRNQDEVMFDNYIKRVEKWYEEGIISPSKRERLLLSHEDYLERKRKGKVTDEDKKYWEEFVSRQAGETQYISRESIRILKQCCRNVNATSGTVTATLRQLWGYNDILHQLNFERYKQAGLTETVTWESDHGKNKHSKEQIADWSKRIDHRHHAIDALVVACTQQGFIQRINTLNADETKDLMRKQVESAGIKYEEKKALLDKYLLSFKPFNTQTVADEVDKILVSFKAGKRSASTGKRIEYKKGKKQIVQEGVVVPRGPLHEEGVYGQITINGEKEIVKKYKMGKGAQGFVFTGKETYEKKEKLDKKTGEVQIIVEDKIKNALDSIVDGNIRAKVLQRLNYGFEDGRDYRDDVKKALDNLNNLDKNPIFADESNTITIRTVRCRTGLSAVVPIKRNEQGKPIGFVKPGNNHHIAIYRDKEGHVKEHVVTFWHAVERKKYEIPVVIYNPRDVWDSIMDKQLPESFLEQLPDVNWTFEECLQQNEMFVLGMDDESYEKAVRDKDYAMIGKYLYRVQSVSESDYWFRLHIETQNDKTASAKLAKKYYRVKSIKGFYELHPHKVYISIIGKIKEL

SEQ ID NO: 7580 - protein, 1242 aa, synthetic construct
  REGION 1..1242: note = Synthetic
MKRILGLDLGTNSIGWAVVNTDENDKPVSIESMGSRIVPLTSDDTNEFTKGNAITKNQSRTEKRTARKGYDRYQLRREHLTAELRKLKMLPDERLIKLPVLELWELRGKAASKGNQLTLSEIGRVLYHINQKRGYKHAKSDESADTKQKAYVAEVNARYAMIKERNQTIGQFFAEKLKENEIETPKGKFYTYRIKEQVFPRKAYEAEFDQIIECQKEFYPDILTNEEINRLRNEIIFYQRRLKSCKHLVSFCDFEKREYINKVGKVVYGGPKVAPKSSPLFQLCKIWEEVNNLTLRNRKNDELFITIEQRQAMVDFLDTHEKLTLSDMYSILGISKQDGWWGGKAIGRGLQGNTTKIALKKALGDFVNADTLLQFNLKQTDSNLVDEVTGEILQVIDPKLEKEPLYDLWHTIYSISDKEELANALKKKYNIHDEDIINRLYAIDFVKSGFGNKSTKAMRRILPYLQQGLKYSDACEYAGFRHSDSLTKAENEARQLLEKLPPVQKNALHQPIVEKILNQMINVVNALMIEYGQFDSIRVELARELKQSKDERNTTFLQNEAMQRLNESIATRLSSEGIKPTKRTIEKYKFIFPTKGCFDKRTGKFITKNFENLSTVNRCIYCGQPFSLSAALNGDGYEIEHILPRDLICDNSQSNKVLSCRKCNSIKSNKTAFDFMRSQGEHAFETYLERVELWYKDGIISPSKRERLLLSHEDYLERKKKDKATDIDKKYWENFVSRQAGETQYISREAIRILKQCCRYVNATSGSITATLRHLWGYDEILHQLNFERYKQAGLTKIVTWESNHGKNKHSKEQIVDWSKRIDHRHHAIDALVVACTQQGFIQRINTLNADETKDLMKKQIESAGIKFEEKKVLLDKYLTSLIPFKTQFVADAVNKILVSFKAGKKTATIGKRIEYKDGKKHVVQEGIIIPRGALHEEGVYGAILIDGKKEIVKKYKLGKGAQGFVFTGKETYVEKVNKKTGEIQIEDKIKNVLDSIVDGNIRNKVLQRLNQGFEEGQDYRNNVKKALDNLNNLDENPIFADKNNTIPIRTVRCRTGLSAVVPIKKNERGEAIGYVKPGNNHHIAIYRDKEGKLKEHAVTFWNAVERKKYGIPVVIENPLEVWDSIRDKQLPETFLEKLPDVNWTFEMSLQQNEMFILGLEDDAFEDAMRNKNYALISKYLYRVQSISESDYWFRLHLETQNDKTASAKLAKKYYRTKSIKGFYSLNPHKVYISVIGKIKEL

SEQ ID NO: 7581 - protein, 1207 aa, synthetic construct
  REGION 1..1207: note = Synthetic
MKKILGFDLGVASIGWCLILTTDEGEIVDILALGTRKIPIDNPTANDFASGKAFTKNQDATKKRSGRRNYDRYQLRRHDLTEKLRELGMLPDEHLIKLPVFELWSLRARAATKGKKLSLPEIGRVLYHINQRRGYKHGKKDYSADSKQREYVKAVYERYGIIQNEKLTIGQFFAKKLDETAVDGEHGRFYVYRIKEQVFPREAYEEEFDQIMECQREFYPEVLTDRTIDYLRNHVIFFQRDLKSCKHLVSTCEFEKREHRIKDGHVVIAGPKVAAKSNPLSQLDKIWEEVNNISLFNKSGDELYISNEQKQKLVDYLNQNEVLKATALYKILGVSKRDGWYLNKSLAKGLKGNTTLVQLREALSGLDNSEELLRFSLEYEESKKVDEETGEILKVISPKCIHQPLYRLWHAVYSIEDEQNLRKTLISNFGIENEEVIEKLFKLDFTKEGYGNKSVKAIREILPYLQEGLKYSDACEYAGFRHSDYLTKDENQSRQLLDKLPQIEKNELRQPIVEKVLNQMINIVNAIMARPDLGRPDVIRVELARELKMSIGERDSISKMQYKRRKENDRIEKILEEQGVRATRNSIERYRLWNESSKCCFYCGKVIGETEYLSGLGVETEHIIPKSLLFDNSYSNKVCACKKCNKEKDNTTAYDYMCTKGQAYLEDYLTRVDDLFTNGVISKTKRDRLLMKAEDIPQDFINRDLRLTQYISRKAMEILRQVCRDVTASSGSVTDFIRHTWGYDQILENINFERYKTGDLTEFREYVHKGQTHKKEVIKDWTKRNDHRHHAIDAFVVAMTTPSIIQRLNTLNTSRDAMFKEVEAQRESWKNDYSLLEQWLREKKHLRVDEVQRAVEGILVSARPGVKIASTGTAATYSNGKRKIVQRGVIVPRGALHEESVYGKIQLNGKNEIVIKYKLGVGNSGFLFTGKEDYKAESVKNKKTGLVEIKVIDKIKNVLDTIVDGNIRKRVLDRLNEGFANGQDYRNDPKKALENLRNLEEKPVYADDSKHIQIKSIRCTTGKTAVVPLKFGEHGEPVSFVVPGNNHHVSFYKDEAGHYQESIITLWQAVERRRFHVPVIIENPAELWDSIQDKELPDTLLESLPGYQWKHVLSLQRNELVVLGMDEADYQEAIRKKDKVALNKYLYSVQNLSHFTYRFCLATAVGFDLKLASKKDKRFLNISSIATLFNLNPHKVHIDILGEIITE

SEQ ID NO: 7582 - protein, 1293 aa, synthetic construct
  REGION 1..1293: note = Synthetic
MDWDLMFSQRNNPYCDLLKFVLQIYKYFFKHQVFLIFFMYICSINLIDKIMKRILGLDLGTNSIGWAVVNADENGKPVSIENMGSRIVPLSPDDANEFTRGNAISKNQSRTDKRTARKLYDRYQLRRGYLTAELRKLNMLPDERLIKLPVLELWELRGKAASKGHQLTLPEIGRVLYHINQKRGYKHAKSDESSDTKQKAYVAEVNARYAMTKERNQTIGQFFAEKLKESEIETPKGKFYTYRTKEQVFPRKAYEAEFDQIMECQKDFYPEILTEKEINKLRNEIIFYQRKLKSCKHLVSICDFEKKEYTNKEGKIVLGGPKVAPISSPLFQICKIWEEVNNLTLKNRKNEELYITLDQRQAMVDFLDTHEKLTLKDMYSILGISKQDGWWGGKAIGRGLQGNTTKIALRNALGDFEHAEHLLQFKLHKINSELFDEVTGEIIQVIDPKLEKEPLYDLWHTIYSLSDKEELANALKKKYNIKDEDIINNLYAIDFAKAGFGNKSAKAMRRILPYLQDGLKYSDACEYAGFRHSESLSKEENKARTLLEKLPPINKNTLRQPIVEKILNQMINVVNALMTEYGQFDSIRVELARELKQSKDERNVTFLQNEAMQRLNESIAKRLISDGITPTKKIIDKYKFIFPTKGCFDQRTGKFITKNFESLTTINRCIYCGQPFSLSAALNGNGYEIEHIIPRDLICDNSQNNKVLSCRECNSKKSNKTAFDFMRSQESSTFEAYLERIELWYKEGIISPAKRERLLLSHEDYIERKKKGKITDEDKKYWEEFVSRQAGETQYISRESIRILKQCCRNVNATSGRVTSNLRRLWGYDEILHQLNFERYKKAGLTEIVTWESNHGKNKHNKEQIVDWSKRFDHRHHAIDALVVACTQQGIIQRINTLNADETKDLMKKQIESAKVKYEEKKTLLDKYLTSLAPFKTQTVADTVNKILVSFKAGKKTATLGKRIVYIKGKKHIAQEGIIIPRGALHEEGVYGEIEINGKKHIVKKYKLGKGSQGFVFTGKETYVEKINKKTGEIQIQDKIKDVLDSIVDGNIRKEILQRLNQGFEDGKDYRNDVKKALDNLNNLEENPIFADKNKTIPIRTVRCRTGLSAVVPIKRNELGEPIGFVKPGNNHHIAIYRDKEGNLKEHAVTFWHAVERKKYGIPVIIENPIDVWDRIIGKQLPESFLEKLPDVNWTYVVSLQQNEMFVLGMEDSAYEDAMREQDFSLISKFLYRVQSISESDYWFRLHIETQNDKTSQAKLAKKFHRIQSLKALYQLHPHKVHISLIGRIKELE

SEQ ID NO: 7583 - protein, 1149 aa, synthetic construct
  REGION 1..1149: note = Synthetic
MRKILGLDLGTASIGWAVISEENENTRIEAIGSRIIPLSTEDADEFSKGNAISKNASRTLKRTQRKCYDRYQQRRTRLTQFFKIYGMLPDEELIKLEKLQLWGLRAKAVSERLTLPEIGRVLYHINQKRGYKSVREDNNDKKQREYVENVLSRHKEIIKRNITIGQLFFEELSNDSSFRTKERVFPRKAYVEEFDKIMACQKIYYPHVFTDDNIDLIRNQIIFYQRLLKSCKHLVSLCDFEKREFLNKEGRIIIDGPKVAPKSSPLAQICKIWESINNLVLKNRRGEELFITQSQRQAIFNHLDNNEILGLSDLYRILGISRLDGWWGGKAIGKGLQGNTTKNGIRKSIGEEYQDVLKFEVQLENSNLVDVETGEVVQIVSTNYLDEPLYRLWHLLYSIKDKEDLANALKKKFNITDQSIVENLYALDFVKQGYTNKSAKSMRRIIPYLELGLKYSEACEAAGFNHSSSLTKDENQCRELVSKLQPIQKNELRQPIVEKILNQMINVVNALMDKFGRFDEIRVELARELKQSKDERNETFKAMSKAKKENEIIASRILSEYKLTPTRSRLQKYKLWIESQQTCFYCGQPVSVNEFLNGFDVEREHILPRSVYFDDSFSNKVCACRKCNKEKNNQTAYDYMLNKPDFNAYLERIEKLYKDRKISKTKYERLLTPINKIPTDFIDRQLRESQYIARKSREILASVCYNVTTTSGSVTDFIRRIWGWDRVLHNLNFERYQLAGLTEIKEREHKEQFFNEEIIKDWSKRMDHRHHAIDALVVACTKQGFIQRINNMNELKDVSFAPNAKQSKAYGERLTKLEKYILSQQHFTTTEVEKAVDTIFVSFKSGKKAATIGKRYIHRDGKRILVQKKIIIPRGALHAESISGEISRYNSKGILQKENVIKYKIGIGQGCLFTSKDDKKKIDKTIDSIVDKGIAKIIKKRVEERNYDLKGIFSDPIRFNNSEIKSVRCFTGNKAVLPVRNGFVVPDNNHHIAIYIDKDGKRHENCVTFWHAVERKKYNIPTIIIKPAAIWDNLPEDLSEEFLKQLPLPDWKFEVSLQQNDMFVLGLDPETLEDALNERNYSCIGKCLYKVQNISTKTYRFCLHNLTQYDISQSNKPDRRFFNIRSIDTLFKYNPLKVRISLLGEITKV

SEQ ID NO: 7584 - protein, 1106 aa, synthetic construct
  REGION 1..1106: note = Synthetic
MTRYTLGLDLGCNSVGWAMIAEDGAVFDNGSRILTGVRVFPEGLDTRKDKVGTPPGQHRRLKRSERRSHFRRSQRRRQLLKLLVGAGLLPASSDERREFFNRNPYLLRAKGVTEQLTPHEFGRVLYHLIQRRGFQSNKRIMKSGDEAKKDKDAETQAKTLKAILEKERITLGQYLARFVPKDGDPTAHKDASGRKEWVRNRLRNDAWYHRQAFRDMYKTEFDILWRRQTLLWGDTTKTCEPSLNAELRKAAYEAIFNQRRVWWPLDSIGRCHLTGEERCPKGHWWAQEFRMLSEINNLTVFNADTGEVRELTSQERTTLADKLRMLKSMTFKELHEQLVLKPEESFRSFEVDASRKGLAGNAVEAALLGGGLRSWYETYGTLREEVYGTLVDVERDQARNRAYALDEARLRQKGKTWGLSHSQADELCNLMQELPEGYVQYSLSAIRKLIPLLRQGLTVDKAVAAAGFKPKPTPVRDRLPPLDQVDPYLTNPRVRRALSEARKVVNLLISLYGKPEGIVIELAREMKQSRKHREELLKRQNELEALNKEAEEEMSKFGQPVNQENRLRYRLWKEMMEANKGICPSPYSPPDSQRKITLTDLFTPEVQIDHIHPRSLTFSHAFSNKVLCFADENSLKGNQIPYQWLHHDQGHMDAMLRRVRGLPKEKKRRFALQSLDGLQVFIDRQLDDARFTAKQAVSYLGVLGRPVRCVQGYTTAPLRGCWGLKKNRLDHRHHAVDAIVIALTTAKHLHALSNLWADRKASFAPPWSSFRHEVQTVMDELERGEKSAVSRRPNRSLSGALHDEMGYGPVRDREGRLRPDVYATRKKVQDLTPDMINEDDTIADATIRGIIRAECVTRKLAQQPTGKKDKVWLHEGKPYTIKAKPGRKLADPPPVLPTRPRKPGDPIAFTPIKRARIHLNSRTAELVRKDGGRPAKYVLPDRNHHIEIYRTPDGNWVGHQVSYFEGHRRWRKQVALFNKTRVRQDLVVNRAGIAGEKFLTWLCEDDFVRLKNLKTGARDLYYVVSKSVDENNRPDIWFYHHTLAKLPDKKEAARDDRVRMLRESLLQEGRAVRVRNWPELMEKRKMEKVSVDPIGRIFACHDQTHD

SEQ ID NO: 7585 - protein, 1185 aa, synthetic construct
  REGION 1..1185: note = Synthetic
MEKEKSRIYQDVASNIKNRLRDRNYSIGLDLGVGSIGIAVVAMEPNDKGINYPTELIYANSRIFTSSKGAAERGQFRGQRNSIRHKAHRLRKLWQLLATRGFMKPYSSEIVQDPAILRFSKEMIKSDPYELRLKGLNEKLSIEEIGVALYHLANHRGSSSVHSFLDEEKTKDEEKAEEQINQTKNLAKKYGVDTYIEILNCFNMNGIKGYRNKDVRPSDFIMPMPTRDIILKEFEKLINTQKYFYPDLLDEDYISQIHDIVFYENLKIVPEAANCPYFPEEKKLPKASFLNEERRLWEALNNVRILMERQTESGHVYVEKISLEKDEKKQLFKVLRDGSDISPAYIRKVFPKYGKLKNENILLQGSDKKNTNIKGFRFKKLEELSCFKELSDNDKDKYISLFVNTPDDDSLKKKLISQLGFSEEKADDVIKNTPKLIGDYAPVGKTAMLLLMPFIEDGLSFHEAEEQALKEGILESHTDQIVYDYLPYYGEVIPNSTQSLAGKAWHSSFYDKVGKKGFIKPHTNSDEEKYGRIANPVVHQTLNELRKLVNEVISIMGKKPSEITVELGRELKLGQEAREKLNLDNNIRSKENKKIYDEYCIPNSLSTKYIKRFRLLEEQNYKCPYCLNMIKANDVVSGNADIDHIFPEEDTADSSENNLVLAHKYCNEVVKKKQIPRVAFGSNVVLWNKIEQFIDETSSMESKRWRFELTEEKYQDYLAKNTFLNRFKSDNAFAARIACEYLLSLFPAEKKYTAVRTIKGAETAALRRSWNLNGITQLLASFHLMEENDDFVNEKNRLDARHHALDAIVAAYYSYSVKQMINSISKEGSNQKEISKRVPIPKYFRINNNLSTTEQRNDFHDYIENFLISNTFVSRKVDTDKNGELLKATQYLILAMKDDSLILLTKKRLKKLKAKTFLGSKSGSIEHELSGNYVKPKWLNNDQDREINNFLIHNQQLFELILANKDKAKEELEKANEERISVGKKSIEINEKRIVAKTIEITGGMYYSLTNNQRKKVFVAKEPSCSERGSAFDTGANFALDLYHDEKGIIKGEVIRKISAIDKNYVPEYKKKGFCLYERIYPGDILEVDYVPRSPTNAKNDFVKGIITPNAPQGKTFLVVNTFTEKGKSVQVYYDSLMSSKAGQKGSFYTSALNSQSIRKVCLSEAGIVVYRSRLLKDLKNVEST

SEQ ID NO: 7586 - protein, 1184 aa, synthetic construct
  REGION 1..1184: note = Synthetic
MKKEKSLTYQTSMENIRKRLDSREYSIGLDLGVGSIGIAVVAMEPDENGTLYANDIIYASSRIFTSSKGASDRRKYRGQRNSIRHKAHRLRKLWQLLATKGLMKPYSSETVENPATLRFSTEMLRRDPYKLRLKGLKNKLSLEEIGVALYHIANHRGSSSVRSFLNEEKTKEEEMAEEQMSKTQNLAKRYNVDTYIEVLDYFNMDEIKGYRNKDTRSSSFIMPIPTRDIILSEFENLINTQKQFYSDILDDNFISGLREIIFYENPKIVPEAGNCPYFPDEKKLPKAAFINEERRLWEALNNIRVLIDRQTANGLIYTEKMPLEKDEKEKLFIVLREGNNVTPSFISKAFPKYGKLKKDNILLQGSDKKNTEIKGFRFKKLEQLPYFSILKDDDKDKYISLFVNTPDDISLKNKLISQLGFSTKTAESAILDTPKLVGDYAPVGKTAMTLLMPFIKDGLSFQEAEQEAIQEGIIESQIEKKVYDYLPYYGEVVPSSTQSLAGKAWHSSFSSKIGKKGFIKPDTNKDEEKYGRIANPVVHQTLNELRKLVNEVIKIMGKKPHEITVELGRELKLGKEAREKLIQDNNNRAKDNEKIYTKYCVPNNLPTKYIKRFRLLEDQDYKCPYCLGSINCNDVISGNADIDHIFPKEDTADSSENNLVLAHKICNENRKKKQIPQKAFGSDTVLWNRIEQYLDNTPKMANKRWRFEMTDDKYQQYLAKNTFLNRFKSDNAFVARIACEYLLSLFPPENKFIAVRTIKGAETAALRKAWNLNGITNSLASLHSGEDNDTLDSKNRTDARHHALDAIIAAYYTYSAKQMIGSISQNNCNQDEIAQRVPIPKFFRRNKTLSTSEQRKDFRKTIENFIINNTFVSRKVDINRNGELLAATQYSILAIKDENLILYTKKRLKNINASTFFGNKSGSVEYALNGKFSKPKWINMEQEKQIDKLLEHNQQLFESIISNKDKAEEELQKENYNRISIGKKTISIDEKKIVTMALKLTGGIYYTLTNNQRKKVFIAKEPTLTEKGFAFDTGENFSLDLFHDENGKINGEIIRKINAVNAKYVPQYKKKGFSLFERIYPGDILEVDLIPRSPTGAPKDFVKGIKSPNAPLDKTFLVVKTFTEAGKSIQVYYDSLMSSKPEQKGSFYISVLNKQNIRKVCLTEAGLLIYRSRLLKDRENVESS

SEQ ID NO: 7587 - protein, 729 aa, synthetic construct
  REGION 1..729: note = Synthetic
  SITE 728: note = misc_feature - Xaa can be any naturally occurring amino acid
MEKEKSRIYQDVASNIKNRLRDRNYSIGLDLGVGSIGIAVVAMEPNDKGINYPTELIYANSRIFTSSKGAAERGQFRGQRNSIRHKAHRLRKLWQLLATRGFMKPYSSEIVQDPAILRFSKEMIKSDPYELRLKGLNEKLSIEEIGVALYHLANHRGSSSVHSFLDEEKTKDEEKAEEQINQTKNLAKKYGVDTYIEILNCFNMNGIKGYRNKDVRPSDFIMPMPTRDIILKEFEKLINTQKYFYPDLLDEDYISQIHDIVFYENLKIVPEAANCPYFPEEKKLPKASFLNEERRLWEALNNVRILMERQTESGHVYVEKISLEKDEKKQLFKVLRDGSDISPAYIRKVFPKYGKLKNENILLQGSDKKNTNIKGFRFKKLEELSCFKELSDNDKDKYISLFVNTPDDDSLKKKLISQLGFSEEKADDVIKNTPKLIGDYAPVGKTAMLLLMPFIEDGLSFHEAEEQALKEGILESHTDQIVYDYLPYYGEVIPNSTQSLAGKAWHSSFYDKVGKKGFIKPHTNSDEEKYGRIANPVVHQTLNELRKLVNEVISIMGKKPSEITVELGRELKLGQEAREKLNLDNNIRSKENKKIYDEYCIPNSLSTKYIKRFRLLEEQNYKCPYCLNMIKANDVVSGNADIDHIFPEEDTADSSENNLVLAHKYCNEVVKKKQIPRVAFGSNVVLWNKIEQFIDETSSMESKRWRFELTEEKYQDYLAKNTFLNRFXF

SEQ ID NO: 7588 - protein, 1193 aa, synthetic construct
  REGION 1..1193: note = Synthetic
MEKKLNRKWEGCDFMEKEKSRIYQDVASNIKNRLRDRNYSIGLDLGVGSIGIAVVAMEPNDKGINYPTELIYANSRIFTSSKGAAERGQFRGQRNSIRHKAHRLRKLWQLLATRGFMKPYSSEIVQDPAILRFSNEMIKSDPYKLRLKGLKEKLSTEEIGVALYHMANHRGSSSVRSFLDEEMTKDEEKTEEQINQTKSLAKKYGVDTYIEVLNCFNMDGIKGYRNKNVRATNFVMPMPTRDIILKEFEKFLDTQKQFYPSLLDPDYISQIRDIIFYENPKIVPEVANCPYFPEEKKLPKASFLNEERRLREALNNVRILMERQTESGHVYVEKISLEKDEKKQLFKVLRDGSDISPAYIRKVFPKYGKLKNENILLQGSDKKNTNIKGFRFKKLEELSCFKELSDNDKDKYISLFVNTPDDDSLKKELISQLGFSEEKADDAIENTPKLIGDYAPVGKTAMLLLMPFIEDGLSFHEAEEQALKEGILYSNTDKMVYDYLPYYGEVIPNSTQTLVGKAWHSSFQEKFKGKGFIKPHTNPDEEKYGRIANPVVHQTLNELRKLVNEVIEIMGKKPSEITVELGRELKLGQKARDEYVLDNNKRLKENEKIYKEYCVPNNLATKYIKRFRLLEDQNYKCPYCLNAINSDDVVLGYADIDHIFPKEDTADSSENNLVLAHKHCNEEVKKKQIPRVAFGADPVLWNKIEQFLDNTPKMKNKRWRFELTEEKYQDYLAKNTFLNRFKSDNAFAARIACEYLLSLFPAEKKYTAVRTIKGAETAALRRSWNLNGITQLLASFHLMEENDDFVNEKNRLDARHHALDAIVAAYYSYSVKQMINSISKEGSNQKEISKRVPIPKYFRINNNLSTTEQRNDFHDYIENFLISNTFVSRKVDTDRNGELLAATQYSILATKDDNLILFTKKKLSDLKASTFLGNKSGSVEYTLKGNFPKPKWLTAEQNEQVEKYLEYNRQLFTLVLSNKDKAKKELEDDNDKKVLIGKKTVSIDEKRIVEKALKLTGGIYYSLTNNQRKKIFVSKEPTALEKGSAFDTGENFALDLYHDEHGKINGEVIRKINAVNKKFIPEYKKKGFKLYERIYPGDILEVDYVPRSPVNAKNDFVKGIVSPNAPQGKTFLVVKTFTENGKSIQVYYDSLMASKVGQNGSFYTAGLNKLNIRKVCLSEAGIVVYRSMLLKDL

SEQ ID NO: 7589 - protein, 1172 aa, synthetic construct
  REGION 1..1172: note = Synthetic
MKFSESYTYQSMANELRNRLNGRPYSIGLDLGVGSIGIAAVAMEPDFRGNLFPTNLVYANSRMFKSSEGAADRRQARGQRNSLRHKANRLKKTWKILSEKGLMLPYSEDYADNSATLRFSDETLRKSPYELRYKGIHEEISLEELGYALYHIANHRGSSSVRTFIDVEKTEDEKKAEEQRRLTENLVAASGANTFIEVLWAFNKDDFKGYRNTKTGGEPRKAPIPTRDIIENEVNVLLTKQKEYHPELSDEYIERIKESIFFENEKFVPEPGHCPYFPNETKLPAASFLNEERRLWESLINVRVVRETRSLSGITRRTKLCLCDDELDLLFSHLRMGKDLTPASIKKILPNYKNDEIILPGNKKSPKITGFRFCTLEKKPYWERLDENQKDRFIALYVNTPDDKTLGKLYKNELGLSDQEVNDVLNTVSLIGGYAPVGKTAMNIILERIKRDKLTYGEAETACIIEEELIDSNTKIMYDRLPYYGKAIPTCTQNLAGKAWHTMFAEKIGKPGFIKPNTNPEEELFGRIANPVVHQTLNELRKLLNEVMDIFGAKPIEITVEIARELKVGTEKREEISKNNAEKEKRNIKLYNEYCVQNNLSKKYVKKFRIWEDQGRRCPYCLKQISVNEIVNGSCDYEHILPEEETGDSSELNLVIAHGQCNSIKDKRIPFTAFGGNPQIWEKIEQNLDSCDGMKQRKQRFLMTQEDYEEYLERKDFMSRFSSDNAYIARIACEYLRSIYPPDEKYSERYVRTIRGGETALLRSAWNLNGVTASLGLQHNPELLNSIDEDKKSREDIRHHALDAIVAAYYTYSARQMIETESAQNTNQSEIKKRIPIPRNFRKNSSLSTKEERILFRQYIEDFILNKTYGSWKMDTSKNGQLTKDTQYAVFAQNSNSCILFTKKKITSISAKTLLGKKSGSVEQALSCCNAPKWLSPKDKERFDTICEANRKKFEEINAALDKAESQLIEENKQREESGKSKVTINEQAIIKRALSLVGGCYYILRNNTLSKLAPKCKDKKVISAFDTGDNYCIDFFREKNGDIGFEILRKINALSDSFVPEYKQRGCQLIERLYGKEILEMDAALLSPDSDLGEINRSIRCPNAPMNRTFLIMTKYTETPSGFNIKYDSMMHSKPAQEGSISRSSLSQLHIRKVTLSPAGLVVYRSPIIGE

SEQ ID NO: 7590 - protein, 1146 aa, synthetic construct
  REGION 1..1146: note = Synthetic
MNQKGYFVLGLDVGTNSLGWALLDLVSQKIIAASVAVFAAGKNKTPTGKEESRNAVRRLKRGMRRQFFRRRQRKAALLEALQILGWIEKDLPKQGKAWEKWLALCPYQLRAEALERKLTLEELARVFYNLALKRGFKSNRKALSEEEGSKKEEDTETKKTTKKAKSDKKEDAKPSMEEMLGATRKALAEGGFQTLGQYLYSLQKIESPQAAGLKPKIRGNHRAERKLYQEEFDRIWQAQVGFFAAQEIDLNQHSRFEDVIEKVVAGRFQNEVRSKGLAYLFKEYLVFFQRPLKSSRHLIGKCTLFPTKKRAAMSHPLYQKFRIWDKLAHIRLTGAGMQNEPLSMDDRHKIVQKLETVEKQTIKQILKLIDKSDYQTNFKETDIVMGNKTALKMRKIFDPPKPAAKNAKNRKERNQLFGIVPQSEEADFYQSWDSFSEEEQIEIWNAIENIAQDNEWLAEYARKKWQLSEERIQILKKTHFEAPYGRLSVKALRQILPYMENEGMDFSNACAAIGLSHSEGIGAQNQDFLGEVPNLRNPLVQRSLSVIKKVVNEIIKKYGKPNEIHIELARELKLPLQAREKIDKQNRDRAAEHERIKDTLQNDFKIISPSRQDIIKYKLWKECDETCPYTGDKIRKSELFSHTYEVEHIIPYSRSLDDSFGNKTLCRTDFNRKKANLTPYEMKEKGLIKAPEYEAMLERVRNFKPFSAKKFQRFTKNITDFTEGFENRQLTDTAYIGTETRKYMLQIAEKETDVILTNGGTTAELRRLWGFNSILKDEETDEKKRDDHRHHLIDAIVIALTNRSLIKRLADENQVSDKLKALLSTKDQDKRFSYPKGWESLRHEVKEVAENALVYHHFRKRKRGTLHDDSLYGRAYLPFSGKPKEDEKGQPYYTIRKKVEALTIPELSKIADKTIRLMVFQKLEEGGISKEVLDNLKEIDKRENTLRKKLKKESPPNYEERAEPKTTMERIKEVLQNLSLPSKNPYFQSVPIKKLRIQNPENTFVFVKGRKAYVAPNGNHHLCIIEKADGKRRAEMITRFAANTRKGETFAPPPLAKGEKLLMTLMLNELLLVESPALSLEGLDLETANKQLLNQHLYRVKKMSGVTITMRHYLSAKDDSTVFSKSSNELKARKVRISPTGEISWA

SEQ ID NO: 7591 - protein, 1246 aa, synthetic construct
  REGION 1..1246: note = Synthetic
MRVLGFDIGVASIGWALVEDSIIRDECKIIDCGVRTFESVGEKHKERGEQRRARRNVARTKSRLNTIKRYLFENFASAQGDFADFNEWQKKLFAKNNESEQKEQELSTPYLLRKKALKEQISVDELCQIIIHIVKHRAYNDSGKEYEAENILEAQDETIQADSKSIKEKSNNKDEKKDKNADKKKLKAAMKENVKQVSDKAYLNEYIYDRQKRLAQENAEIKYQKLLEKFKNESKYESVHKLEAKKERWIATTAEHSIKMRNGSVVRINKNGKEVEEQSYVNSMPRSAIKAELQKILDTQIAKAKQDESYAQKLENLKTELFAENDNGLGFLQNRPLKSSQNLLGKCSIDMREYRASAFAPSVIEFNLLAKLANLLIYLNGQHKDLDIDYEKTSESAIRALQEKQKLDFSDIRSCIYLKSGESLAQTYEIELLGFNKKETKANKPKSTKRTQNKDSDKLLTQEKNATFYNPSKKLALLEATFGKDFWSHQKDIDKLTGILSVNKRKKDIQKKLNKHKYSRIDDNLKTKALNSLGAGFSGTSAYCLNVIWECLEKMRLGKSEYEATTAYKANLNEDRKYQEFMSQFTKSLKLPAFEETPNANLNHICAQMRQIANAIFAKHGEVAKIRIELLREVGQSEKQKAEIVKTQRENEKFNEVATKICEEIGLKTTNKDNITKVKLWILQNECDIYPSIQKGSQDKFNAKEFYADYKNKLSIDVYGFKKISLQDLCDENALQIDHIIPKSKVLVDEFTNKVLTFTNNNATKTSQTPYQWFGADKAKWKAFETRVKMTNLSKKAKDNLLKQEIDDIKPSRLLNDTKTASVYIKNYLEKYVKFADIPNDLQDNEERESKQIRRIEVVNGRLTSTLRHFWGIGKKDRTNHLHHAQDAVIIAFCSSRTIQHFAKFLQTEEDKSQAKLNSEEITKIMKQNARGRWVFRRPFSGFVADLTKRIYGDETSEGIFVTFSKKHKTTGKLHNENPINIKQGVEEALKQNKDTAKHLKKEDIKELKKRLKNAQSEILLCVEQEKEKLGRKLSGEEYGKIKSKIEYPIKEQLYKEVKQRQIQNNVWIEIRGHIYEIDGMTRIDIFRLNNRYYAVPVFITDKELSHIAKPDNCELDDKDFLFSLHIGDLIEFGYSDDIKRYGYYRGFKQNGQIKIYHHSGYLPKQDFWKDKTLENGKEKSQFPQKVISISQFKSLKLCHINALGHRQTLKVLEIKEGDRVRGKAPLCGTLGKKKIKFNITKKETQ

SEQ ID NO: 7592 - protein, 1017 aa, synthetic construct
  REGION 1..1017: note = Synthetic
MKVLGFDIGVASIGWALVEDSIIRDECKIIDCGVRTFESVGEKHKERGEQRRARRNVARTKSRLNNIKKYLFENFASAQGDFADFNEWQKKLFAKNNESEQKEHSAKNDENKQKERELSTPYLLRKKALKEQISVDELCQIIIHIVKHRAYNDSGKEYEAENILEAQDETIQADSKSVKEKSNNKDEKKDKNADKKKLKAAMKENVKQVSDKAYLNEYIYDRQKRLAQKNAEIKYQKLLEKFKNESKYESVHKLEAKKERWIATITEHSIKMRNGSVVRINENGKEVEERSYVNAMPRSAIKAELQKILDTQIAKAKQDESYAQKLENLKTELFAENDNGLGFLQNRPLKSSQNLLGKCSIDMREYRVSAFAPSVIEFNLLTKLANLLIYLNGQHKDLDIDYEKTSESAIRALQEKHKLDFSDIRSCIYLKSGESLAQTYEIELLGFNKKETQANKPKSTKRTQNKDSDKLLTQEKNATFYNPSKKLALLEATFGKDFWSHQKDIDKLTGILSVNKRKKDIQKKLNKHKYSRIDDNLKTKALNSLGAGFSGTSAYCLNVIWECLEKMRLGKSEYEATTAYKANLNEDRKYQEFMSQFTKSLKLPAFEETPNANLNHICAQMRQIINKIFAKHGEVAKIRIELLREVGQSEKQKKEIQKAQDENKKFNEVATKICEEIGLKTTNKDNITKVKLWILQNECDIYPSIQKGSQDKFNAKEFYADYKNKPSIDVYDCKKISLQDLCDENALQIDHIIPKSKVLVDEFTNKVLTFTNNNATKTSQTPYQWFGADKAKWEAFKVRVEATKLSKKAKSILLKQEIDDMKPSRWLNDTKTASVYIKNYLEKYVKFADIPNDLQDDEERESKQIRRIEVVNGRLTSTLRHFWGIGKKDRTNHLHHAQDAVIIAFCSSRTIQHFAKFLQTEEDKSQAKLNSEEITKIMKQNARGRWVFRRPFSGFVADLTKRIYGDETSEGIFVTFSKKHKTTGKLHNENPINIKQGVEEALKQNKDTAKHLTKKRI

SEQ ID NO: 7593 - protein, 1265 aa, synthetic construct
  REGION 1..1265: note = Synthetic
VDSRPRAVRSCLLSLQQRRRKASRPGAENAIAGNGALAANADDSALHVVQRRQRRQFTSPTALILTSVCPPENFDSLINKCSVAASRACAIIEWRGNHMPADTSSNLPWMLGVDIGTDSIGWAAFRCCAGPDRPAAEKLLAGGVRLFDSGRDPETQTSKQRERGEKRRARRPKRARRWRKAQLEACLKQAGIDGHPGDGADPYALRAKAAKGAVEPAELRAVLLHMNKHRGFRSNLLDRRQADTRADSKKGKKANKDGGQEDSGQNEETNFWLGAEAHLRERMAATGAPTVGALFAADLAQGRPVRMRYGGGDAYAPTRALIEEELGKIREMQEAAFPGLDWDAVAELVLDQRPLRSPEAGRCGYLPEEDRAWRALPSVQEFILRQTLGNLRLPQGFDEADRPLTAVEYEAALTELRQVPRLEWPKLRKAIGIGRNKFTVELQAGAGKQASRAAEGHQTDALFAPLIPGWNERSLTEKDALFTELWERRGRRAGLLAYIRDSRQGLGLDGERAGMLADAVQFELPTGRAQISAAAAHRILPYMTPGVRVHDAVVEALGRDPTDARPAHRYARLPYYAQAMPDVGMNGTGAPEDLDDPERFHGRIANISVHIALNELRKLVNKLLDRYGSDLRLVVVETTRELKAGAEERQTRQRDQAAKEADNAAIDAELRRQGQWLSNARERRRRHRLAKRQNHLCPYTGNRIAAADLLSEAYEVDHVIPVSLGGRDVESNMVICEAAANRRKGDRTPWEAFHDDPAWQARVDNFLEGLDPSERKAIAWRFGEKAAALAKRGGDDEDDESSWAPRQITDTSYIARTSVRYLRHVVAERPGNDVIASNGRLTGWLRAAWDLTPPMRGRDLIPLSHAALGDPQLLDQELAALEPAHLRKAVDSLIKAWTPKVSKRLPDANRADVAAYLVRGAGGRKNRLDHRHHFIDAAVIATTDRPMVQWINTLHSRHGADGLPNPAEAEVAEPYEGFRADVMRTYERIWPSFRPRHRTEGQLHEETLYGVRDATNGDAPGKNLVLRRPVERLFQDANGKPLPDDKVEKTMSAFASPRMRERFEAVVGEYRAAEPEASLSDLCLKAARDPRWGPRGMTGNTVVTGTYDGDETRSVIWNFRGNTGAAVITGGNTFYHVWELTGRNGKVKWQAEVVPRFHARNGNRPEPPQPGARLVMTLSQGDLLYWPGQTAERIFQVKKMVTDGRLYVWPARHATGREAAAYVQALFPAINLNGDQGYKFSSAEGLRKADIRPATISILGRLRVK

SEQ ID NO: 7594 - protein, 1173 aa, synthetic construct
  REGION 1..1173: note = Synthetic
MRPIEPWILGLDIGTDSLGWAVFSCEEKGPPTAKELLGGGVRLFDSGRDAKDHTSRQAERGAFRRARRQTRTWPWRRDRLIALFQAAGLTPPAAETRQIALALRREAVSRPLAPDALWAALLHLAHHRGFRSNRIDKRERAAAKALAKAKPAKATAKATAPAKEADDEAGFWEGAEAALRQRMAASGAPTVGALLADDLDRGQPVRMRYNQSDRDGVVAPTRALIAEELAEIVARQSSAYPGLDWPAVTRLVLDQRPLRSKGAGPCAFLPGEDRALRALPTVQDFIIRQTLANLRLPSTSADEPRPLTDEEHAKALALLSTARFVEWPALRRALGLKRGVKFTAETERNGAKQAARGTAGNLTEAILAPLIPGWSGWDLDRKDRVFSDLWAARQDRSALLALIGDPRGPTRVTEDETAEAVADAIQIVLPTGRASLSAKAARAIAQAMAPGIGYDEAVTLALGLHHSHRPRQERLARLPYYAAALPDVGLDGDPVGPPPAEDDGAAAEAYYGRIGNISVHIALNETRKIVNALLHRHGPILRLVMVETTRELKAGADERKRMIAEQAERERENAEIDVELRKSDRWMANARERRQRVRLARRQNNLCPYTSTPIGHADLLGDAYDIDHVIPLARGGRDSLDNMVLCQSDANKTKGDKTPWEAFHDKPGWIAQRDDFLARLDPQTAKALAWRFADDAGERVARKSAEDEDQGFLPRQLTDTGYIARVALRYLSLVTNEPNAVVATNGRLTGLLRLAWDITPGPAPRDLLPTPRDALRDDTAARRFLDGLTPPPLAKAVEGAVQARLAALGRSRVADAGLADALGLTLASLGGGGKNRADHRHHFIDAAMIAVTTRGLINQINQASGAGRILDLRKWPRTNFEPPYPTFRAEVMKQWDHIHPSIRPAHRDGGSLHAATVFGVRNRPDARVLVQRKPVEKLFLDANAKPLPADKIAEIIDGFASPRMAKRFKALLARYQAAHPEVPPALAALAVARDPAFGPRGMTANTVIAGRSDGDGEDAGLITPFRANPKAAVRTMGNAVYEVWEIQVKGRPRWTHRVLTRFDRTQPAPPPPPENARLVMRLRRGDLVYWPLESGDRLFLVKKMAVDGRLALWPARLATGKATALYAQLSCPNINLNGDQGYCVQSAEGIRKEKIRTTSCTALGRLRLSKKAT

SEQ ID NO: 7595 - protein, 1464 aa, synthetic construct
  REGION 1..1464: note = Synthetic
MSETLGIDLGTNSIGLTKRNSELGNNIVDQLEYFSSIIFNKGVGIGKSGEFSYAAERTKNRSTRRLYQARKYRIWETLDVLMKYGFCPITEGELNQWRKYDKAKGLKRQYPIGAIKFELWVRLDFNGNGVVDYSSPYQLRAELATKQFDFSKETDKFKFGRALYHIAQRRGFKSSKGETLKEQEKEAEEKNLAPDIEIQIDLKKSEEKKSKDLIAYQEENKLSTVGCCFYQLEKEGVRIRASKYQAVRSQYEKEIEYIFTFQNELQIDSDFYRAIHKAIFYKRPLRSQKGLVGKCTLEPTKERCPISHPDFEEFRGWSFINNIKYKKNPSDDWSELTKDQKQQLFNDKFLRTTSNFKFEEIRNWLEKKMGFYLLYDTKTINYKDKTNVAGCPISGRLRNLLGDDWRNFTKHTSKSRLNKKTGEFHPISYSMDDIWHVCFSFEDEERIVEFAKNALLFNEKETKSLVNLWVAIPQGYSMLSLKAIRNINKFLKKGLIYTDAVLLAKLPEILGNQIWKEKEELFLDEIGKLTAQNRDDKRIINVVNNLIANYKSLELDEQFAYKNNDYRLDGSDFKEIEKFTIESYGEKSWEKLPQPEKDNQLSLVAAIYQQYFSSSKRDFYRLPKLGDTIKKYLSDNYSVLSCPSSFIDKETKLPCQCCACKKLNLLYHPSQIEFYKPAKEQTIEWNGTNLSLKLLESPKIGAFKNPMAIRTLHEMRKAINHLLKEGIITEDTRIVVETARDLNDANMRWAIEAYQREREKENKEFEAVIRDLYNNTDRTITNDEIDKARILIDQYEISEKGEIKIVEDQQKSKKKLIEKAEKYSKDVTKYRLWLEQGCRCIYTGKIINITDLFSDGRVDFEHTIPRSISFDNSLANLTVCDAHFNRSVKKNQIPSQLSNYDDILLRIQPWKEKVEKLKDNVDFWRAKAKKAQEKTIKDNAIRQRHLWQMELDYWQNKVDRFKMEEVTSGFKNSQLVDTRIITKYATHYLKSVFNNVEVQKGSVTANFRKMLGVQSIDEKKSRDKHSHHAIDAAVLTLIPPAAKRDKMLKLFYEIDEKELFENVDQLKYELEKERKNCQLGNVSGISQFIEENILINHIAKDQTLTPANRKARKRGKEIFVKDKNGNEVTKWITGDCIRGQLHKDSLFGGIKYPLKDSSGIFQKNEMGQFQYPIDKEGCEVISMVKRELITSFKAEKDLEKIIDPNVKLSIDNTIQKRKEEGKSFATAIAEPIWMLDNKGKEKRIDRNGKHLSPIRHVRCRVAAGKGFFTKDKALEIKKQTYISAKKSFHLDNRDYKQSYYAQNDGNYLCLLYEGINKGKVERKFKLINYFEIAHLQIYNTNQLWNEPFYKEIEDKKKTFSLSAIIKVGTRVLLWSNDPSELADLSSSDLLKRLFVVYKYNSVGIEYIYMQNHIESRPDNELDAGDTSFDNLNYQPRVMLTANKFNCLIEHRDFIITPVGKIEYL

SEQ ID NO: 7596 - protein, 1455 aa, synthetic construct
  REGION 1..1455: note = Synthetic
MARVLGLDLGTASIGYSLRDTDKGTNITEQLVRFGSIIFQKGVGNSKTGEFSYAAERTKHRASRRLYQARRYRIWETLATLIEFGFCPLSIEDLDRWRVYDKARNLKRRYPVDAANFEQWVRLDFDGDGKSDYSSPYQLREELAIVQLDFSQEINRFKLGRALYHIAQRRGFKSSKGETLKEQEDAVKDDIANEMSLESVSLKKSEERKSKDLASYMEENALHTVGCAFAQLEREGVRVRASKYQAVRSQYKEEIKYIFEFQNGLDIDGDFFKRIYSDRKDGCIFYKRPLRSQKGLVGKCTLEPAKSRCPISHPEFEKFRAFAFINNIQYRRTTEDEWLNLTAEQKLKLYNDKFLQAKPSFKFEAIRKWIEKEIGLLQDYHLSKEKRTINYSDRTNVTGCPISGRMKALLGEKWEEYKQQSDKIRKNKNGKEHVVSYMMEDIWHVCFSYDDEEAVSEFAKSLKFDDKQVKQFLNLWIAIPQGYAMLSLKAIRNINRFLVPKRDNPLYKGHIYTEAALLGKMPEILGEKQWADNEKSILGAINGWINQNREEKRILNIVNNLISAYKSLEYAEQFAYKNIEYQLDDSDKEDIEKYTIEAFGQKSWEKETQEMKDKVLKDVERMYQQFFFTSKRDYFRLPKLGDTIKLYLSNNFPEFYCANSFVESQTGLQCRCAACKKLNKLYHPSMVEFYKPANEQEFEYDGVMLSKKLLANPVIGAFKNPMAMRTLHQLRNLINYFIKEGLVEEDTRIVVETARDLNDANMRWAIEEYQREREKENKAILEAIKELKGEEKNNDDIDKARLLIEQNPEYLFNKDRYEVESGDDTNNKKKKAVGKATDFLYKKDVAKYRLWLEQGMQCIYTGKTISISELFDENKTDFEHTIPRSKSFDSSLANLTVCDAYYNRHIKKNCIPTELPNYEEIEHRLQPWKKKVEQLKNNVEFWRQKSKQAQTKDAKDKAIRQKHLWQMELDYWQDKLSRFTMTEVTSGFKHSQLNDTRLITKYAYHYLKSVFSKVEVQKGLVTADFRKMLGVQSADEKKDRNKHSHHAIDATILSLIPVAAKRDKILELFYKIQEEKKLNFNTEYWEKELQKEIRSCQIGNISSLPDYIEENILINHISKDQTLVPAKRKMRTRGKVIWQRDEDGQICMDKDGYKMPKHWIKGDCIRGKLHGDSFYGAIKQSKKKGEKDYLTSYEDISYVIRRELKYKKTPTDKGFKDLDDLHLSIVDEGLFNIIKQQCDGKSFKEACDDGFYMLNRDGYKVNKIRHIRCYTSVKKPLSIKRQSYLSDKEYKQSYYAEVGDLYAMCKYCNADKTKVRYEVINLFDITENRRYGYNIAEVLEDDKKKEKYYLVAVLQAGKQVILYKNDDELESIIEMSNDKLSDRLYVISGFESPYRIILKKHICAKSDSELGRGESIKSFNELPDKIRQSVNATNYLLEDIDFYISPDGLITFKND

SEQ ID NO: 7597 - protein, 1441 aa, synthetic construct
  REGION 1..1441: note = Synthetic
MKVLGIDMGSNSIGLSVRNPELGNDLENQLEYFSSVIFSSGVGNGKTGEYSYAAERTKYRSSRRLYQSRKYRKWETLKVLRYNKLCPLSESGLAQWSIYNKAKGLYRKYPVNEQQFEQWIKLDFNGDGKPDYASPYQLRDELMNRQLDMKNAIDRYKLGRALYHIAQRRGFKSSKGETIKEQENLENNSIESKPDKDIIRELKKSEDNKSKELTTYMKENNLKTVGQAFALLERNGIRIRGGKYQAIRSQYKEEVYEIFKFQQALSTDSDLFDRIISERKEKGSIFYKKPLRSQKGLVGLCTMERKIFFDKRNNQKIEKGKPRCPISHPDFEEFRAWSLINNIRYRRNAEEEWQSLALEDKHDLFNEKFLLTRSNFKFEDIAKWLSKRFGIALSYKDKTLNYKEKTNVAGCPISGRLKNLLGDNWKSMLIPVDKEKVNRTTGEVKKITYNYEDIWHICFSYDESEFVYEFGIKRLGYNEIKANELVRIWGAIQQGYGMLSLKAIRNINPFLKQGYPYTEAVLLAKIPELMGSHKWEKYGQLVEKSISDIIVKNRFEKRILNIVNNLIGNYKSLQYNDEGFATKEVNYLLDEKDKEQIEEFCIANYGAKSWSEMSVEKRGVVLDVVREDYQAFFKTEKRDFFKIPKVSDALKEFLSKKFEMFRCENYEEYSHQNNCKCDACKKLNKLYHPSQIAFYPPAIAQSFNYNGVQLSMKLLESPVIGSFKNPMAMKALHILRKEINKLLKEGIIDEDTRIVVETARDLNDANKRWAIRKYQGEREKENDEISKIIQTYFNTNRKISNDEIQKAKLLIDQHEIPVEDGMFEKNVKKYKLWLEQGCRCIYTGKPLNLTSLFSENNTTDFEHTIPRSKSFDNSLANLTVCDAYYNRTIKKNKLPFELENYEKTARIGDEEYPPIKDQLKHWKKKVERLQDNVNNWKFKAKRAQDKPAKDFAIRQRHLWEMELDYWKNKLERFTMKEVKSSFKNSQLVDTRLITKYVFHYLKTVFNSVDVQKGEVTADFRKMLGVQKAYEKKDRTKHSHHAIDAATLTLIPKSAKREKMLSLFYKIEEHKKLNKDTPELQEELNKERLSCNFNKVKNMVPFIEDKILIKHESKNQALAPAKKVVRKRKKIVKVKNNRGEKVSMVAKGDSIRGQLHEETFYGKIKALDKKDEFWMVGRKKIEELNPKTDIIVDKALSEHIHQQIDNGVELNKLKDKAGNTIRHIRCRVKAGRGFLSPDDVTTVKQQTYLSRYDYKNYYYANSGDNFGFALYVDENKKPLKIIPKSLFEVSKQDIDEHKKIEDYFERNIMVGRGQRKKIGELYNVFQVGQHVLFYVDDKEELKHTDNLSSHLYVVKTLFDGKTGRIQFQHHLEARTDEQLIRDFPDKDENGKKLFGKAGKNGFSSFGLDFIRPRLLLTVGKLNCIYEGKDFEFKADNQIRFFF

SEQ ID NO: 7598 - protein, 1547 aa, synthetic construct
  REGION 1..1547: note = Synthetic
LYRNKYKLINQKYKIMPKTFTLDLGTASIGFSLRDTENGNTFVDQLTNFGSVIFKTTVNKDGKGNYKSLATNRREKRSPRRLYQARKYRIWETLKVLIDPVNKNKKDEEIDLDKAGIYCPLTMRELNRWRKYDKANGLKRQYPVDVLNFEQWVRLDFDGNEIADYSSPYQLRAELATTQLDFSLEINRYKLGRALYHIAQRRGFKSSKGETLKEQEEAIKESADTTVDLENVSLKKSEEKKSKDLITYMIESKLPTIGCAFAKLENEKVDLAGNPVPRIRASIYQAIRSQYKEEIKYIFDFQNGLDINSSFFNGIYSDRKDGSIFYKRPLHSQKSSVGKCTLEIKTINKNGKEITIGKPRCPISHPEFEKFRAFSFINNIQYRKTTIDEWGNLTPEQKLKLYKEKFLLAKPNFKFEEIRKWIEKEIGKPLSKEQKVADSTINYSDKTNVSGCPISGRLKNLLGDNWEKFVYETSEKRNDKYGKEHIITYSSEDIWHICFSFDDEEAVAEFAKTKLKFDDKKAKDLVNLWVAIPQGYSMLSLKAIRNINQFLVPKIDNKLYKGFIYTESALLGKLPEIMGDELWKENENEILESISDWIDTNREEKRILNIANSLIANYKSLEYNEELGFDEQFARKNPEYKLMNSDFREVEQYTIEAFGNETWNKIDDKEFILGQVAEKYQTFFAHNDKERIFYKLPKLGDTLKLYLSNNFPLLQCENQQIDPETKLPCQCPACKKLNKLYHPSILEFYKPAKEQEFEYDGILLSRKLLESPVIGAFKNPMAMRTLHELRKLVNYFIKEGIIDEETRIVVETARDLNDANMRWAIEAYQREREEENKEFESAIQELKNSNREVNNDDIDKARLLVEQIGETQDQEIFELKKIIRDIYKKKKERTEAQKKLLQKYRLWLEQGMQCIYTGKIININNLFDENLTDFEHTIPRSLSFDNSLANLTICDSYYNRQVKKNRIPTQLENYDENATINGQVYSAIKPRLEKWEQKVEQLRNNVEFWVQKSKQAQPGDTKDYAIRQKHLWKMELDYWQDKLARFTMTEVTKGFKHSQLNDTRLITKYAYHYLKSVFSKVEVQKGSVTADFRKMLGVQSVDEKKSRDKHSHHAIDAAILSLIPVAAKRDKMLELFYKIQEEKKLNRNTEDLEQALQKEIRTCQIGKVSNLAQNIEENILINHISNDQTLTPAKRKKRQGGKVVWLRDENGIIIRDVNGKGISKYLVKGDSIRGQLHKDTFYGKIRLVLRDVNGKPLRNKNGSWKFQTDKDEFAFVKRIPIADLTSLEQILNPELKNNIQNQLNGRTLSKAIEDGLFMFDKRGRKVNKIRHIRIKTSISNPISVKKHIYLSTKEYKQDFYAENAENTLYALYWDGKNDLKGFDCRNLFDVAIILRTTNSKVIEDFFEPEKLIGRGNNKILVPLYTVLKPGTKVIFYEKSKEELKTLSNTELSPRIYKMNRIFSSEDGRIQFYHHLDARDDKQLLKDFPEKAIWFDGKPIGKRQKNGVAKFTTRFIAPRLLIAPSNFNFIVEEKDFEMKLDGMIRFKF

SEQ ID NO: 7599 - protein, 1458 aa, synthetic construct
  REGION 1..1458: note = Synthetic
MANVLGLDLGTASIGYSLRDTDKGANITEQLVRFGSIIFQKGVGNSKTGEFSYAAERTKHRSSRRLYQARKYRIWETLAVLIEFGFCPLSNEDLDKWRIYDKAKKLKRQYPIDAIKFEQWVRLDFDGDGKPDYLSPYQLREELAIVQLDFSQEINRFKLGRALYHIAQRRGFKSSKGETLKEQEDAVKDNAVDEINLESVSLKKSEEKKSKDLTTYMEENALYTVGCAFSQLEREGIRVRASKYQAVRSQYKAEIKYIFEFQNGLDINGDFYKRIYSDRKSGCIFYKRPLRSQKGLVGKCTLEPAKPRCPVSHPEFEKFRAFAFINNIQYRRTIDEEWQNLTIEQKLKLYNEKFLQIKASFKFEVIRKWIEKEIGMLQDCHMSKEKKTINYSDRTNVSGCPVSGRLKSLFGEEWEEYKYQSDKIRKDKKGKEHIVSYSIEDIWHVCFSYDDEEVVAEFAKSLGLDDKQVRQFLNLWIAIPQGYSMLSIKAIRNINNFLVPKKGNPLYKGYIYIEAALLAKIPEIAGQRLWEDNEKSILESINGWVSRNREEKRILNIVNNLISAYKSLEYNEQFAYKNVEYQLDDSDKKEIEKYVIEAFGEKSWEKETQEAKGKVLKDVENLYQRFFSTSKRDYFHLPKLGDTIKLYLSNNFPDLYCANGFVEPQTGLQCHCAACKKLGKLYHPSMVEFYKPVDEQEFEYNGVMLSKKLLGSPVIGAFKNPMAMRTLHQLRNLINYFIKEGLVEEDTRIVVETARDLNDVNMRWAIEEYQREREKENKAIIEAIKGLKGEEKSDDDIEKARLLIEQNPEYLFDKKRYEVETEDDTNNKKKKKIIGKTKDFLYKKDVTKYRLWLEQGMQCIYTGKTISISELFDENKTDFEHTIPRSKSFDDSLANLTVCDAYYNRHIKKNKIPTELPGYKEEIEPRLQPWRNKIEQLRNNVEFWKQKSKQAQTKDLKDKAIRQKHLWQMELDYWQDKLSRFTMTEVTDGFKHSQLNDTRLITKYAYHYLKSVFSKVEVQKGLVTANFRKILGVQSVDEKKSRDKHSHHAIDATILSLIPVAAKRDRMLELFYKKQEDKKLGLNIEYLENELQREVRSCRIGNISSLSDYIEENILINHISKDQTLVPAKRKMRKRGKVVWQRDENGQICVDKDGNKIPKHWIKGDCIRGKLHGDSFYGAIKQSKKKDEKDYLTSYKDISYVIRRELKYKKTPTDNGFKDLDDLHISIVDEHLFHIIKRQCDGKSFKEACDEGFYMLNRDGDKVNKIRHIRCYTSMQNPLTVKPQSYLSDKEYKQYYYAEMGDLYAMCKYSNADKTKVRYEVISLFDISENRKYGYDIAEVLEDDKKKEKYYLEAILQAGKQVILYKDSNELAGIMEMSNDKLSDRLYVILGFENPSRIKLKKHICAKPDSELGKGESIKSFDALPEKIRQGINVTNCLLEDIDFYISPDGLITFKNRL

SEQ ID NO: 7600 - protein, 1497 aa, synthetic construct
  REGION 1..1497: note = Synthetic
MAKTFSLDLGTASIGYTIRNTDNGSELIEQLDNFGSIIFKKGVGNSQTGEFSYAAERTKHRSSRRLYQVRRYRIWETLRVLIEYGFCPLSMEHLDKWRKYDKEKGLKRQYPIDALEFEQWVRLDFDGDDKPDYSSPYQLRSELATTQLDFTKEINKYKLGRALYHIAQRRGFKSSKGETLKEQEDVIKDISNPIELDITTLKKSEGIRSKDLMTYMSEHNMKTVGCALAKLENEGVRVRASIYQAVRSQYKEEVKYIFGFQNGLDINSDFFHKIYSDRKDGSIFYKRPLRSQKGLVGKCTLEPIKPRCPISHPEFEKFRAFSFINNIQYRSYTNDEWKDLTVEQKIKLYDERFLLTRSNFKFEEIRQWLEKEIGKPLSKEQKACDSTINYSDKTNVAGCPVTGRLKNLLGDDWRNFEYITSEKRKDKNGKEHTIVYSMEDIWHICFSFDDEELVTEFAKTKLNYNDKQIKSFVNLWIAIPQGYSLLSLKAIRNINQFLEPKAENELYKGFIYTESALLGKIPEILGEDIWKENEKDILRSISSLINENREEKRILNIVNNLISAYKSLEHEEQFAYKNNEYQLDELDLKDIEMYTRDSFGENSWEKETQENKNKILEQVADKYQQFFSTSRRDYFHLPKSGETLKTYLSNNFQTLHCDNNFVNPQNEDLPCRCDACKKLNKLYHPSMVEFYKPAKTDKDVGLKLLESPVIGAFKNPMAMRTLHQLRKLVNHFINEGIIDEETRIVVETARDLNDANMRWAIDKYQREREIENKEIAKAIKELRGEERNDDDIDKARLLIDQNPDYLFDKVRYDAEKEEEDSGNKKKKKFIGKTKDFQYKKDITKYKLWLEQGMECLYTGKIINISNLFDENATDFEHTIPRSQTFDNSLANLTICDYYYNRHIKKNRIPTQLENYDKEVVINGQSYSAIKPRLEKWEQKVEQLKNNVEFWRYKSKQAQTKENKDDAIRQKNVWQMELDYWRDKLSRFTMTEVTSGFKHSQLNDTRLITKYAYHYLKSVFNKVEVQKGSVTADFRKMLGVQSVEEKKSRDKHSHHAIDAAVLSLIPVAAKRDKMLELFYKIQEENKLNRNTDVLEQELQKEIRTCQIKNVSNLAQYIEENILINHIAKDQTLTPAKRKARKRGKVIGIKDENGKYLLDDKGEKIPKYWIKGDCIRGQLHGDTFYGAITQGKKDENGCLLRDENGKIISDEQIFYVVRRELKFKKNDQDKGFKTLDELKISIVDKSLFEIIEKQCEGKTFKDACEEGFWMIDKKGNRVNRIRHIRCYTSIKNPLSIKKQTYLSDKEYKQTYYSENAENTLYALYWDGKNKEKGFECRNLFDVALILKTNNPKTVNDFFEPNKQIGRGRNKIDIPLYAILKPETKVIFFGKDKEELKELSNNELSKRIYKMNRIFSSEDGRIQFYHHLDARDDKKLLADFPEKTIWFDGKPTGKRQKNGFAKFSPDFVAPRLLLAPSNFNFIIEGKDFEMNLDGTMTFKY

SEQ ID NO: 7601 - protein, 1127 aa, synthetic construct
  REGION 1..1127: note = Synthetic
MFSRANSVSDNDCSSVNAPAAPRDTASEAQPQPSQPSAGTNVPYVLGLDIGATSVGWAVLDLDAQGEPCCVRAMGARCFEASVDGDIEHGKDSSRAVARRQARMARRILRRRARRLKKVFHLLQRHGLLPAGPSRTPEERHRLLADLDRQLFPKYAPGGDRVAAHVVCYRLRAAALDRALEDHELGRALYHLAQRRGFLSNRRDDRRASEKGEKSQDTKVIEKEIASLKEQITASGARTLGEYLSRIDPEQQRIRKRWTSRQMYIDEFEAIWSAQSQHRPGRLTEALKRELRQAIFHQRPLKPQTQLIGRCELEPPRHPGALPPRRAPLALPVAQRFRLLQKVNDLQVIEPDGRIRPLTAEERNKLLQALSEQARMEFDDVRKLLGLSAPRKRKDKATGQQICTPGHRFNLEEGGETSIPGDTTTARLLPVLGDKWRTMPEPLRESLVRDLLDFNYPAALAEHLQRVHRFDRHEAEALSEISLEDGYAPYCRMALRKLVARMENGTPFATARKLEYPQSFAAKPPCELLPPVRRAVPDLRNPAVIRALTEVRRVVNALIRRWGKPEIIRVELARDLKKPRKEREKAWKGNREREKERKAAADRLLKEAGITNPSPADIEKVLLMEECGGICPYTGRPITIPALFGDSPQFDVEHIIPFSVSLDDSFVNKTLCWHEENRHHKRNKTPYEAYSGNRERYEEILRRVSRFSGRFRKEKLRRFQMTLADVKAEYGDDFTARHLTDTRYASRLAADYLGLLYGGTVDAAGRRRVQTSSGTATWYLRSEWDMNAVIPGLSGSPTGSASGTFIEKVRTDHRHHAIDAVAIALTSARVVKMLADAARNPEQHRRRRFAPVPPPWPNFKDEVSAAAEKIIVSHRVDRRVAGPLHAETNYSPPIVHENREYRHRRVPLSSITRSQIAQIVDDVIRQLVEQKVGSAGDPAKVFSDPRNLPVLRSRDGTRCIPIKKVRVREHVAATTVGAGPRQRHVVSGKDTLHHTVIVARQTPSGEVWEDNPVDRLEVHRRLRNGQPVIQTDWGSDARYVFHLCKNDCIEMDVESGNPSAGRQIYVVRSISKRDIAVRLHYDARTLEQIVRAKERGKFRISSADLLRRRNARKVMVSPLGEVLPCRE

SEQ ID NO: 7602 - protein, 1072 aa, synthetic construct
  REGION 1..1072: note = Synthetic
MKYTLGIDIGTSSLGLNVNELDRNNDSKNIFYTADYIFGEPVINNKGKYITKNKEKSSNQLEQRQHERQNRRKKAIYYLAKDIGIKEEDIKDIQFNEDILEIRAKAYKEKISLPKFFAVMVNISKNRGYSGRLKKEDRGLGELFAQTNEKIQEFNAKTIGELKFKLVKEQGSKILSHVKKNNVEGTFFRREQIEEEFDLILQEQLKHYSILKEKTKYPCKNDSEHNLVIYKKLKAIIFFQRPIKWDKDSIGNCNIYENEKVVSRSSILFEKYRALQLLNNLEFTDNTKIDIKDFSKGIDLLNGFKEKSVTKFLKELGYENKTLKNNGNIKDEKIKGLYTNKKLFDTFGEAWERLSLNQKESVIDFLSILSSGDEIELGDLETIYNDYIKFAHKDEKIKEFLELNKDKLSPLSEFDLPKGRATYSLKALKKFIEFFENGVVEGINEPDKTLREIEKIDEPKKTFENLNITNPIVQRAIKETIFEIDKLVKIYGEPYKINIEFTRDIKKSLKQRGEIEAKNNKRYSDKQLIKKELQKYAIKPTSKNIQRYILWQQQKHQCIYTEKTIGLSELTHYELEHIVPESKGGTRVMYNLVLADKEANKDKNNKTPYEYFHDKENWKYIQSYINHLENILKETKDLEVFIEGKNKITLDKEELKKKLKLLNSQKSAFELGKSEFGQRSYSDTSYIAKEVTQLLKDKYPNTKDIVITKGGIVAYLRSMWGLNDILPFVRDKENKPIYDKDRNKISYEDYQNAKKENLFEFDKRCDHRHHAIDAIVISFCSRSLINKLSAFHAKYGYLPRKNPKEFHKGEKELFAEVKNIFDKNSFYTKIQNIMSEIVVWHKPDRYPKGDFFDETIYGKDKEGYFTKRVKVVDFFDGITKVDKAKEKIEKWVANEETKTALLENFEKFKDEKSVKEIVLNLFNYQRKTPIKKIQIKFGKRAPQKFNEKLDKELKNGYAVNSGYSCINIDKNTFNYELIPNHKFLKVKDKNIVQLFANDIIFDKESKQFYKIVSFAQKEIIKAKNITESDNFDSLLKQDKGGRSYKFFGSTSLKNIVLVNSQPDIETIKEKYL

SEQ ID NO: 7603 - protein, 1023 aa, synthetic construct
  REGION 1..1023: note = Synthetic
MQLYLMERKLIFGLDLGLNNVGHAAVSIADDNVEIHHVGVYVFPSPLVDDNDLKAGYSAGQRGAQRRARRTLRRRGERKREIYFILSEFGFLPKDRKTRVNLLCKNYNNDRPFNPYILREKALTKELTPYEFGRVVTHLANHRGFLSPRAQRLIGIADDLLANSTDGAEETGKLLNQIKSTRVAIADAGAPTVGAFYAERVRQNLLVRSKTKPNRKVGGERNKDREELKPKEQIERFVRPDRQMIRDEFDKIIAVQKQFHPLLTDALVARLRNSIFNQLPIEGDSDKRGACTFFPKENRMYRASLAAQKFVIAQTLANLELLDKSGSSRKLSGEERKILCDALLGGADLEWAAAKALLGLDSSATFSREPTKKTKGKLSMLKGSETSKRLHDLLGQSWEILEYESRVELVGDLISFASTRDNSQAERRYKLLQRKTYGSSQVKFELKTIAELVTLELPKGTLNVSLKAARMLSPLMLAGAGYDEACLIKGLNHSAPQGQLLKVKRLDPSLAQDILHPSVRSSVQNAFRVINAMFDKYGVPNAIHIELPRDLAKSLADRLEVENHQREREKVNSSARKRLVEFGIKPTADNVKRVLLFDESDGGVLVYEPGQRIKDLEELCSPDFEIDHVVPRSHQITDAMSNFVLCSADVNRRKSGATPHEHFGKDPEQWQNIQETVKALKNMSPSKKQRILSLTRPEGFLGRHEAAIGYISREILSAVKSLEGDFDVIVSPGQATGMLRRKWGLGKVIELHPEEREKLDAHNQSVDAGTAFGDPPKLRSNFKHHALDALVVALTSRSTLVKVVNYYKKGEITGVRPPEGFPTPDRALIAKTKEALERCLVVHKPNRKTEGQIHELTARTPPEGIPNARPLSAKRFGSQLIRFDGDGKPTQAYDLGNNHHLAIFEATDGSGRRVGEVRSLLQVYERRAKKLPAIDKECAQPGYRFLFSLCKGDMVRMSTGEVGVVSQFSVRPKWGDVQVAIWKVFAAQQCGKLNLQNPYLIANIQSASKLSTIESKCESKVLG

SEQ ID NO: 7604 - protein, 1322 aa, synthetic construct
  REGION 1..1322: note = Synthetic
MNKIIGLDLGTNSIGWAIRNPQLEENQIIDNGVLIFKKGVGQDSSGNEEPMVFKRTKNRGIRRNYQVKKYQKWQLIKTLIETESQFCPLSKKDFEAWYHYDKAIRKRVYPTSTLFHNWLKLDFNNDSVSEYENPYQLRAKAIREKLSNLEIGRALYHLVQRRGFLSGRKEQGNESETISKGIEGRPGSDAITNLIETEGSLGAALATLDTRFDRIRNRYILRKQVEHELNLICEVQGISKDSDFYKNIHKAIIWQRPLRSQKGLVGKCTLEKNKTRCPISHPQFEVFRAWSVINNIKYKYKSEEKNNFRTIPTEWKEKIWKEKFLKKKDTSFDFEEIIKLLDGGYDFNYKTHQNIAASPICAGLYEIFGENWQTQKIGKYTLEDIWHVLFNFDDKDRVELFAIEKLGLEPKMADKFVILWKKTPDGYAQLSLNAITKINEYLLQGFIYTEAVLYANMPKVVGVEFYNTHKSVIQEGITYIFKYQNSINDTLKIVNNLIGKFLALPNEEQFGWDNSYQLDANDKKEINDSILDYFGQKSWNEFPKEKQDFITKTVSDLYLKFLQYPRGTKAKTFLPIPRLDEAVIQFLRNNFDHITDKDIEKLYHPSDNDIYQPSLPDKEDHKKYLQSPKTGSFKNPMAMRTLHELKRLMNYLIETEKIDEDDRVVVELARDLNDANMRVAIEKWQNANEKKNEEYKVEIERHGYNKNDKDLIQKVRLWNEQGKMSIYTGEMISIADVFDGMKFQIEHTIPASQSFDDSMENKTLCETAFNARKNNRIPTQLENYTEIEARLTPWIDKVEKLKFRYELAKKKSKSAQSKDSKDLAIQEKHIIRFELDYWKNKLYRFQMTEVKGGFRNANLVDTQIITKYAFHYMKSVFKRVDVQKGEVTSIFRKIFEINEEKNRSKHTHHTIDAAVLTLIPKAAERESILKQYFEAQEQKIKFHKKPWKNFHQSQLLKLDDETLIQNSTRDKAVIQTVKYVRKRGKIVYLTDKSGQFILDNEGKKIPKVATGDTIRGQLHNESMLGAIILPKLDVEGNPLRNDSGEFEYEENAKRVYVIRKKLEFSDLGFKDKKALEDIIDPVVRKKVLDHIEKYGLNKETFKNPIWMNEEKVIRINKVRVKTDLKNPLQIRKHVFESEKEYKKYYYADTAKGANIICAFYQYDYLGKQEREFEIINLLDAAYLVSHKLLNEKGEISISKLNKAGETIQPYALLKPGTKVIFFEQKLEELKGLDKTTLNKRLYRILKFKGIQMTFEYHLEARSADEISKKGKELEDKIYSFGYSKIDFNKPKHRYLLTKGNFNFAIEHKHFEMMPDGEIKWKV

SEQ ID NO: 7605 - protein, 1098 aa, synthetic construct
  REGION 1..1098: note = Synthetic
MQVRDDVILGLDIGVGSLGWALLEEDLQTGEQRLLQRQAPQGETSYALGVRLFNVPENPKTKELLNVKRRTARMQRRTTARRAQRMRRVRALLDSLGVPGVRDADAFHLGKGRGAQYDPWQLRREGLERRLEAREWAVVLLHIAKHRGFRSNSKTDSSGSDKEMGQVLQAVSNLQQEVEASGLTVGALLASRERRRNRADHTGAPRYDLCMLRSLQEDEVNILFTRQRGLGNPLAGEDIRCRYAELAFAQRPLAPVSHMVGPCAFLEGERRAPRFAPTAELFRYVQALCTMRLRQETGEETPLSEEQRQAACAVFGSVQSVTYKKLRQVLRLPAGCRFSGLSYGVTAKGSVQDPEKADVVMRTGKCCQGTACLRGILGDAYDALHEQRLDEADAARLAATDALSAPAAALLARGMAGLRLTDALVRIVSELNDLGQIRAILALLPLPAPRTAALSQAAGEGKLGFFQGTARLSLRAMEAILPHMLACGEYAAACELAGFDPRAAQKTDVTDIRNPVVLRVFREVRRQFSAICREFGFLPGRVHVELLREVGKSGEERNRISRGLERRTKEKEAARKAVAQLLGKSPEAVSAGEVQRYELWRQQDGKCAYYMLWRHAGGERAYGNAMPQGSIPPAWLADGVNAVQVDHILPRSRTFDNSFHNLCLCCHAANQAKGGRTPWEWLGAAQPQAWHDFEQWVQSLPLKGLKKRNYLLRDLSAEVQGRFHARNLTDSSYVARLTLRWLEEEYARHDVPMQDADGRTRRRFFARPGQVTDFLRRHWGVQALKKIGGQRSGDRHHALDALLVAACSEGMLQRMVRAFQREENGPERLHIPCPWQDFSTTVGRALGSVFVSRVERGRTKGPLHEETLRAIREERQPDGETRRVLYERKAVARLTAADLDRIKDAARCPDVVAALRRWLDAGKPGDDLPRSAHGDIIRHVRVRAGEFSSGVILQRGSGQAQAKNGGIVRTDIYSRDGKFYMVPVYAKDVADKRLPLRACVAHKDEKDWLELTEDYHFLFSLTPDCYVLTENRKGEVKEGYFEGPDRGSANISLSLAHDKKNTIRGIGIQNLKRFEKYRVDRFGRLSLVRREADPRGRP

SEQ ID NO: 7606 - protein, 1099 aa, synthetic construct
  REGION 1..1099: note = Synthetic
MQVRDDVILGLDIGVGSLGWALLEEDLQTGEQRLLQRQAPQGETSYALGVRLFNVPENPKTKELLNVKRRTARMQRRTTARRAQRMRRVRALLDSLGVPGVRDADAFHLGKGRGAQCDPWQLRREGLERRLEAREWAVVLLHIAKHRGFRSNSKTDSSSGSDKEMGQVLQAVSNLQQEVEASGLTVGALLASRERRRNRADHTGAPRYDLCMLRSLQEDEVNILFTRQRELGNPLAGEDIRCRYAELAFAQRPLAPVSHMVGPCAFLEGERRAPRFAPTAELFRYVQALCTMRLRQETGEETPLSEEQRQAACAVFGSVQSVTYKKLRQVLRLPAGCRFVGLSYGVTGKGKVQDPEKADVVMRTGKCCQGTACLRGILGDAYDALHEQRLDEADAARLAATDALSAPAAALLARGMAGLRLTDALVRIVSELNDLGQIRAILALLPLPAPRIAALSQAAGEGKLGFFQGTARLSLRAMEAILPHMLACGEYAAACELAGFDPRAAQKTDVTDIRNPVVLRVFREVRRQFSAICREFGFLPGRVHVELLREVGKSGEERNRISRGLERRTKEKEAARKAVAQLLGKSPEAVSAGEVQRYELWRQQDGKCAYYMLWRHAGGERAYGNAMPQGSIPPAWLADGVNAVQVDHILPRSRTFDNSFHNLCLCCHAANQAKGGRTPWEWLGAAQPQAWHDFEQWVQSLPLKGLKKRNYLLRDLSAEVQGRFHARNLTDSSYVARLTLRWLEEEYARHDVPMQDAEGRTRRRFFARPGQVTDFLRRHWGVQALKKIDGQRSGDRHHALDALLVAACSEGMLQRMVRAFQREENGPERLHIPCPWQDFSATVGRALGSVFVSRVERGRTKGPLHEETLRAIREERQPDGETRRVLYERKAVARLTAADLDRIKDAARCPDVVAALRRWLDAGKPGDALPRSAHGDIIRHVRVCAGEFSSGVVLQRGSGQAQASNGGMVRTDIYSRDGKFYMVPVYAKDVADRRLPLRACVAAKAEKDWREMTADYRFLFSLTPDCYVLTENRKGEVKEGYFIGSDRSTAAISLSLAHDRQQSLRGIGITTLKRFEKYRVDRFGRLSPVRREADPRGRS

SEQ ID NO: 7607 - protein, 681 aa, synthetic construct
  REGION 1..681: note = Synthetic
MQTASHSRLLDIQYLLLSLPGAVLALLPLAAPRIAALSQAAGEGKLGIFQGTARLSLRAMEAILPHMLACGEYAAACELAGFDPRAAQKTDVTDIRNPVVLRVFREVRRQFSAICREFGFLPGRVHVELLREVGKSGEERNRISRGLERRTKEKEAARKAVAQLLGKSPETVSAGEVQRYELWRQQDGKCAYYMLWRHAGGERAYGDAMPQGSIPPAWLADGVNAVQVDHILPRSRTFDNSFHNLCLCCHAANQAKGGRTPWEWLGAAQPQAWHDFEQWVQSLPLKGLKKRNYLLRDLNAEVQGRFHARNLTDSGYVARLTLRWLEEEYARHDVPMQDADGRTRRRFFARPGQVTDFLRRHWGVQALKKIDGQRSGDRHHALDALLVAACSEGMLQRMVRAFQREENGPERLHIPCPWQDFSATVGRALGSVFVSRVERGRTKGPLHEETLRAIREERQPDGETRRVLYERKAVARLTAADLDKIKDAARCPDVVAALRRWLDAGKPGDALPRSAHGDIIRHVRVCAGEFSSGVVLQRGSGQAQASNGGMVRTDIYSRDGKFYMVPVYAKDVADKRLPLRACVAAKAEKDWREMTADYRFLFSLTPDCYVLTENRKGEVKEGYFAGANRNTSAISLSLAHDKQNVIQGIGITTLKRFEKYRVDRFGRLSLVRREADPRGRS

SEQ ID NO: 7608 - protein, 937 aa, synthetic construct
  REGION 1..937: note = Synthetic
MQVRDDVILGLDIGVGSLGWALLEEDLQTGEQRLLQRQTPQGETTYALGVRLFHVPENAKTKELLNVKRRTARMQRRTTARRAQRMRRVRALLDSLGVPGVRDADAFHLGKGRGAQCDPWQLRREGLERRLEAREWAVVLLHIAKHRGFRSNSKTDRSGSDKEMGQVLQAVSNLQQEVEASGLTVGALLASRERRRNRADHTGAPRYDLCMLRSLQENEVDILFTRQRELGNPLAGEEVRCRYAELAFAQRPLAPVSHMVGPCAFLEGERRAPRFAPTAELFRYVQALCNMRLRQETGEETPLSEEQRQAACAVFGSVQSVTYKKLRQVLRLPAGCRFAGLSYGVTEKGNVQDPEKADVVMRTGKCCQGTACLRGILGDAYEALHEQRLDEADAARLAATGALSAPAAALLARGMAGLRLTDAVARIVSELNDLDQIRAVLALLPLAAPRIAALSQAAGEGKLGIFQGTARLSLRAMEAILPHMLACGEYAAACELAGFDPRAAQKTDVTDIRNPVVLRVFREVRRQFSAICREFGFLPGRVHVELLREVGKSGEERNRISRGLERRTKEKEAARKAVAQLLGKSPETVSAGEVQRYELWRQQDGKCAYYMLWRHAGGERAYGDAMPQGSIPPAWLADGVNAVQVDHILPRSRTFDNSFHNLCLCCHAANQAKGGRTPWEWLGAAQPQAWHDFEQWVQSLPLKGLKKRNYLLRDLNAEVQGRFHARNLTDSGYVARLTLRWLEEEYARHDVPMQDADGRTRRRFFARPGQVTDFLRRHWGVQALKKIDGQRSGDRHHALDALLVAACSEWMLQRMVRAFQREENGPERLHIPCPWQDFSATVGRALGSVFVSRVERGRTKGPLHEETLRAIREERQPDGETRRVLYERKAVARLTAADLDKIKDAARCPDVVAALRRWRACQKCTFNPNQKDKHYGC

SEQ ID NO: 7609 - protein, 1071 aa, synthetic construct
  REGION 1..1071: note = Synthetic
MRYTMGLDIGIASVGWAVINEDKSRIEDLGVRVFKKAEEPDGKSLNLARREARGSRRRIRRRATRMQKVKELLIKYNLVSEKELETLYVITETTPDVYELRAKGLDKLLSRQEFARVLTNIAKRRGYKSNRKIDEEEKEVGKLSKGTIENKKILQEKCYRTIGEMFYKDEKFEYNKRNKGGEYNNTVLRSMLIDEVHILFDIQRNLKSEYADEKFEKEYVEVITYQKPYITPELLEKMLGKCTFEKGEPRAPKNSYTFERFMLLQKVNNLNIYINGEKIEIPQKKKKEIIQLAYNQTEIKYTQLRKKLELPIEARFADLNYQIKRTEEDSEEELVKKIENKKFVKLEGWHKIRLALKENKDKFEKIEKNPELQNIIADALVRNKTDETIKSYLEKSNVDVEIINAVLNINFTKFGHLSYKAINKIIPELEKGLTYDKACESVGYEFKGRRNELQYKLPPVTELEDEILNSVVLRSVSQTRKVVNAIIDKYGSPTAVYIETARELSKPYDERMKIEKRQKENEANNDKIKEYIKETFGFDPKPFDIVKMKLWREQSGKCAYSSKPIPAERLYEENFVQVDHIIPFSRCFDDSYQNKVLVLTDENQKKKERTPFEYFGEDKEKWHKFEEFVNLTYKFNTRKKENLLIKNFNEDKSKEWIQRNINDTKYISKFMYNYITNNLKFAESELKKKVYNINGQATSILRHYWGLKKDREKSDKHHAQDAVIIACATNKNIKKVSEYSRRKLLYKNNEIIDKETGEIIDSKYNIDISIKEPWPKFREEVEARMEDVDNNGQLYALVNGKFTNYDDIDVTQVRPIFTSRMPERKITGRAHKDTMRSQKFIQQGQNFTVVKKPLKAISKQEIEGIINNPDFKNLYLSDKKLYDDIYQKMKETNFKAEKAFINEYRKYSKKGNSPIVRSIKVPSAGATGVQLKNGSIAENANMVRVDVFEKDNKNYLVPIYVSDFVKDELPNKAIFANKDEKKWIEMTEEYKFKFSLYPNDLVKIKRKNEKEFYAYYCSTHRGTGAINLLAVNGERKIEGIGAKSLEIFEKYQVDVLGNISKINKEKREGVK

SEQ ID NO: 7610 - protein, 1102 aa, synthetic construct
  REGION 1..1102: note = Synthetic
MEIRYVLGLDIGIKSIGWAVINDEKNRIEDLGVRIFPAAERPKDGGAINENRRIARGLRRRLKRRRVRMDKIKDLFIKYNLVSKNEISDLYKLKSDDIDTWKLRACGLDRKLNAKEWARVLTTIAKRRGYKSNRKIEDENEKSESGKLTKAIKANKIYMELKGYRTVGEMFAKDKKYQNNKRNKRGDYNNCVDRSELREEIKILFDKQRSFGSEFASENFESEFLEVFDWQKPFMTSELMQKMIGKCTLEKDEPRASKNSYTFERFMLLQKINNLSYMVGDDKRYLTMEEREKLIKLAYETKSGVKYGKIRKELKLPDEAVFTGLYYYIKPVKKADGTYEKLSYEEIVKKTEDAVFVKLVGYHELKSALNGHEDILNNHDLLDEIAEVLTLNKTDVTIKEELQKLGLSDDIIEGLLKVNFSKFGHLSYKAMKNILPYFEEGRKYDEACKEAGYNFKADDENPKYKLPVIPKDDIRNPVVYRAIAQTRKVINAVIDKYGSPYEIHIEVARDLTKNFSERKKIEDKQKENRTINDNLKKDIEEHFNIKAKPVDMLKKRLYHEQDGKSAYSLLPIEYSRLFEDGYVQIDHAIPFSRSFDDSYNNKVLVLSKENQEKRNQTPYEYLGGTPNWETFEAWVKSTYRNNIKKRENLLVKNFNEDKENDWIARNLVDTKYIARYMTNFIKKNLKFNNYSEKENRIKVKTIVGAATTALRHYWGISAKNREENDLHHAEDAVIIACASEKFQKKIREYSKEKELYYPNKNGDYYDPTTGEIVDVKYKTHEMAEPWDNFKEELEMRIPRIPDEWKDKTVTIEMVQKLILEHFKRGSFTNYDDVDINDIKPIFVSRMPNRKISGEAHGETIYSLKQDAGIVTVKKPLSSISKDEIETLLHNEKCKKLYESDKDLYDRIYARLAEYNFKAEKAFSSDYTVRKHSKNGEGPIVKSIKVPKVMSSGAGVKINNETGIAANGNMVRVDVFTKNNKYYLVPIYVADMVKDRLPNKAIKANKPESEWLEMDENYIFKFSLYSNDMIAVKKKNEETIYGYYTSTHRGTGAINMISHDGSRKLEGIGPQNLEVFDKYEVDILGNYHKINKEQRKGGEKQSK

SEQ ID NO: 7611 - protein, 944 aa, synthetic construct
  REGION 1..944: note = Synthetic
MSNLIWRYSMRYTIGLDIGIASVGWAVINEDKSRIEDLGVRVFKKAEEPDGKSLNLARREARGSRRRIRRRATRMQKVKELLVKYNLVSEKELETLYIITETTPDVYELRAKGLERLLSRQEFARVLTNIAKRRGYKSNRKIDEEDKEVGKLSKGTIENKRILQEKGYRTIGEMFYKDEKFEYNKRNKAGEYNNTVLRSMLIDEVHTLFEMQRKFKSEFANKEFEKEYVEVMTYQKPYITPELLEKMLGKCTFEKGEPRAPKNSYTFERFMLLQKVNNLNIYINGEKVEIPQEKKKEIIELAYKQAEIKYTQLRKKLELPIEARFADLNYQIKRTEEESEEALVKKIEDKKFVKLEGWHKIRLALKENKDKFEKIEKNPELQNIIADALVRNKTDETIKNYLEKSDIDEEIINAILNINFTKFGHLSYKAMNKIIPELEKGLTYDKACENVGYEFKGRKNELQYKLPPVTELEDEILNSVVLRAVSQTRKVINAIIDKYGSPTAIYIETARELSKPYDERMKIEKRQKENAANNDQIKEYIKETFGFDPKPFDIVKMKLWREQNGKCAYSSKPIPAERLYEENFVQVDHIIPFSRCFDDSYQNKVLVLTDENQKKKERTPFEYFGEDKERWHQFEKFVNLTYKFNTRKKENLLIKNFNEEKSKEWIQRNINDTKYISKFMYNYIANNLKFADSESKRKVYNINGQATSILRHYWGLKKDREESDKHHAQDAVIIACATNKNIKKVSDYSRRKLLYKNNEIIDEETGEIIDKKYNIDISIKEPWPKFREEVEARMEDADNNGQLYALVNGKFTNYDDVDITHIRPIFTSRMPERKITGRAHKDTMRSQKFIQQGQNFTVVKKPLKAISKQEIEGIINNPDFKNLYLSDKKLYDDIYQKMKEADFKAEKAFADEYRKYSKTGNSPIVRSIKVPSAGGTGGQIKKRG

SEQ ID NO: 7612 - protein, 1095 aa, synthetic construct
  REGION 1..1095: note = Synthetic
MKYSLGLDIGISSIGWAVVNLEKNRIENLGVRLFTSAERPKDGGAINEKRRLARGLRRRLKRRRVRMNKIKELFVKYEIISKDETERLYVLSNEDIDTWQLRAEGLDRKLTPREWARVLTSIAKRRGYKSNRKTEANSDEGGKIIKSIALNRAYMEAKGYRTVGEMFAKDEKYIDAKRNKNGQYNNCIDRSELEDETKILFSKQRELGNTYTSADFENEYLQVFNYQKPFMTPELMDKMVGKCTFEKDEPRAAKNSWTFERAMLLQKVNNLAYQVDSKKIFLSEEQREKVIDLAYKLKSGVKYKKIRSELDIPEEAVFVGLNYYIKPTKNKKTGEYEKLSAEEIRNKVEDASTFVKLNGYHEIKTAFEKADALNIFDELCKNEHEKIDKIAEVLTRNKTDVEIIKALSELGIDDKVIDELTNVTFAKFGHLSYKALNKILPFLEEGKQYDKACQSAEYNFKNDDGELKYKLPVISKDEIRNPVVYRSVTQTRKVINAIIDKYGSPFEIHIELARELTKNFKERKDIESKQKENRTQNEILKNDIKQHFGITAKPVDMLKVRLYREQNGKSAYSMQPIEYARLFENGYVEIDHAIPFSRSFDDSYNNKVLVLSRENQEKKNKTPFEYLGSTSNWDEFEAFVKTTYRNNMKKRENLLVKNFNADKERDWLEKNLNDTKYIARFLLNYIKKNLAFENFGEPENRIKVKAIVGSCTTALRHYWGIPTKDREKNDLHHAEDAVIIACATEKFQKRIREYSKQKELYYQNKNGEYFDEETGEIVDVKYKTHEMERPWPEFKEELEARMSENPSHDLASDMFKNYNDVDVTKIKPIFVSRMPNRKVTGQAHEETIYSAKLTDKGIVMRKKFLNQITKSEIEMILTNENYREIYQSDKELYDSIYSRMEEFNFRADKAFNSEYVLRKRAKKGDGPVVKSIKVPSSMNSGLELQKGSGKGIAANGGMVRVDVFTKNGKYYLVPLYVADMIKNVLPNKAIKAGKSQDEWIEMDETYKFIFSLYYNDLVGVKKKGEKIKIMYFHGADVSTGTLTLINHDKSLIDGKETARPGAQNLEVFEKYEVDVLGNYYKVKNEKRKGGIKSKK

SEQ ID NO: 7613 - protein, 1247 aa, synthetic construct
  REGION 1..1247: note = Synthetic
MNKRVLGLDLGVGSIGWCLITLDEQDNPAEIVAMGSRVVPLDDPTKDANNFRIGEAFTANQNRTARRAMRRGFDRYQLRRHRLHRELSKVGMLPDAQLIQLPLLELWELRERAAQFGEQLTLPELGRVLCHINQKRGYRHVKGDRSSSVVEEDKKKKETNSDYVTAINQRYAHLQEAHLTVGQYFAKQLRSSKTESGAIVYRVKDQVYPRQAYIDEYNQIMQVQSAYYPEVLTPHFIKMLRDEVIFMQRPLKSCKHLVSLCEFEKQEKMMRVQQDDGKGGKEVVERKIKFGPKVAPKSSPLFQLCRLYEAVNNIRLTYPDNSPRPLTNEERAKLVAYLQGCETLQEKKPTKRPSKKPKKETCPEVNLDSLKQVLQIEEELRADKLLESGITGDTTRIALATILQPYEQYHHLLTMELETRPMKVQTTDEATGEITEHEVAVLTDSYTRQPLYRLWHILYSIEERDAMRKALITQLGMSEEELDGGLLDQLYRLDFVKPGYGNKSAKFMCKLLPQLHQGLGYSEACAAVGYRHSGSLTREEIAERILLPQIPLLQRNELRQPMVEKILNQMINLVNTLQAEYGIDEVRIELARELKMSREERERISRSNGTRKTKNDAVAKYIQEYGLYPTKTLIRKYLLWEEADRRCMYCGKEISLSQCLNGDEMEVEHIIPKSILYDDSFGNKTCACRQCNKEKGNMTALEYILTKGWEKEYRDRLDKLREEAKRQEKATQKKKKEVQKQTISYSKCQRLLWLKKDIPTDFLERQLRLTQYISRQAMSILQQSIRRVTASEGGVTARLRSLWGYDDILHSLNLDRYESMGETELVPKHPNSEEDDSMKCRITDWSKRKDHRHHAIDALVVACTRQGYIQRLNRLSSETDREEMRRETELRKESTADKLSLLERWLSQRPHFSVQDVSDKVAEILISYPKPKRTHTWGRNRYKKKTADGKEKTCIQTRVLVPRGELMEASLYGKIISDGKERIVKRYPLHALKGTVVDPRLRELITQRKQGSATEAKGAPLYLDAEKKQEVRSVRCYAAKLSTDKAIPLCFDEQGKAITFAKSGSNHHVVHYLDAAGKTHPIILSIWDVIERVRYGLPTIITDYAQVPQDLELPASVRDKLPQAEWKCIDVLLRNEMFLLGLSDEEITQAITRADYTLLSKHLYQLRTISISSDKKIDYTFYYHLDAPDPNQKKKEQGDKKKEKEQSKPAKGTSLTLHKYRVQGLSTFLELNIHKVRIDLLGRITLL

SEQ ID NO: 7614 - protein, 1221 aa, synthetic construct
  REGION 1..1221: note = Synthetic
MKKVLGLDLGVGSIGWSLIALDEDQRPAEILGMGCRIVPLTKEENKFASGGGTSENAKRTQMRTMRKMLDRYQQRRTKLANILREHQMYPDEALMQLPLMQLWQLRADAATPGRQLSLSELGRVLYHLSQKRGYRHSKSDESGEDKETKYVAEVKSRYQQIQEEGLTVGQHFAKLLKDNEQHSERGGVYYNYRTKDQVFPREAYAEEFDRIMAVQRGFHPSLTDRLIAKLRDCIFYQRPLKSCKHLVSYCEFERKQVELPVKQVERDGTITYKKQLVDVGPKVAPKSSPLAEVCRIWETLNNLRLYFPDGSERTITQEERQRLFDYLQENDALNLAQTKKILKCKDEDLFSNILIEKKKKEKPTEKKKKKGGNEEALSLSALPEEEQAKKQKETSKDKEDTGNPEVKIKGNTTTATLRKALKGYKQYLELLSFELSEEEKAEPETGELRPVISERYQQEPLYKLWHILYSIEDKEAMRRALTKQLGISEADLEAGLLDRLFKIDFVKQGYANKSIKFISKLLPHLMQGYMYSEAAERAGKRHSESLTSEDLQQRPLLDKIPVLQRNSLRQPVVEKILNQMINLVNQLKADYGEIDEVRVELARELKMSREERKRTASNQNKNENVNARIAALITKDYGLHPTKTRIQKHKLWKETEGNCMYCGKPVDIKQFLLGSEVEVEHIIPRSILYDDSLSNKTCACHECNQEKGNRTAKEYILSKDEETQKKYNARVQELFERHKISSAKHSRLHMTLADIPEDFLERHMRLTQYISREAHSILAKGIRCVETSSGGITATLRRLWGYDTILKELNFEIYKSRGETETILVDGVATERIANWSKRNDHRHHALDALVVACSDRKYIRRLNHQNSEADSDSMHDELQETGGKHTDQKQLLDRWLKAQPHFAPHVVQAKIAEILISLQPEEKTYSRGRNIIKRKGERFVQEGILVPRGALSKETVYGSILQKEQQKFVYKRPLQKLGNSDLKSIVDQRLRGIIAQRLAEHGGDRDKAFAEPLYSDRAQTQQIRSVRCFPTKGQNTLIPLRYDTQGRAKAFIAPGNNHHVAFYTDSKGQLREYVSSFCQVIERVRFSLPPIIYDPRATMEQALSIAELPESVIKDLPPSDWVIKETLRRDEFFLMGMSDEEIASALEAQNYSLLSRHLYRVQKLSFINYVFRHHLETSVKEDKSTRGEVPMSYRVQSLTTYSNLNPRKVKVDRLGKISLL

SEQ ID NO: 7615 - protein, 1215 aa, synthetic construct
  REGION 1..1215: note = Synthetic
MLMSKHVLGLDLGVGSIGWCLIALDAQGDPAEILGMGSRVVPLNNATDAADFSIGKAFTANQERTARRTMRRGFARYQLRRYRLRRELEKVGMLPDAALIQLPLMELWKLRERAATAGECLTLPELGRVLCHINQKRGYRHVKSDAAAIVGDEGEKKKDSNSAYLAGIRANDEKLQDEHKTVGQYFAEQLRQSQNESPTGGISYRIKDQIFSRQRYIDEYDQIMAAQRVHYPDILTDEFIRMLRDEVIFMQRPLKSCKHLVSLCEFEKQERVMRVQQDDGKGGRQLVERKVKFGPKVAPKSSPLFQLCRIYEAVNNIRLIRPDGSPRDITPEERDKLVAYLQTYEAPKPPKRKPAKAKPVKLAHPKLDLDKLKELLCIEEELFADKLLEEGLKGDTTRIALSIILQPYPQYHHLLDMELETRMMTVQLTDEETGEVTEREVAIVTDSYVRQPLYRLWHILYSIEERDAMRRALITQLGMKEEDLDGGLLDQLYRLDFVKPGYGNKSAKFICKLLPQLQQGLGYSEACTAVGYRHSNSPTSEEIAERTLLEKIPLLQRNELRQPLVEKILNQMINLVNALKAEYGVDEVRVELARELKMSREERERMTRQNGQRKEANDKVAERIRQCGLYPTKPRIQKYMLWEEAGKVCLYCGRSIEEEQCLNGDDMEVEHIIPKSVLYDDSYGNKTCACHECNQTKGNRTALEYIRAKGWEAEYMERINDLLKEKKISYSKHQRLRWLKEDIPSDFLERQLRLTQYISRQAMAILQQGIRRVSASEGGVTARLRSLWGYGKILHTLNLDRYDSMGETERVSREGEATEELHITNWSKRMDHRHHAIDALVVACTRQSYIQRLNRLSSEFGRGNKKMEDLEAQEQQAKETGRFSNLERWLTQRPHFSVRTVSDKVAEILISYRPGQRVVTRGRNIYRKKTADGREVTCVQRGVLVPRGELMEASLYGKILSQGRERIVKRYPLHDLKGEVVDPRLRELIAVYNQEITSKVKAKGTPLYLDAAEKQEVRSVRCYVDKPSVAKAIPIRFDECGRAITFVKSGSNHHLALYRTPHGKLEESIVTFWDAVDRARYGIPLVITHPREVIEQVLLRGDVPESVLRLLPPSDWVFVDSLQQDEMVVIGLSDKELQRALEVQDYHKLSEHLYRVQKMSSRDYWFRYHLETSVADDKNTSGRIPKFHRVRSLSDYEKRNIRKVRVDLLGRISLH

SEQ ID NO: 7616 - protein, 1213 aa, synthetic construct
  REGION 1..1213: note = Synthetic
MLMSKHVLGLDLGVGSIGWCLIALDAQGDPAEILGMGSRVVPLTNLGDDKAFSKGEAFTANQKRTARRTMRRGFARYQLRRYRLRRELEKVGMLPDAALIQLPLLELWELRERAATAGRRLTLPELGRVLCHINQKRGYRHVKSDAAAIVGDEGEKKKKDSNSAYLAGIRANDEKLQAEHKTVGQYFAEQLRQNQSESPTGGISYRIKDQIFSRQRYIDEYDQIMAAQRVHYPDILTDEFIRMLRDEVIFMQRPLKSCKHLVSLCEFEKQERVMRVQQDDGKGGRQLVERKVKFGPKVAPKSSPLFQLCRIYEAVNNIRLIRPDGSPRDITPEERDKLVAYLQTYEAPKPPKRKPAKVKPVKLAHPKLDLDKLKELLCIEEELLADKLLEEGLKGDTTRIALSIILQPYPQYHHLLDMELETRMMSVQLTDEETGEVTEREVAIVTDSYVRQPLYRLWHILYSIEERDAMRRALITQLGMKEEDLDGGLLDQLYRLDFVKPGYGNKSAKFICKLLPQLQQGLGYSEACAAVGYRHSNSPTSEEITERTLLEKIPLLQRNELRQPLVEKILNQMINLVNALKAEYGIDEVRVELARELKMSREERERMARNNKDREERNKEVAAKIRECGLYPTKPRIQKYMLWEEAGKVCMYCGRTISLSQCLNGDDMEVEHIIPKSVLYDDSYGNKTCACHECNQTKGNRTALEYIRAEGREAEYMKRINDLLKEKKISYSKHQRLRWLKEDIPSDFLERQLRLTQYISRQAMAILQQGIRRVSASEGGVTARLRSLWGYGKILHTLNLDRYDSMGETERVSREGEATEELRITNWSKRMDHRHHAIDALVVACTRQSYIQRLNRLSSEFGREDKKKEDQEAQEQQATETGRLSNLERWLTQRPHFSVRTVSDKVAEILISYRPGKRVVTRGRNIYLRHGKKCVQSGLLVPRGPLSKETVYGQITVNGEQQIVCKYDLHSLKAKDVDYVVDLALRKRLKELLAQHGGKEKEAFAGDVYMDEAGTQGPIRSVRCFTGLDRDKMKAVKYDEQGDAVGFVSPRNNHHLAIYRTPKGKLEESIVTFWDAVDRARYGIPLVITHPREVMEQVLQREDIPESVLSLLPSSDWIFVESIQRDEMVLVGLSDEEIRQAVEAQDYCKLSEHLYRVQKIATGNYMVRYHLETDTDMNRSGRIPKLYQLSLTSYEEKNVRKVRVDLLGRISLL

SEQ ID NO: 7617 - protein, 1198 aa, synthetic construct
  REGION 1..1198: note = Synthetic
MSKHVLGLDLGVGSIGWCLIALDEQDQPAEILGMGSRIVPLTTDDLNEFSQGKAISKNQKRTTQRTIRKGLDRYQLRRKILSEKLAEHGMLPDKDLMQLPVLDLWELRARAASPGEKLSLPEIGRVLYHINQKRGYKHAKSDEAEEATKRGKEKGYVATVKGRYAELQREGATVGQHFACKLKEHRQESPSGGFFYNYRIKDQVYPREAYIEEFDRIMEVQSVFYPEVLTPAFIQELRDKVIFFQRPLKSCKGLVSFCEFEKQERVVQLKRVNREGKEELQERKITIGPKVAPKSSPIAQLCKLWESIHNIRIYYPEGKERPITLEEKQKLLAYLQTHDKLTFTALKKELKISDRERLWCDKLLKGGIKGDTTRVLLRKALAGYKRYEPLLRMDLELRDFQEIVSGKRLIRPIVDESYLSQPLYRLWHILYSIEEREAMRRALIDQLGFLEEDLDGGLLDKLYQIDFAKQGYSNKSAKFICKLLPHLQEDHGYSEACELAGKRHSASSLTKEELEERPLLEHIPLLQRNELRQPIVEKILNQMINLVNALRQKYGSIDEVRVELARELKMSREEREETSRRIRAREKENKEIAERIKEYELYPTKSRIQKYRLWQEAGEQCLYCGRSIDVVQFLRGDGVEIEHIIPKSILYDDSSANKTCACSRCNKDKGNRTAYEYILAEGREAEYLDRLETLFHDGKLSYSKRRRLQWKKADIPADFIERQLRLTQYIARQAQEILRQGIRRVGASEGSVTAKLRHLWEYDDILRDLNFERYQSMGETEIVSQKEKDGSITKSERIKDWSKRKDHRHHAIDALVVACTRQGHIQRLNSLNSEEDSLQMQEDSKQMREKMGEQKRPTADKHSILENWLILQPHFSHQEVKSKVAEILVSFRPGKRTVSTGRNTYLRSGKKVTQSGVLIPRGPLSEESLYGQILRNGEPTYVKKVALESLSEAQIEQIVDPKLRREMIARAQPSDGAKLNPKLLLATPFYSDAAGTQRVRSVRVAIKQGKNSIVPLRYNESGKAITFVNPGNNHHVGIYRTPEGKLVESCVTFWQAVDRVRYGLPAIIRKPREVLDQLLLRDDIPEALLVHLPASDWEFVEYLQANEMFLIGLTDEEIQTALAESDQLTLSKHLYRVQSVSSKDYMFQYHLETEASGSKKRKGRIPKVYRLTGPGNVYQKLNPRRVKVNLLGEISLPK

SEQ ID NO: 7618 - protein, 1197 aa, synthetic construct
  REGION 1..1197: note = Synthetic
MQRSTMARKVLGLDLGVGSIGWCLITLDNDEKPQSILGMGSRIVPLSTDDATEFTQGKAITKNKMRTVARTIRKGMDRYQLRREALKKVLREHGMLPDESLIKLPLIKLWELRAQAATPGGKLSLTELGRVLLHINQKRGYKHAKADEAAEAEAEGKPKKEKEGYVAQVKGRYQALREKGQTIGQHFAEELRANRQTASRGVYYTYRIKEQVYPREAYIEEYDSIMKVQRTFYPELLTDALIGRIRDRIIFYQRPLKSCKQLVSTCEFEKKERVVQVKRINKDGVEELVERTITIGPKVAPKSSPIFQVCKVWESIQNIRLYYPDGTERKLEQEEKQKLFDYLQKNDKLIFTALRKELKIKPKEKLWCDKLLDKGIAGNTTTAILRKALKGYEQYEGLLRFDLKNKVDEDGVILPIIDESYQNEPLYKLWHILYSIEDKDDMRRALVGQLGIKEEDLDDGLMDALYKIDFVKQGYGNKSAKFICKLLPHLQEGKMYSKAAEAAGVRHSDSMTAQERDERSLLEEIPLLQKNALRQPVVEKILNQMINLVNALKREYGEIDEVRVELARELKMSREEREETTRSNNAREEENKTKAEYIKGEYSLTPTKSRIQKYRLWEESGGCCIYCGKHVDLEQFLRGEEIEVEHIIPRSILFDDSMSNKVCACRSCNQEKGNRFAMEYIQSKGWEQSYIERVNSLFHDKKISYSKRQRLLMLPKDLPEDFIERHLRLSQYISREAQGILRKGIRLVSASEGSVTAKLRQLWGYDNILRDLNLERYRSMGETEVVTVEHRDGERTDERIKDWSKRKDHRHHAIDALVVACTRQSYIQRLNRVNAEPDREEMDAFIKEQQQKPTHSKGEKLSLLENWLIRQPHFKIEDVMKHVEGILVSFRPGKRTVSRGRNIYKRSGKTDVQRGVLIPRGALSEETIYGVIQLHRKGKSGTGLERSYVKRIPLSKVNPSNVKNIVDSRIRDVVQAALLSLSGRKGVLPTELYLDDSRKRVVRSVRCLVRSSSLIPIRFNADGEAIGFTKPGVNHHVALYRDGAGNIRESVVPFFRAVERARYGIPMIISDPSKAREQARANPNLPESILLSLPEEDWQLEEILQGDEMFLLGMTDEAIDRAMETKDYTTLSRHLYRVQNLSSMYYVFRYHLETEVKDKKNTSGEIPKFYRITSFSSYQRLNPRKVKIDLLGRISLT

SEQ ID NO: 7619 - protein, 1196 aa, synthetic construct
  REGION 1..1196: note = Synthetic
MLMSKHVLGLDLGVGSIGWCLIALDAQGDPAEILGMGSRVVPLNNATKAIEAFNAGAAFTANQERTARRTMRRGFARYQLRRYRLRRELEKVGMLPDAALIQLPLLELWELRERAATAGRRLTLPELGRVLCHINQKRGYRHVKSDAAAIVGDEGEKKKKDSNSAYLAGIRANDEKLQAEHKTVGQYFAEQLRQNQSESPTGGISYRIKDQIFSRQRYIDEYDQIMAAQRVHYPDILTDAFIRMLRDEVIFMHRPLKSCKHLVSLCEFEKQEKVMRVQQDDGKGGRQLVERKVKFGPKVAPKSSPLFQLCRIYEAVNNIRLTRPDGSPRDITPEERAKIVAHLQSSASLSFAALKKLLKEKALIADQLTSKNGLKGNSTRVALASALQPYPQYHHLLDMELETRMMSVQLTDEETGEVTEREVAVVTDSYVRQPLYRLWHILYSIEERDAMRRALITQLGMKEEDLDGGLLDQLYRLDFVKPGYGNKSAKFICKLLPQLQQGLGYSEACTAVGYRHSNSPTSEEIAERTLLEKIPLLQRNELRQPLVEKILNQMINLVNALKAEYGVDEVRVELARELKMSREERERMTRQNDKRKKANDKVAERIRQRGLYPTKPRIQKYMLWEEAGRQCLYCGQSIEEEQCLNGDDMEVEHIIPKSVLYDDSYGNKTCACHECNQTKGNRTALEYIRAEGREAEYMKRINDLLKEKKISYSKHQRLRWLKEDIPSDFLERQLRLTQYISRQAMAILQQGIRRVSASEGGVTARLRSLWGYGKILHTLNLDRYDSMGETERVSREGETTEKLHITNWSKRMDHRHHAIDALVVACTRQSYIQRLNRLSSEFGREDKKKEDQEAQEQQATETGRLSNLERWLTQRPHFSVRTVSDKVAEILISYRPGQRVVTRGRNIYRKKTADGREVSCVQRGVLVPRGELMEASLYGKIISQGRERIVKRYPLHDLKGEVVDPCLRELITTYNQELKSREKGAPIPPLCLDKDKKQEVRSVRCYAKTLSLDKAIPMCFDEKGEPTAFVKSASNHHLALYRTPKGRLVESIVTFWDAVDRARYGIPLVITHSREVMEQVLQRGDIPESVLRSLPPSDWVFVESLQLNEMVIIGLSDEELQRALEVQDYRKLSEHLYRVQKLSAGKYFIRYHLDTDVDEDNRSGRIPKFYQLSLDAYKKNNVRKVRVDLLGRISLL

SEQ ID NO: 7620 - protein, 1192 aa, synthetic construct
  REGION 1..1192: note = Synthetic
MGKKVLGLDLGVGSIGWCLITLDKDEKPQSILGMGSRIVPLSADDATEFTQGKAITKNKMRTVARTIRKGMDRYQLRREALKKVVREHGMLPDEALIKLPLLELWELRARAATPGEQLSLTELGRVLLHINQKRGYKHAKADEAAEAETESKAKKEKESYVAQVKGRYQALKEKGQTIGQHFAGELRANQQTTPRGTYYTYRIKEQVYPREAYIEEYDRIMAVQRVFYPELLTDALIGRIRDRIIFYQRPLKSCKQLVSFCEFEKKEKVIRVKHTNKEGVEELVEKTITIGPKVAPKSSPIFQVCKVWESIHNIRLYYPDGTERELVQEEKQKLFDYLQKNDKLTLKNLYKTLGIKDKDEEEELWCDKLLEKGIAGNTTAAILRKALKGYKQYEGLLRFDLTIRDSHEADEDGVIRPIIDESYQNEPLYKFWHILYSIEDREEMRSALIGQLGIKAEDLDSGLMDALYKIDFVKQGYGNKSAKFICKLLPHLQEGKMYSEAAEAAGMRHSDSMTAQERDERSLLEEIPLLQKNALRQPVVEKVLNQMINLVNALKREHGEIDEVRVELARELKMSREEREKTTKNNNAREKENKDAAERIKEYRVTPTKSRIQKYHLWDESGGKCIYCDNPMGVEQFLKGEEIEVEHIIPRSILFDDSMSNKVCACRSCNQEKGNRFAMVYIKSLGTEQEQKYISRVEGLFHAKKISYSKRLRLLMLPENLPEDFIERHLRLTQYISREAQGILRKGIRLVSASEGGVTAKLRQLWGYDNILRDLNLERYRSMGETEVVTVEHRDGQRTDERIKDWSKRKDHRHHAVDALVVACTRQSYIQRLNRVNAEEDRQEMDAFIKEQQEQKPSKKEKLSLLEHWLIRQPHFTTKEVMKHVEEILISFRPGKRTVTRGRNVYKRSGKTDVQRDVLIPRGALSEETVYGVIHAGGKDEVVCKYALRGLKVKDVDYIVDKALQEKVRGRISQYGEKQAFAEPLYLDEAKTQEVRSVRCFTGKDQSKLVPLRYNIEGEAVGFVAPGNNHHLALYKDDDGNVVESIVTFWQAVERARYGLPIVVASPREVMEKALAIPGLPESVLKALPASNLRLMEVLRMNDMFLIGMTDEEIQVAIEAKDYSTLSRHLYRVQKLSSRYYVFRYHLETEVKDEKNTTGNIPKFYRIVSFNAYNKLNPRKVKIDLLGRILLV

SEQ ID NO: 7621 - protein, 1191 aa, synthetic construct
  REGION 1..1191: note = Synthetic
MSKHVLGLDLGVGSIGWCLIALDEQEHPAEILGMGSRIVPLTADDLNEFSQGKAISKNQKRTTQRTIRKGIDRYQLRRKVLSKKLGDHGMLPDEALMRLPVLDLWELRARAASPGEQLTLPEIGRVLYHINQKRGYKHAKSDEAEEAAKRGKETGYVAAVKGRYAELQQEGTTVGQHFALKLKKHRQESLSGGFFYNYRIKDQVYPREAYIEEYDRIMEVQANFYPEVLTPAFIQELRDQVIFFQRPLKSCKGLVSFCEFEKQERVVKLKQINREGKEELQERKITIGPKVAPKSSPIAQLCKLWESIHNIRIYYPDGKERPITLEEKKKLLAYLQTHDKLTFTALKKAIKISDREGLWCDKLLKGGVKGDTTRLILRKALAGYKKYEGLLRLDLKLRDAQVADPETGLIRSIVDESYLSEPLYRLWHILYSIEEREAMRGALIDQLGFQEEDLDEGLLDKLYQIDFVKQGYSNKSAKFICKLLPHLQEGYGYSEACERAGKRHSASSLTKEELEERPLLEHIPLLQRNALRQPIVEKILNQMINLVNALRQKHGSIDEVRVELARELKMSREEREDTSKRIRSREKENKEIAERIKEYGLYPTKSRIQKYRLWQEAGEQCLYCGKSIDVVQFLRGDGVEIEHIIPKSILYDDSSANKTCACSRCNKEKDNRTAYEYILAKGQEAEYRDRLESLFHDGKISYSKRRRLLWRKEDIPSDFIERQLRLTQYIARQAQEILRQGVRRVYASEGSVTAKLRHLWGYDRILHELNFERYQSMGETELVRQEEKDGSITETEKIKDWSKRKDHRHHAIDALVVACTRQSHIQRLNRLNSEEDSEQMLQEVQGQWRTTAEKHSLLENWLILQPHFSHQTVRAKVAEILVSFRPGKRTVSTGRNTYHRSGKNETQAGVLIPRGPLSEESLYGRILRNGEPTYVKKVALASLTAPQIEQIVDPKLRREVMARVNQSGDAAKPDLKLITATPLYSDAAGTQQVRSVRVAVENGKNSIIPLYYNDSGEAITFVKPGNNHHVAIYRTPEGELVESCVTFWQAVDRVRYGIPMIIRKPREVLDQVLQKKDVPEALLASLPDSDWEFVEHLQANEMFLIGLTDEEIQTALEQSDLLTLSNHLYRVQKLSSEDYVFRYHLETEVEDIKNKTGIIPKFYRLRGAKSYEKENPRRVKVNLLGEMSLPE

SEQ ID NO: 7622 - protein, 1190 aa, synthetic construct
  REGION 1..1190: note = Synthetic
MGKKVLGLDLGVGSIGWCLITLDKDEKPQSILGMGSRIVPLSADDATEFTQGKAITKNKMRTVARTIRKGMDRYQLRREALKKVLREHAMLPDEALIKLPLLELWELRARAATPGEQLSLTELGRVLLHINQKRGYKHAKADEAAEAETNKGKETGYVAQVKGRYQILKEKGQTIGQHFAGELRANQQTAPRGVYYTYRIKEQVYPREAYIEEYDRIMAAQRVFYPELLTDALIGRIRDRIIFYQRPLKSCKQLVSFCEFEKKEKVIRVKHTNKEGVQELVEKTITIGPKVAPKSSPIFQVCKVWESIHNIRLYHLDGTERKLEQEEKQKLFDYLQRNDKLSLTVLRKELKIKPKDKLWCDKLLVNGIGGNTTATILRKALKGYEQYEGLLRFNLTTRDSHEVDEDGVIRPIIDESYQNEPLYKLWHILYSIEDRAEMRSALIGQLGIKAEDLDNGLMDALYKIDFVKQGYGNKSAKFICKLLPHLQEGKMYSEAAEAAGMRHSDSMTAQERDERNLLEEIPLLQKNALRQPVVEKVLNQMINLVNALKREHGEIDEVRVELARELKMSREEREKATKNNSSREKENKAIAERITEYGLTPTKSRIQKYRLWQESAESCIYCGKRVDVVQFLRGEETEVEHIIPKSILFDDSLSNKACACRSCNQEKGNRFAMEYIQAKGWEQDYIKRVDSLFHDKKISYSKRQRLLMLPKDLPEDFIERHLRLSQYIAREAQGILRKGIRLVSASEGGVTAKLRQLWGYDNILRDLNLERYRSMGETEVVTVEHRDGQRTDERIKDWSKRKDHRHHAVDALIVACTRQSYIQRLNRVNAEADRQEMDAFIKEQQEQKPSKKEKLSLLEHWLIRQPHFTTKEVMKHVEEILISFRPGKRTVTRGRNVYKRSGKTDVQRGVLIPRGALSEETIYGTIQLHRKDRSGTELVRSYVKRIPLSKVNPSNVKNIVDSQIREVVQAALLSLSGRKGVLPTELYLDDSRRRVVRSVRCLVRSSTLIPIRFNADGEAVGFTKPGGNHHVALYRDGVGNIRESVVPFFRAVERARYGIPMIISDPSKAREQARANPNLPESVLLSLPEEDWQLEEILQGDEMFLLGMTDEAIDRAMETKDYTTLGRHLYRVQNLAAGDYVFRYHLETTLDGKDNVGDIPSSYRIASQKRYQELNPRKVKIDLLGRISLA

SEQ ID NO: 7623 - protein, 1173 aa, synthetic construct
  REGION 1..1173: note = Synthetic
MKKVLGLDLGVGSIGWSLIALDEDERPAEILGMGCRIVPLSTEESKFASGEGISKNAERTQMRTMRKMLDRYQQRRTKLANILREHQMYPDEALMQLPLMQLWQLRADAATPGRQLSLPELGRVLYHLSHKRGYRHSKSDESGEKKDTEYVAEVKSRYQQIQEEGLTVGQHFAKQLKDQEQRSERGGVYYNYRTKDQVFPREAYAEEFDRIMSVQRGFHPSLTDRLIAKLRDCIFYQRPLKSCKHLVSYCEFERKQVECSVKQVERDGTISYRTQLVDVGPKVAPKSSPLAEVCRIWETLNNLRLYFPDGSERPITQEERQRLFDYLQENDTLSFTQTKKLLKIKPKDQVWCNDLLTSKVKGNRTIAPLLKAFADYPQYLELLTFELSEEEKVDHETGELRPVISERYHQEPLYKLWHILYSIEDKEAMRRALTKQLGISEADLDAGLLNQLFKVDFVKQGYANKSIKFISKLLPHLMQGHMYSEAAKLAGKRHSDSPDSDELQNRPLLDKIPVLQRNSLRQPVVEKILNQMINLVNQLKVDYGEIDEVRVELARELKMSREERERTAKNQRRNEKENKQIAERIAELGLYPTRARIQKYKLWEESQERCMYCGQMMNLSHFLSGNDVEVEHIIPRSILYDDSLSNKTCACRRCNQEKGNRTAKEYILSKDQATQEAYNARVQELFELHKISAAKRSRLHMTLSDIPEDFIERHLRLTQYISREAQSILAKGIRYVRASEGTVTATLRRLWGYDEILKRLNFEIYKSRGETETVSVGGVATERLANWSKRNDHRHHALDALVVACTRQGYIQRLNRLNTEEDKQSMRDELPAQEEQRGERLQLLERWLIAQPHFAPHIVQGKVAEILVSLHPGGKTYSRGRNIIKRKGQRFVQEGILVPRGALSAETVYGSIQQGDHREIVCKYALHAITGKDTPHIVDQRLRSIIAQRLAEYGGDPKKAFAEPLYSDRAKTQQVRSVRCFTGLLKEKLAPLHRDAEGQVTAFVSPSNNHHVALYRDAAGQLQECISSFWQVIERVRFGLPPIIYDPRATMEQALSIAELPESVLKVLPPSDWRRLEVTLRRNDLFLLGMSDEEIAAALEAQNYSLLSRHLYRVQKLATKNYWFRHHLETSVTDKTNSSGDTPKFYCVTSIKTYVRLNPRKVKVDRLGKISLL

SEQ ID NO: 7624 - protein, 1009 aa, synthetic construct
  REGION 1..1009: note = Synthetic
LRIIREAYIEEYDRIMAVQRVFYPELLTDALIGRIRDRIIFYQRPLKSCKQLVSFCEFEKKEKVIRVKHTNKEGVQELVEKTITIGPKVAPKSSPIFQVCKVWESIHNIRLYHPDGTERKLEQEEKQKLFDYLQRNDKLSLTTLRKELKIKPKDKLWCDKLLEKGIAGNTTAAILRKAFKGYEHYERLFRFDLVRRDSHEADEDGVIRPIIDESYQNEPLYKLWHILYSIEDRAEMRSALIGQLGIKAEDLDNGLMDALYKIDFVKQGYGNKSAKFICKLLPHLQEGKMYSEAAEAAGMRHSDSMTAQERDERNLLEEIPLLQKNALRQPVVEKVLNQMINLVNALKREHGEIDEVRVELARELKMSREEREKATKNNSSREKENKAIAERITEYGLTPTKSRIQKYRLWQESAESCIYCGKRVDVVQFLRGEETEVEHIIPKSILFDDSLSNKACACRSCNQEKGNRFAMEYIQAKGWEQDYIERVDSLFHDKKISYSKRQHLLMLPKDLPEDFIERHLRLSQYISREAQGILRKGIRLVSASEGGVTAKLRQLWGYDNILRDLNLERYKSMGETEVVTVEHRDGQRTDERIKDWSKRKDHRHHAIDALVVACTRQSYIQRLNRVNAEADRQEMDAFIKEQQQEHKLSKKEKLSLLENWLKEQPHFTTGEVKEHAEGILISFRPGKRTVSRGRNIYKRSGKTDVQRNVLIPRGALSEETVYGVISVDGENKVVCKYPLQKFLDTKETNVDKIADQAAEKIVDKVLREKIRERIKRYGKKEAFAEPLYLDEAQTQVVRSVRCFISKDQAKLIPLRYNDESEAVGFVAPGNNHHLALYRDASGKMRASVVSFFAAVERARYGIPMIVLNPRETREKARIIPDLPESIFSKLPEEDWVLEETLQEGEMVLLGMENDAIEEAIKKKDYSKLSRYLYRVQSLSYNDYKFCFHLETESEKKEKKKGEDKKRGEKAKNTAVMPPKRYRIRCLATYQEDLNPRKVKIDLLGRISLA

SEQ ID NO: 7625 - protein, 946 aa, synthetic construct
  REGION 1..946: note = Synthetic
MQRPLKSCKHLVSLCEFEKQEKVMRVQQDDGKGGRQLVGRKVKFGPKVAPKSSPLFQLCRIYEAVNNIRLTRPDGSPRDITLEERAKIVAHLQSSASLSFAALKKLLKEKALIADQLTSKSGLKGNSTRVALAAALQTYSQYHHLLDMELETRMMTVQLTDEETGEVTVREVAVVTDSYVHQPLYRLWHILYSIEERDAMRRALITQLGMKEEDLDGGLLDQLYRLDFVKPGYGNKSAKFICKLLPQLQQGLGYSEACTAVGYRHSNSPTSEEITERILLEKIPLLQRNELRQPLVEKILNQMINLVNALKAEYGVDEVRVELARELKMSREERERMARNNKDREERNKEVAAKIRECGLYPTKSRIRKYMLWEEAGRQCLYCGRSIEEEQCLNGDDMEVEHIIPKSVLYDDSYGNKTCACHECNQTKGNRTALEYIRAEGREAEYMKRINDLLKEKKISYSKHQRLRWLKEDIPSDFLERQLRLTQYISRQAMAILQQGIRRVSASEGGVTARLRSLWGYGKILHTLNLDRYDSMGETERVSREGEATEELHITNWSKRMDHRHHAIDALVVACTRQSYIQRLNRLSSEFGRGNKKMEDLEAQEQQAKETGRFSNLERWLTQRPHFSVRTVSDKVAEILISYRPGKRVVTRGRNIYRKKTADGREVTCVQRGVLVPRGELMEASLYGKILSQGRERIVKRYPLHDLKGEVVDPRLRELIAEYNQEITSKVKAKGAPLYLDAAEKQEVRSVRCYVTQPSVAKAIPIRFDERGRAITFVKSGNNHHLALYRTPQGKLEESIVTFWDAVDRARYGIPLVITHPREVMEQVLQRGDIPESVLRLLPPSDWVFVDSLQPDEMVIIGLSDEELQQALEVQGYRKLSEHLYRVQKVSSRDYWFRYHLETSVADDKNTSGRIPKFHRVRSLSDYEKRNIRKVRVDLLGRISLL

SEQ ID NO: 7626 - protein, 827 aa, synthetic construct
  REGION 1..827: note = Synthetic
MTRALLRKALAGYKRYEPLLRMDLKLRDSQEVDPETGLIRPIVDESYLSQPLYRLWHILYSIEEREAMRRALIDQLGFLEEDLDGGLLDKLYQIDFAKQGYSNKSAKFICKLLPHLQEDHGYSEACELAGKRHSASSLTKEELEERPLLEHIPLLQRNELRQPIVAKILNQMINLVNALRQKYGSIDEVRVELARELKMSREEREETSRRIRARERENKEIAERIKEYELYPTKSRIQKYRLWQEAGEQCLYCGRSIDVVQFLRGDGVEIEHIIPKSILYDDSSANKTCACSRCNKDKGNRTAYEYILAEGREAEYLDRLETLFHDGKLSYSKRRRLQWKKADIPADFIERQLRLTQYIARQAQEILRQGIRRVGASEGSVTAKLRHLWGYDDILRELNFERYQSMGETEIVSQEEKDGSITKSERIKDWSKRKDHRHHAIDALVVACTRQGYIQRLNSLNSEEDSLQMQEDSKQVREKMGGQRRPTADKHSILENWLILQPHFSHQDVKSKVAEILVSFRPGKRTVSTGRNTYLRSGKKVTQSGVLIPRGPLSEESLYGQILRNGEPTYVKKVALESLSEAQIEQIVDLKLRREMIAHAQPSDGAKLDPKLLLATPFYSDAAGAQRVRSVRVAIENGKNSIVPLRYNESGKAITFVKPGNNHHVAIYRTPKGKLVDLCVTFWEAVDRVRYGIPTIVRKPREVLDQLLLRDDIPEALLANLPASDWEFVEYLQVNEMFLIGLTNEEIQTALAESDLLTLSNHLYRVQKMSSEYYVFRYHLETEVADNKNNTGIIPKFYRLQGLNATYQKANPRRVKVNLLGEITLPK

SEQ ID NO: 7627 - protein, 816 aa, synthetic construct
  REGION 1..816: note = Synthetic
MELETRPMKVQTTDEATGEITEYEVAVLTDSYTRQPLYRLWHILYSIEERDAMRKALITQLGMSEEDLDGGLLDQLYRLDFVKPGYGNKSAKFMCKLLPQLQQGLGYSEACAAVGYRHSVSLTREEIAERILLPQIPLLQRNELRQPMVEKILNQMINLVNTLQAEYGIDEVRIELARELKMSREERERISRSNGTRKTKNDAVAKYIQEYGFYPTKSLIRKFLLWEEAEHRCMYCGKEISQIECLTVGEMEVEHIIPKSILYDDSFGNKTCACRQCNKEKGNLTAREYIQSKGWEADYLKRLKDLQQKKQISYSKYQRLLWLKKDIPTDFLERQLRLTQYISRQAMSILQQGIRRVAASEGGVTARLRSLWGYDDILHSLNLDRYESMGETELVPKHPNSEEDDSMKCRITDWSKRKDHRHHAIDALVVACTRQGYIQRLNRLSSEADREEMRHETELRKEPTADKLSLLERWLSQRPHFSVQDVSDKVAEILISYPKPKRTHTWGRNRYKKKTADGKEKTCIQTRVLVPRGELMEASLYGKIISDGKERIVKRYPLHALKGTVVDPRLRELITQRKQGSTTEAKGAPLYLDEKKKQEVRSVRCYAAKLSTDKAIPICFDEQGKAITFVQSRNNHHVVHYLDAAGKTHPIILSIWDVIERVRYGLPTIITDYAQVPQDLELPASVRDKLPQAEWKCMDVLLRNEMFLLGLSDEEITQAITRADYTLLSKHLYQLRKISISSDKKIDYTFYYHLDAPDPKKEKKEQGDKKKEKEQSKPAKGTSLTLHKYRVQGLSTFLKLNIHKVRIDLLGRITLL

SEQ ID NO: 7628 - protein, 1192 aa, synthetic construct
  REGION 1..1192: note = Synthetic
MLMSKHVLGLDLGVGSIGWCLIALDAQGDPAEILGMGSRVVPLNNATDAADFSIGKAFTANQERTARRTMRRGFARYQLRRYRLRRELEKVGMLPDAALIQLPLMELWELRERAATAGERLTLPELGRVLCHINQKRGYRHVKSDAAAIVGDEGEKKKDSNSAYLAGIRANDEKLQDEHKTVGQYFAEQLRQNQSESPTGGISYRIKDQIFSRQRYIDEYDQIMAAQRVYYPDILTDAFIRMLRDEVIFMQRPLKSCKHLVSLCEFEKQEKVMRIQQDDGKGGRQLVERKVKFGPKVAPKSSPLFQLCRIYEAVNNIRLTRPDGSPRDITPEERTKIVAHLQSSASLSFAALKKLLKEKALIADQLTSKSGLKGNSTRVALAAALQPYSQYHHLLDMELETRMMTVQLTDEETGEVTEREVAVVTDSYVRQPLYRLWHILYSIEERDAMRRALITQLGMKEEDLDGGLLDQLYRLDFVKPGYGNKSAKFICKLLPQLQQGLGYSEACAAVGYRHSNTPTSEEITERTLLEKIPLLQRNELRQPLVEKILNQMINLVNALKAEHGVDEVRVELARELKMSREERERMAEGNRRREKENKAIAEKIRECGLFPTKSRIRKYMLWEEAGEKCLYCGQILTLSQCLNGDDMEVEHIIPKSVLYDDSYGNKTCACRRCNKEKGNRTALEYIRAKGWEAEYMERINGLLDKKAISYSKHQRLRWLKEDIPSDFLERQLRLTQYISRQAMAILLQGIRRVSASEGGVTARLRSLWGYDDILHTLNLDRYDSMGETERVSREGETTEKLRITNWSKRMDHRHHAIDALVVASTRQGYIQRLNRVSSESEREAMSGEIEMQKVTKTDKLSLLERWLTQRPHLSVRAVSDKVAEILISYRPGKRVVTRGRNIYLRHGKKCVQSGLLVPRGPLSKETVYGQITVNGEPQIVCKYDLHSLKAKDVDYVVDLALRKRLKELLAQHGGKEKEAFAGDVYMDEAGTQGPIRSVRCFTGLDRAKMKAVKYDEQGKAVGFVATQNNHHLAIYRTPKGKLVESIVTFWDAVDRARYGIPLVITHPREVMEQVLQRGDVPESVLSLLPPSDWVFVDSLQQDEMVIIGLSDEELQRALEAQDYRKLSEHLYRVQAISLGDSLYRYHLETSVADRKNGSGRIPKFYRVTGLKTYKEKNIRKVRVDLLGRISLL

SEQ ID NO: 7629 - protein, 1180 aa, synthetic construct
  REGION 1..1180: note = Synthetic
MKTKKILGLDLGVSSIGWSLIALNEKEEPAEILSMGSRIVPLSTEDADEFQKGAAISKNSRRTLLRTMRKGINRYQQRRTRLTRILQSQGMLPTQELIQLPTLELWELRAKAATAGEKLTLAEIGRVLYHLNQKRGYKHAKGDSNPDEDGKGKKETDYVAAVKGRYHELRESNLTIGQHFAQALKSSEQIGEHGPVYTYRIKDQVYPREAYIEEFDQIMEVQSAFYPEKLNKSLIQELRSTIYLQRPLKSCKGLVSYCEFEKKQRLVKVRLAGKEGEEIIKEQLVDIGPKVAPKSSPLAEVCRIWETLNNIRIYFPDGSDRPISIEERQRLFEELQTTEKLSFSRVKTLLKIKKQEETWTNDLLKGGIKGNTTCQTLRKAFVDYPHYTELLAFDLSEKEGNADPDTGELRLVIDERYQQTPLFKLWHILYSIEDREAMGRALEQQLGITRKDLDAGLLDKLFQIDFTKQGYTNKSSKFICKILPYLQKGSMYSEACELAGKRHSAASLTTEEIDERPLLDMIPILPRNALRQPIVEKILNQMINLVNELRKQHGEIEEVRIELARELKMSREERAQATKNINKNKKENEQIAKLIEEHQLYPTRSRIQKYKMWKETNEQCIYCGKQVNLVTFLRGEEVEVEHIIPRSVLYDDSLSNKTCSCRTCNHDKGNRTAMEYIQTLDTDRQDEYFKRVQKLFEEKKISYAKRSRLLMTTEDIPQDFIERHLRLSQYIAREAQHILRQGIRRVYASEGSVTATLRHLWGYDEILKDLNFDRYKSMGETEVIEVGGKLIEQIKDWTKRRDHRHHAIDALIVACTRQSYIQRLNRINSAEDRDEMNDAVKGKKYKEKQLLLERWLIAQPHLSTQQVKDKVSQILISFRPGKRTYSRGKNKFKQHGKTLTQLGILIPRGALSEETVYGQILDGKGVEQIVVKYPLHSIQTKDLPYVVDLGLRRLLEERLTQYRDDPKKAFAEPLYSDRDKTQQIRSVRCFTGREREKMIPLRFDEQGKPISFVAPGSNHHVALYRDSEGKAHESIVTFWHAIERLRYGLPIIIKDPTEAMKQAQSIPDLPEAIHQKLPNPDWKLIETLSSNEMFLIGMTDEEIQQAISLQDYSTLSKHLYRVQKLTSNDYYFRYHLETMLAPQNNPGTTPKYYRVTSFKRYTKLNPRKVRINILGQITLI

SEQ ID NO: 7630 - protein, 1199 aa, synthetic construct
  REGION 1..1199: note = Synthetic
MARKVLGLDLGVGSIGWCLITLDKDEKPQSILGMGSRIVPLSTDDATEFTQGKAITKNKMRTVARTIRKGMDRYQLRREALKKVLREHGMLPDESLIKLPLLELWELRARAATRGEQLSLTELGRVLLHINQKRGYKHAKADEAAEAEAEGKSKKEKEGYVAQVKGRYQALKEKGQTIGQHFAEELRANQQTAPRGGVYYTYRIKEQVYPREAYLEEYDRIMAVQREFYPEILTDELIRRIRDRIIFYQRPLKSCKQLVSTCEFEKKERVVQVKRINKDGVEELVERTITIGPKVAPKSSPIFQVCKVWESIQNIRLFYPDGTERVLEQEEKQKLFDYLQKNDKLSLTALRKVLKIKPKEKLWCDKLLEKGIAGNTTAAILRKALKGYEQYEGLLRFDLTIRDGHKADEDGVIRPIVDESYQNEPLYKLWHILYSIEDRADMYRALVGQLGIKREDLDNGLMDALYKIDFVKQGYGNKSAKFICKLLPHLQEGKMYSEAAEAAGVRHSDSMTAQERDERSLLEEIPLLQKNALRQPVVEKILNQMINLVNALKREHGEIDEVRVELARELKMSREEREEATKSNNAREKENKDIAEDIHLKGEGLTPTKSRIQKYRLWKESAESCIYCGKHVDLVQFLRGEEIEVEHIIPRSILFDDSMSNKVCACRTCNQEKGNRFAMEYIQSKGWKQSYIERVDSLFQGRKISYSKRQRLLMLPKDLPEDFIERHLRLSQYISREAQGILRKGIRLVSASEGSVTAKLRQLWGYDNILRDLNLDRYRSMGETEVVTVEHRDGERTDERIKDWSKRKDHRHHAIDALVVACTRQSYIQRLNRVNAEADREEMDAFIREQQQKPTHSRGEKLSLLEHWLIRQPHFTTGEVKGQVDKILVSLRPGKRTISRGRNIYKRSGKTDVQRGVLIPRGALSEETIYGVIRVDGEDKVVCKYPLQSLKLKDVEYIVDEVLREKVRERIEQRGEKEAFAEPLYFDEAQTQEVRSVRCFTGKDQAKLIPLRYNDESEAVGFVAPGSNHHLALYRDVDGRLVESVVTFWQAISRIRYGLPAIVTHPREVMEQAFSIPDLPEEVLGALPKSRLRLMEVLRMNDMFLIGMKDEEIEAAIEGEDYPTLSRHLYRVQKLSSMSYVFRYHLETEVKDEKKAGGKDEKEEEVKIPKFYRVQSMKAYVKLNPRKVKIDLLGRISLA

SEQ ID NO: 7631 - protein, 974 aa, synthetic construct
  REGION 1..974: note = Synthetic
MAVQREFYPEILTDELIQRIRDRIIFYQRPLKSCKQLVSFCEFEKKERVVQVKRINKDGVEELVERTITIGPKVAPKSSPIFQVCKVWESIQNIRLYYPDGTERVLEQEEKQKLFEYLQKNDKLSLTALRKVLKIKPKDKLWCDKLLEKGIAGNTTAAILRKALKGYEQYEGLLRFDLTIRDGHKADEDGVIRPIIDESYQNEPLYKLWHILYSIEDRADMYRALVGQLEIKEADLDDGLMDVLYKIDFVKQGYGNKSAKFICKLLPHLQEGKMYSEAAEAAGVRHSDSMTAQERDERSLLEEIPLLQKNALRQPVVEKILNQMINLVNALKREHGEIDEVRVELARELKMSREEREETTKSNNAREKENKTKAERIAEYGLTPTKSRIQKYRLWEESAESCIYCGKHVDVVQFLRGEEIEVEHIIPRSILFDDSMSNKVCACRSCNQEKGNRFAMEYIQSKGWEQSYIERVNSLFHDKKISYSKRQRLLMLPKDLPEDFIERHLRLSQYISREAQGILRKGIRLVSASEGSVTAKLRQLWGYDNILRDLNLERYRSMGETEKVKVEHRDGERTDERIKDWSKRKDHRHHAIDALVVACTRQSYIQRLNRVNAEADREEMDVFIKEQQQKPTHSKGEKLSLLENWLIRQPHFTTKEVMKHAEEILISFRPGKRTVTRGRNVYKRSGKTDVQRNVLIPRGALSEETIYGTIQLHRKDRSGTELVRSYVKRIPLSKVNQSNVKNIVDSQIREVAQAALLSLSGRKGVLPTELYLDDSRRRVVRSVRCLVRSNTLIPIRFNADGEAIGFTKPGLNHHVALYRDGVGNIRESVVPFFRAVERARYGIPMIISDPSKAREQARANPNLPESVLLSLPEEDWQLEEFLQGDEMFLLGMTDEAIDRAMETKDYTTLGRHLYRVQSLAAGDYMFRYHLETTLDGKDNVGSIPKSYRIQGLKTYRKLNPRKVKIDLLGRISLA

SEQ ID NO: 7632 - protein, 1187 aa, synthetic construct
  REGION 1..1187: note = Synthetic
MNKKVLGLDLGVSSIGWSLITLDERGHPAEILGMGSRIVPLTSDNKKKGSYFTDFENGEAATKNQYRTMKRSARRGLDRYQQRRAKLSRLLSEFGLGFPRPLMSLSPLALWGLRADAATEGKVISLAELGRVLYHLNQKRGYRHSKFDESSKQDTKYVAAVKTRYAELRNESLTIGQYMYRYLSSSAEERADALSCVHYRVKDQVYPREAYMEEFDRIMAVQQKAYPEVLTSVVLQKLRDCIFFQRPLKSCKHLVSYCEFERKTREVQIPVVGADGTTSYKTKIVDIGPKVAPVSSPLAEVCRLWESINNIRIYYPDGAVYPLSLEHKQAFFNKLQESESLKFSDAKKIIGAKAKDKLWCNDLLKSGIKGNRTTATLRKLIEDYPQYKALLRFDLKQEDSCRVDLSTGEVLPLISVSYLNEPLYKFWHILYSVAEREAMGNALRKQLGVEQGDLDKGLLDACMKIDFTKQGYCNKSAKFMCKLLPYLQQGYMYSEAADLAGYKHSDSKTKEELEHRELKPRIELLPKNSLRQPIVEKVLNQMINLVNALKDKYGEIDEVRVELARELKMGREERKKYSNRNSKNEKDNKRVAKEISKFCTPTKNRIQKYKLWEEANHACIYCGKEITKPSLFSDGEAEIEHIIPRSVLYDDSMSNKTCACRSCNKAKNNRAAMDWVLTQTEEFQNEYFKRLEELAKKSLSNGKRQRLMTLLKDIPEDFIERHLRLTQYISRKATEILKDSIRYVWSSEGSVTSTLRHLWGYDKILEDLNFERYKSMGETHTVLVKRGSAEQEVERIKEWNKRKDHRHHAIDALVVACTRQSYIQRLNRLSSEEDRQSMQSELGSSYSPSKEERMQLLDKWLTAQPHFSAQAVRDYVRGILVSFRPDRRTYTKSRNKVKIKGRVSLQTGILTPRGALSEETIYGAIHVDGGKEIVCKCRLENLQTKDVPNIVDKGIQRIIKARLEAYNNDAMKAFAEPLYSDAAQTKQIRSVRCFSRCVYKNMIPLRRNDAGEEIAFVNSGSNHHVAFYRDSKGRLQKAVVSFYQAIERAKYQLPMIIKDSRAVVEEALERNVPDSVLSALPHSSWTFVESLQKNEMFLIGLSDDEIARAIKEADRATLNDHLYRVQTISDRDYRFRFHLEVKQNKESDKINGKFIPKFYRVRSLKTYLELNPRKVRVDLLGNLSLLE

SEQ ID NO: 7633 - protein, 1203 aa, synthetic construct
  REGION 1..1203: note = Synthetic
MTKKVLGLDLGVGSIGWCLITLDKDEKPQSILGMGSRIVPLSTDDATEFTQGKAITKNKMRTVARTIRKGMDRYQLRREALKKVLSEHGMLPDESLIKLPLLELWELRARAATPGKQLSLTELGRVLLHINQKRGYKHAKADEAAEAEAEGKSKKEKEGYVAQVKGRYQALREKGQTIGQHFAEELRANKQTASRGVYYTYRIKEQVYPREAYIEEYDRIMAVQRVFYPKVLTDELIQRIRDRIIFYQRPLKSCKQLVSTCEFEKKERVVQVKRINKDGVEELVERTITIGPKVAPKSSPIFQVCKVWESIQNIRLYYPDGTERKLEQEEKQKLFDYLQKNDKLSLTALRKVLKIKPKEKLWCDKLLDKGIAGNTTTAILRKAFKGYEHYEHDKDHNPFQFDLVRRDSHEVDEDGVIRPIVDESYQNEPLYKLWHILYSIEDKDDMRRALVGQLGIKEEDLNNGLMDALYKIDFVKQGYGNKSAKFICKLLPHLQEGKMYSEAAEAAGVRHSDSMTAQERDERSLLEEIPLLQKNALRQPVVEKILNQMINLVNALKREHGEIDEVRVELARELKMSREEREEATKSNNAREKENKAIAERIKEYDITPTKSRIQKYRLWQESAESCIYCGKRVCVVQFLRGEEIEVEHIIPKSILFDDSMSNKACACRSCNQEKGNRFAMEYIQSKGWEQDYIKRVDSLFHDKKISYSKRQRLLMQPKDLPEDFIERHLRLSQYISREAQGILRKGIRLVSASEGSVTAKLRQLWGYDNILRDLNLERYRSMGETEKVKVEHRDGERTDERIKDWSKRKDHRHHAIDALVVACTRQSYIQRLNRVNAEADREEMDAFIKEQQQQKPTHSKGEKLSLLENWLIKQRPFATEDPTKDPTEEVKKHVKKILISFRPGKRTISRGRNIYKRSGKTDVQRERVLIPRGALSEETIYGVIRVNGEDEVVCKYPLQSLKAKDVVSIVDEVLREKVRERITQHGEKEAFAKPLYLDEAQTQEVRSVRCFTGKDQAKLIPLRYNDESEAVGFVAPGSNHHLALYQDERGTLVESVVTFWQAISRIRYRLPAIVTHPREVIEQALSIPELPEEVLGALPKSRLRLMEVLRINDMFLIGMKDGEIQAAIEGEDYPTLSRHLYRVQKLSSMSYVFRYHLETEVKDEKNTSGEIPKFYRIKSLGRYQELNPRKVKIDLLGRISLA

SEQ ID NO: 7634 - protein, 1220 aa, synthetic construct
  REGION 1..1220: note = Synthetic
MQKVLGLDLGVGSIGWSLIALDEDEHPAEILGMGCRIVPLTKEENKFASGGGISENAKRTQMRTMRKMLDRYQQRRTKLANILREHQMYPDEALMQLPLMQLWQLRADAATPGRQLSLPELGRVLYHLSQKRGYRHSKSDESGEKKDTEYVAKVKSRYQQIQEEGLTVGQHFAKLLKDNKQHSERGGVYYNYRTKDQVFPREAYAEEFDRIMAVQRGFHPSLTDRLIAKLRDCIFYQRPLKSCKHLVSYCEFERKQVELAVKQVERDGTITYKKQLVDVGPKVAPKSSPLAEVCRIWETLNNLRLYFPDGSERTITQEERQRLFDYLQENDALSLAQTKKILKCKDEDLFSNILLEKKKKEKPTEKKKKGGNEEDLSFSALPEEEQAKMEAETAKDREEKGNPEVKIKGNTTTATLRKAFKGYKQYLELLSFELSEEEKADPETGELRPVISERHQQEPLYKLWHILYSIEDKEAMRRALTRQLGISEADLDAGLLDQLFKVDFVKQGYANKSIKFISKLLPHLMQEQTYSEAAKRAGKRHSESLTADELQQRPLLDKIPVLQRNSLRQPVVEKILNQMINLVNQLKADYGEIDEVRVELARELKMSREERKRTTSNQRKNEEENQRIATLITKDYGLHPTKTRIQKYKLWKETEGHCMYCGEAVDIKQFLLGSEVEVEHIIPRSILYDDSLSNKTCACRKCNSEKKNRTAKEYILSKNEETQKKYNARVQELFERHKISSAKRSRLHMTLADIPEDFLERHMRLTQYISREAHSILTKGIRCVEASSGGITATLRRLWGYDKILKELNFEIYKSRGETETILIEGVPTERIANWSKRNDHRHHALDALVVACTDRKYIQRLNHQNSEADSDSMHDELQETGGKHTDQKQLLDRWLRVQPHFAPHVVQAKIAEILISLQPEEKTYSRGRNIIKRKGERFVQEGILVPRGELWEATLYGSIQQKGLQRFVYKCSLQKLKEANLKSIVDQRLRGIIAQRLAEHGNDPKKAFAEPLYSDQAQTQQVRSVRCFAKFRSGTLVPLRHDAQGKAKAFIAPGNNHHVAFYTDSKGQLREYVNSFCQVIERVRFGLPPIIYNPRATMEQALTIAELPESVLKALPPSDWSLKEFIRKGDSILLGMSDEEIAAALEAKDYSLLSLHLYCVRSASRGDYWFRHHLETNDEKKKNAVGNVPKFYRKRSPGSYTELNPRKVKIDRLGRISLL

SEQ ID NO: 7635 - protein, 1210 aa, synthetic construct
  REGION 1..1210: note = Synthetic
MGKKVLGLDLGVGSIGWCLITLDKDEKPQSILGMGSRIVPLSADDATEFTQGKAITKNKMRTVARTIRKGMDRYQLRREALKKVLREHGMLPDEALIKLPLLELWELRARAATPGEQLSLTELGRVLLHINQKRGYKHAKADEAAEAETNKGKETGYVAQVKGRYQILKEKGQTIGQHFAGELRANQQTAPRGVYYTYRIKEQVYPREAYIEEYDRIMAAQRVFYPELLTDALIGRIRDRIIFYQRPLKSCKQLVSFCEFEKKEKVIRVKHTNKEGVEELVEKTITIGPKVAPKSSPIFQVCKVWESIQNIRLYYPDGTERVLEQEEKQKLFDYLQENDKLSLTVLRKELKIKPKDKLWCDKLLVNGIAGNTTAAILRKVLKGYEQYEGLLRFNLTTRDSHEVDEDGVIRPIIDESYQNEPLYKLWHILYSIEDREEMRSALIGQLGIKAEDLDSGLMDALYKIDFVKQGYGNKSAKFICKLLPHLQEGKMYSEAAEAAGIRHSDSMTAQERDERSLLEEIPLLQKNALRQPVVEKILNQMINLVNALKREHGEIDEVRVELARELKMSREEREKTTKNNSSREKENKAIAEKIKEYSITPTKSRIQKYRLWQESAESCIYCGRRVDVVQFLRGEETEVEHIIPRSILFDDSMSNKVCACRSCNQEKGNRFAMEYIQSKGWEQDYIERVDSLFHDKKISYSKRQRLLMLPKDLPEDFIERHLRLSQYIAREAQGILRKGIRLVSASEGGVTAKLRQLWGYDNILRDLNLERYRSMGETEVVTVEHRDGQRTDERIKDWSKRKDHRHHAVDALIVACTRQSYIQRLNRVNAEADRQEMDTFIKEQQQEQKPSKKEKLSLLEHWLIRQPHFTTKEVMKHVEEILISFRPGKRTVTRGRNVYKRSGKTDVQRDVLIPRGALSEETIYGVISVDGEDKVVCKYPLQKFLDTKETNVDKIADQAAEKIVDKVLREKIRERIKRYGKKEAFAEALYLDEAQTQVVRSVRCFISKDQAKLIPLRYNDESEAVGFVAPGNNHHLALYRDTSGKMRASVVSFFAAVERARYGIPMIVLNPRETREKARIIPDLPESVFSKLPEEDWVLEETLQEGEMVLLGMENDAIEEAIEKKDYAKLSRYLYRVQSLSYNDYKFCFHLETEPEKKEKKEGEDKKRGEKAKNTAVITPKRYRIRCLATYQDLNPRKVKIDLLGRISLA

SEQ ID NO: 7636 - protein, 1216 aa, synthetic construct
  REGION 1..1216: note = Synthetic
MLMSKHVLGLDLGVGSIGWCLIALDEQGDPAEILGMGSRVVPLTNLGDDKAFSKGEAFTANQKRTARRTMRRGFARYQLRRYRLRRELEKVGMLPDAALIQLPLLELWELRERAATAGEHLTLPELGRVLCHINQKRGYRHVKSDAAAIVGDEGEKKKDSNSAYLAGIRANDEKLQDEHKTVGQYFAEQLRQNQSESPTGGISYRIKDQIFSRQRYIDEYDQIMAAQRVHYPDILTDAFIRMLRDEVIFMQRPLKSCKHLVSLCEFEKQEKVMRVQQDDGKGGRQLVERKVKFGPKVAPKSSPLFQLCRIYEAVNNIRLTRPDGSPRDITPEERDKLVAYLQTYEAPKPPKRKPAKAKPVKLAHPKLDLDKLKELLCIEEELFADKLLEEGLKGDATRIALSIILQPYPQYHHLLDMELETRMMTVQLTDEETGEVTEREVAVVTDSYVRQPLYRLWHILYSIEERDAMRRALITQLGMKEEDLDGGLLDQLYRLDFVKPGYGNKSAKFICKLLPQLQQGLGYSEACVAVGYRHSNSPTSEEITERTLLEKIPLLQRNELRQPLVEKILNQMINLVNALKAEYGIDEVRVELARELKMSRKERERMARNNKDREERNKEVAAKIRECGLYPTKPRIQKYMLWEEAGKVCLYCGRSIEEEQCLNGDDMEVEHIIPKSVLYDDSYGNKTCACHECNQTKGNRTALEYIRAKGWEAEYMKRINDLLKEKKISYSKHQRLRWLKEDIPSDFLERQLRLTQYISRQAMAILQQGIRRVSASEGGVTARLRSLWGYGKILHTLNLDRYDSMGETERVSREGETTEELHITNWSKRMDHRHHAIDALVVACTRQSYIQRLNRLSSEFGREDKKKEDQEAQEQQATETGRLSNLERWLTQRPHFSVRTVSDKVAEILISYRPGMRVVTRGRNIYRKKTVDGREVTCVQRGVLVPRGELMEASLYGKILFQGRERIVKRYPLHDLKGEVVDPCLRELIVKSKGAPLYLDAAEKQEVRSVRCYVTQPSVAKAIPIRFDERGRAITFVQSGSNHHLAIYRTPKGKLVESIVSFWDAVNRARYGLPLIIKYPRKAMEQVIQREDIPESVLSLLPPADYEFVEVFQQNEMAVVGLPEEEFRRAVDTQDYRTLSEHLYRLKRISSKDYEFHYHLDTDDPDETDSSKKKKKRVRNTSGRIPRIYRIRGIGPLQKKNVRKVRVDLLGRISLL

SEQ ID NO: 7637 - protein, 1193 aa, synthetic construct
  REGION 1..1193: note = Synthetic
MLMSKHVLGLDLGVGSIGWCLIALDAQGDPAEILGMGSRVVPLNNATKAIEAFNAGAAFTANQERTARRTMRRGFARYQLRRYRLRRELEKVGMLPDAALIQLPLLELWELRERAATAGERLTLPELGRVLCHINQKRGYRHVKSDAAAIVGDEGEKKKKDSNSAYLAGIRANDEKLRDEHKTVGQYFAEQLRKDQSESPTGGISYRIKDQIFSRQRYIDEYDQIMAAQRVYYPDILTDEFIRMLRDEVIFMQRPLKSCKHLVSLCEFEKQEKVMRVQQDDGKGGRQLVERRVKFGPKVAPKSSPLFQLCRIYEAVNNIRLIRPDGSPRDITPEERAKIVAHLQSSASLSFAVLKKLLKEKALIADQLTSKSGLKGNSTRVALAAALQPYPQYHHLLDMELETRMMTVQLTDEETGEVTEREVAVVTDSYVRQPLYCLWHILYSIEERDAMRRALIMQLGMKEEDLDGGLLDQLYRLDFVKSGYGNKSAKFICKLLPQLQQGLGYSEACAAVGYRHSNSPTSEEITERTLLEKIPLLQRNELRQPLVEKILNQMINLVNALKAEYGVDEVRVELARELKMSREERERMAEGNRRREKENKAIAEKIQECGLFPTKSRIRKYMLWEEAGEKCLYCGQILTLSQCLNGDDMEVEHIIPKSVLYDDSYGNKTCACRRCNKEKGNRTALEYIRAKGWEAEYMERINGLLDKKAISYSKHQRLRWLKEDIPSDFLERQLRLTQYISRQAMAILQQGIRRVSASEGGVTARLRSLWGYDDILHTLNLDRYDSMGETECVSREGETTEKLRIKDWSKRKDHRHHAIDALIVASTRQGYIQRLNRVSSESEREAMSGEIEKQKVTKTDKLSLLERWLTQRPHFSVRTVSDKVAEILISYRPGKRVVTRGRNIYRKKTADGREVTSVQRGVLVPRGELMEASLYGKILSQGRERIVKRYPLHDLKGEVVDPRLRELITTYNQELKSREKGAPIPPLCLDKDKKQEVRFVRCYAKTLSLDKAIPMCFDEKGEPTAFVKSASNHHLALYRTPKGKLVESIVTFWDAVDRARYGIPLVIMHPREVMEQVLQQGNIPESVLRSLPPSDWVFVESLQLNEMVIIGLSDEELQRALEVQDYRKLSEHLYRVQKLSAGKYFIRYHLDTDVDEDNRSGRIPKFYQLSLDAYKKNNVRKVRVDLLGRISLL

SEQ ID NO: 7638 - protein, 1053 aa, synthetic construct
  REGION 1..1053: note = Synthetic
VGQHFAKLLKDNEQHSERGGVYYNYRTKDQVFPREAYAEEFDRIMAVQRDFHPSLTDRLIAKLRDCIFYQRPLKSCKHLVSYCEFERKQVELPVKQVERDGTITYKKHLVDVGPKVAPKSSPLAEVCRIWETLNNLRLYFPDGSERTITQEERQRLFDYLQENDALNLAQTKKILKCKDEDLFSNILLEKKKKEKPTEKKKKGGNEEALSFSALPEEEQAKKQKETSKDKEEKGNPEVKIKGNTTTATLRKALKGYKQYLELLSFELSEEEKADPETGELRPVISEHYQQEPLYKLWHILYSIEDKEAMRRALTKQLGISEADLDAGLLDQLFKVDFVKQGYANKSIKFISKLLPHLMQGQMYSEAAKRAGKRHSESLTADELQQRPLLDKIPVLQRNSLRQPVVEKILNQMINLVNQLKADYGEIDEARVELARELKMSREERERTASNQRKNETENQRIAALITKDYGLHPTKTRIQKYKLWKETEGHCMYCGEAVDIKQFLLGSEVEVEHIIPRSILYDDSLSNKTCACRKCNSEKNNRTAKEYILSKDEETQKKYNARVQELFERHKISSAKRSRLHMTLADIPEDFLERHMRLTQYISREAHSLLTKGIRCVETSSGGITATLRRLWGYDTILKELNFEIYKSRGETETILIEGVPTERIANWSKRNDHRHHALDALVVACSDKKYIQRLNYQNSEADRKSMKDELKEPEGKHADQQQLLDRWLRAQPHFAPHIVKAKVAEILISLQPEERIYSRGRNIIQRKGERFVQEGILVPRGALSKETVYGSIQQKEQQKFVYKRPLQKLGASDRESIVDQRLRGIIAQRLAEHGGDPKKAFAEPLYSDRAHTQQIRSVRCFLKKGQNTLIPLRHDAQGRAKAFIAPGNNHHVAFYTDSKGQLQEYVSSFCQVIERVRFGLPPIIYDPRATMEQALSITELPESVLKGLPPSNWVIKETLRRDEFFLIGMSDEEIASALEAQNYSLLSRHLYRVQKLSSINYVFRHHLETSVKEDKSTSGEVPMSYRVQSLTTYSNLNPRKVKVDRLGKISLL

SEQ ID NO: 7639 - protein, 1193 aa, synthetic construct
  REGION 1..1193: note = Synthetic
MLMSKHVLGLDLGVGSIGWCLIALDAQGDPAEILGMGSRVVPLNNATKTIEAFNAGAAFTASQERTARRTMRRGFARYQLRRYRLRRELEKVGMLPDAALIQLPLLELWELRERAATAGEHLTLPELGRVLCHINQKRGYRHVKSDAAAIVGDEGEKKKDSNSAYLAGIRANDEKLQDEHKTVGQYFAEQLRQNQSESPTGGISYRIKDQIFSRQRYIDEYDQIMAAQRVHYPSILTDEFIQMLRDEVIFMQRPLKSCKHLVSLCEFEKQEKVMRVQQDDGKGGRKLVERRVKFGPKVAPKSSPLFQLCRIYEAVNNIRLTRPDGSPCDIAPEECAKIVAHLQSSASLSFAALKKLLKEKALIADQLTSKSGLKGNSTRVALAAALQPYPQYHDLLNMELETRMMTVQLTDEETGEVTEREVAVVTDSYVRQPLYRLWHILYSIEERDAMRRALITQLGMKEEDLDGGLLDQLYRLDFVKPGYGNKSAKFICKLLPQLQQGLGYSEACAAVGYRHSNTPTSEEITERTLLEKIPLLRRNELRQPLVEKILNQMINLVNALKAEYGVDEVRVELARELKMSREERERMAEGNRRREKENKAIAEKIRECGLFPTKSRIRKYMLWEEAGEQCLYCGQILTLSQCLNGDDMEVEHIIPKSVLYDDSYGNKTCACRRCNKEKGNRTALEYIRAKGWEAEYMERINGLLDKKAISYSKHQRLRWLKEDIPSDFLERQLRLTQYISRQAMAILQQGIRRVSASEGGVTARLRSLWGYDDILHTLNLDRYDSMGETERVSREGETTEKLRIKDWSKRKDHRHHAIDALVVASTRQGYIQRLNRVSSESEREAMSEEIELQKVTKTDKLSLLERWLTQRPHLSVRTVSDKVAEILISYRPGKRVVTRGRNIYRKKTADGREVTCVQRGVLVPRGELMEASLYGKILSQGRERIVKRYPLHDLKGEVVDPRLRELVAVYNQEITSKVKAKGAPLYLDAAEKQEVRSVRCYVTQPSVAKAIPIRFDERGRATTFVKSGNNHHLALYRTPQGKLEESIVTFWDAVDRARYGIPLVITHPREVMEQVLQRGDVPESVLRSLPPSDWVFVDSLQPDEMVIIGLSDEELQQALEVQDYRKFSEHLYRVQKVSSLYYVFRYHLETSVADDKNTAGRIPKFHRVQSLKAYEEKNIRKVRVDLLGRISLL

SEQ ID NO: 7640 - protein, 999 aa, synthetic construct
  REGION 1..999: note = Synthetic
MEKILGLDLGTTSVGWALIETDEKKSGSFLGGGVRIFTSVTEGTPPTLKNQKRRDNRGQRINIQRRSKRKTALKEALVKAKLLPKEVLDASNAPEALNAISTKPYNLRAKALDEALSDHELGRAILCLGMRRGFLSNRKSGDSDSKKVVPSIGLLKSNMDAKKCRTLGEYLAQQKTQRGTKNNPIYTHRSMFVTELNAIWEKQSKTNKNLSDSLRERIEHYILFQNPLKIQKYLVGECALEPNKRRAAKWQPMAQLFRNWQDVSRIKTLHDGKPLDWDQQKKLVDELQKKKTLKWNSVRKLLGLDAETKFNLEESGSLKELKGNDTLINLNKALGKKAKELTDADKEKILNWLDTSDNDDKLKEKIKRGYDFDDTIIDALCKCSLAKNYYHLSVKACTKLVDVFESKKQPLSYRDAGEQAGYIMDESEAAGKGLDRLPEPPQIRNPVVEKALVELRKVVNGVIRKYGKPNTIRLEIARDLKNPKRVRDEIQKRNKQQEKIREEAKKTLESDFKIFKTTEPTREDIEKYLLWKECFEDGNGQCPYTGEVISGDRLFTDIEVEHIIPYSRCFDNSFNNKTLCVSEENARKGNQTPYELYNGTPLYQEVLDRIVKLPYPKRRRFKLKDIPDNPDAQRTLNDTRYICKEAKRFLQKLGSPVQVSTGQMTAGVRRKWNLNRVLSIGGDNSKNREDHRHHFVDAAIVANISVGMIQMISKFSSDERLKRAIPGGIFSLKSLFKEPWESFSKDLTSLLEKIVISHSPTRKISGGLHEDTALGRVETKEGTAFANRVELGKTFSAEKVKAIADDKIRELVAARLDKFDNDPKQAFSDLINDPLFHVDGKTPIKRVRLHTNESISSLAGIKQNGSVYAYYRKGNNYKVAIYEMPDGKWKGHYLTAFDAKSKNTKPSKDFEGGKLIMELCKNDMVEMDWKDGRGSFRLQEMSGPNNKIIFRLHTANYKGTDNPDKSLVRKSPNPLKKLNPRKIEVSPIGEVIYVSKQNC

SEQ ID NO: 7641 - protein, 1019 aa, synthetic construct
  REGION 1..1019: note = Synthetic
VKSASSSGLIHRRQLVHNFPPRQFVTMKKILGLDLGTTSVGWALIEKDKTGGSFLGGGVRIFTSVTEDKTNNLKNQKRREKRGQRINIQRRSKRKTALKKALVEVSLLPNEVLNASKAPEALNAISTNPYELRARALDDALSDHELGRAILSLGMRRGFLSNRKSGDSDSSVVLPAINSLQSEISESDCRTLGEYLAKQPTQRGRYTHRSMFALELDAIWKKQSEINKKLTPALREKIEHYILYQNPLKIQKYLVGECALEPNKRRAAKWQPMAQLFRNWQDVSRIKTSHDSQPLEWEQQKKLVDELQKKKTLKWNSVRKLLELDPDTKFNLEESGSLKELKGNDTVINLNKALGKKAKELSEAEKEKILNWLDTSDNDEKLKEKINRGFDFDEKTIDSLCKCSLAKGYYHLSVKACGKLVDIFETNKEPLSYREAGEKAGYIMDESGAAGKGMDRLPHPPEIRNPVVEKALVELRKVVNGVIRKYGKPDNIHLEIARDLKQPKKVREEIQRKNKKQEKIREEAKGILISDFRAFKTSEPDRDAIEKYLLWKECFEDGNGQCPYTGQVISGDMLFTNDIQVEHIIPYSRSFDNSFNNKTLCVSTENARKGNSTPYELYNGTDQYDEVLARVAKFPYPKRQRFKLKEAPENPDAQRTLNDTRYISKEAKRFLQKLGTMVQVSTGQMTAGIRRKWNLNGLLSKGGDNTKNREDHRHHFVDAAVVANINVGMIQMISKYSGDERLQRAIPRGIFSLKTLFKEPWDSFSKDLETHLNEIVVSHSPTRKISGGLHEDTALGIVQTKEGTAFANRVELNKTFTTKKVKNIADDKIRELVSARLERFEDDPEKAFADLENDPIYHVDGTTPIKRVRLHTNESMSSLTGIKQNGSVYAYYRKGNNYQVAIYEMPDGKWKGHYITAFDAKSKNTKPTKGFVSGKLIMELCKNDMVEMDWKDGREIFRLQKMSGVKNELIFRLHTSGQKSNAERDTLKNLTSNSLKSTNPKRIEVSPIGEVIYVSKQNC

SEQ ID NO: 7642 - protein, 1118 aa, synthetic construct
  REGION 1..1118: note = Synthetic
MQNNSQISYRLGLDLGTNSIGWAMLALNQNNEPCKILDAGVRIFSDGRNPKDGTPLAVARREARGMRRRRDRFLTRKSQLMNCLIKLGLMPKDEIERKKLELLNPYQIRAKALDEALNPFELGRAIFHLNQRRGFKSNRKERVTDYKKLSETKRNQENLANKISETNSRTLGEFFYRERILKELTARAKPDESGLYPTRVMYENEFNEIKKVQFQNQKLSEENWQKIKEIIFHQRPLAPQEKGVCQFINKFKSLPNWAAEIFENYQKLSERNKNSKGLPRAYLALPSYQKFRILSEINNLKIIRNNREEILLDAAQKRKLIEYLHENKSAKFSSLRKQIGYGAEEFQFNFEGGKRDKLQGNETEIFLKDKKFGEKWHNFSLQKQDEIVEFLLDTENEEAIHQKALQEWNCNEEQALEIKKITPNNFKSGVGNLSKEFLQKIVAEIAEKNCRYDEATENLGFHHSKKEFGEIQSQLDYYGKAIPASTVPVKSGSEEEVFYGRIANPTVHVAPNQVRKVVNSIIKENGSPSEIHIELARDLKISQKEKDEIESQQKKNEKENEYLRKELENLNQRNTYGNRLKLKLWKELNPNDCNDRKCPFCGTQIGVNKISSHEIEIEHILPFSKTYDDSIANKTLAHRNCNQKKGNLSPFEAFGDSTFERIQNLPKNKKWRFYENAMEKFSDESGFQERQLNDTRYLSKIAHQYLAQICDPNKIKVANGKLTSLLRHHWGLNSILNKETERPLDQQNPEIENLREATFDSETDEVFESKSQEKNKKQKPKNRDDHRHHAVDAIVIAMTETKLLQQISRDNAIGHDLDRLIINVPNHWNRFREDVVEAIEKIVVSHKVDQSANSELHSQTSYGVLKKKIADEDSKKQSFNVVFSKSGGITSLNKNEIERIRDKKIRNNLMELTKDISKSKSDEKRLLSILQQFSRESGVKNIRILDKIQTAVKIEHGKNNQFSKAISPDNKSHISLWQMPNGGIITDVVSSLRMTSIYEIIERDGMCLINKSKKFPQDQVYEKLKPHPAAKLIIRLFKDDMVRLEKNGETLTAKITSVPDSTQCSYALHTSFSSNKEAKGTFYLNKNTLVDKKLRKIFVSPSGKVFDSGPILKTTKEN

SEQ ID NO: 7643 - protein, 1096 aa, synthetic construct
  REGION 1..1096: note = Synthetic
MQNISKQSYRLGLDLGTNSIGWTMLALNQENQPYKILDAGVRIFSDGRNPKDGTPLAVARREARGMRRRRDRFLARKSKLMNCLIRVGLMPKDEVERKKLELLSPYQIRFKALDEALNPFELGRTIFHLNQRRGFKSNRKEQVTEDKKLSETKQNQEELAKKIIETNSRTLGEFFYKERILKELTTRAKPDESGLYPTRAMYENEFDEIKKSQFSKQKLSEENWQEIRKIIFDQRSLAPQEKGVCQFIKKSNSLPNWAAEVFENYKKSSEKNKNSKGLPRAYLALPSYQRFRILSEINNLKIIKNNREEILLDAPQKKKLVEYLHENKSAKFSSLRKQIGYSGEEFKFNFEGGKRDKFDGNSTEIFLKDKKHFGAKWHDFSLKEQDEIVEFLLDSEDENTIYEKAINVWQLSAEQALEIKKITPNKFKSGVGNLSKEFLQKLVVEIAEKNCRYDKACENLGFHHSQKDQPEIQNQLDYYGKAIPASTVPVKSGSKEEIAYGKIANPTVHVALNQLRKVVNAIIEESGNPSEIIIELARDLKISQDEKREIEKAQNKNQKENEDLRNELEKLGQRNGFENRLKLKLFYELEKANNGVAFCPYSGKPINITNLFSFDVEIEHILPFAKTYDDSVANKTLAYKSANHTKGNRSPFEAFGDATFERIKNLPNNKKWRFYENAMEKFKDENGFQERQLNDTRYLSKIAKQYLAQICDSNDSNKIKVANGKLTALLRHNWGLNSILNKQEEENFDPETGEVLAKKPVKKTRDDHRHHAVDALVIAMTETRLLQQISRDNSRGHDLDRLIINLPSHWNRFREDAAEAIEKIIVSHKPDHGKNTKLHDETYYGILEKPFDLDDGKKSKEPYNLVASCSVLSLKKAEAKFIRDKKLREELTKLADQAASDKEFQTKFLPEFSKKTGVRNVRFYDKNQSIIKISHPQKNPRFSKAVKTNGNHHISVWKMPDGKIKTDVVSNFKMNCSFEIKQNERGENFINKDKKFLPKQDFEKLKPHPAAKLLIRLFKDDLAKLEENGEEKTVRIAVIGSTGQCYYFDHKNASSDTDSKKSFYLNEKGLLTKKIRKIFVTPTGKVFDSGPILKTT

SEQ ID NO: 7644 - protein, 1151 aa, synthetic construct
  REGION 1..1151: note = Synthetic
MKYRLGLDLGTNSIGFAILELNQENSPQKIIDTGSRIFSDGRDPKTGEPLAVARRVARGMRKRRDRNLSRKKQLMNFLIQINLMPQDEISRKKLELLNPYEIRAKALYEQLKPEELARAIFHLAQRRGFKSNRKEIQKESEITNENEDEKKSKKENAKITDQDKRENLQSEIQKNNCQTLGEYLFKYRLQNGLNARALADYDVLYPTREMYRDEFLAIKNFQQNFQNISEDNWAKIEDIIFFQRKLKPQDKGVCRFLDIRKINDGKLPNWAQEILANYLKINPLSKGLPRAYLALPSYCKFRILSEVNNLKLKNIHTREIIELTPEQKQKIIEKLNSQKSDVKFSKLRKEINTKEISFVNDFEFNLESERRLDIQANPTRNLLCDEKYFGNLWHQFSLTKQDEIVEFLLDEDDELNIENKAQHEWQVSQEQAKNLSKLTINHFKTTAVGSMCKEILQKLCETIEQNNCRYDQALKILEIKHSDEAYGNGDQDFLPYYAKAIPTSVVAVKSKTASQEEQEFGKIANPTVHSALNQIRKVVNSIIKDYGKPAEIHVELARELKQTKEQNDKLQKQQNANKKENNEAKKVLAENNQVDNYENRLRYKLWKELDLKDINNRKCPYTDKTICIKKLFSPEFEIEHILPFSKTLDDSIANKTIASKSANAFKGNRSPFEAFSGPQSPYNYQEILERTKTMPRHKRWRFEAGAMEKFNDQNGFIASQLNDTRYISKIAKQYLQQICDKEKIRIGNGKITALLRHNWGLNSILHKPKNSTEEHDQNIKNFDPETGEVFENNFSEKSDSNSTKKNRDDHRHHAIDAVCIAMTDRKMLQQISRDNARNFDINRLEIKLPSHWNSFREDVKEAVEKIIVSHKIDHGKNVKLHDETNYGKLKQMTLVDQGKKKLAECNLVIKTKIITLKKSDVHFIRDKKIKDLLLLEANKASTDKEFQEKILPEFSKNTGIKRVRLYDNNKSVLEINHPQNKPRFKKIIKTNGNHHISLWKMPNGEYLTDVVSNFKINCPYEIAKSQDGFQYINYEKKFEENQSMEKLKPHPSAKLIIRLFKDDLVRIEEDDKIKTVVVKVIGSTSQCFFLPHNIASSKSKDKNEKQENGKEESKGSFVLNFKTLKSKKLRKIFVTPSGKVFDSGPIFKENN

SEQ ID NO: 7645 - protein, 1110 aa, synthetic construct
  REGION 1..1110: note = Synthetic
MKVLGLDIGTNSIGWGLIDNEKQEIIATGVRIFPIGVNVSTQFKEESKNKSRRDARSARRRRFRQKMRRTALKKILDSLAIPSKIKSTNIEAYQLRAKAIDEKVGLADLGLIFLHLNKRRGFKSTRKDEILQEGDEDLGIKADKEAGKVKVSIEKLQTDIRNADCRTMGEYFYSLIKQSSEQEKYAYNPQMPIERIRGRYTSRKLYEEEFDTIWQKQKEFYPNLLNAENYKSIKEDCIFFQRELKSQKHLINKCRFEKDKPCCPTSKPIYQEFRIWQKINDLVVSTAITDEGRPLTKGEKQILFEELQSKPSLKASEIKKLLFAKPKAVEMNFDDKDSIKGNITRVKLIKALGEEYVNALSSEKLDQVWHYLHIQKDKTWLKKIALEKLQFTEQQAFTFAKINLEDDYSSLCTKAMGKILPHLKEGYQYSEACKKAGYHHSLDTEKANRPLEDSLKKLEANELRNPIVQRSLTEMKRLVNEVIRLYGKPDMVRVETARELRKPKEEREKMHNKNRDKDALRKEYADFLSQKLDRQISPRSSEITKYELWLELGADAEDLAKKGGNMEEFVKFSRRVSTGDKTKFNLWKECLRRSVYTGEIISLSDLFKSETEVEHIIPYSKSMDNGFANKTLAERKFNQDKGERTPYEYIFNTLGKEAWNAFCERIKIFPKHKQDKLKMQEYPPADFLEQQLRNTAYIAVKAGEMLTKVVNVELVKGQSTAQLRAHWGLNGTLKGENPEIKNRGDHRHHAVDAIVIALTTKSLLDTLSKWSAYNPQRDLYQIDEKYLPKQMWNGKLRTQLDKHLGSMLISHRADNRLIVRKKGRIFTKSKGLIKTKTTFAVRGALHNDTYLGYIKFPNDKHPYFKKGQLVAKVRKPIDLLSDTEIENIIDPKVKEQVKKYFAEKEQEGKQKTKEQKIIEAKMYSKKGYDVPLKRVTVAKTDKPIPLYPNRENTPYVMPNDNYIMGVYEAEVINKGKPQTKRMDIVVSFMESIQRKTNNLPVLQPIIQEGEQTYKLIYTLKKGDMFVMYENHTDEISWHDDKDLFKRLYKVIEISSGTIYFGLHYAAKTSADRSKDKNEKKEQSIVRIFRSPSKLKAVKVKIDILGRISMA

SEQ ID NO: 7646 - protein, 1543 aa, synthetic construct
  REGION 1..1543: note = Synthetic
MSKILGLDLGVNSIGWAVVDDEKASIIDCGVRIFPEGVENLGQGEKETSKNAQRREKRQLRRHYYRKRLSKIKLLETLIPLKMCPLSLNSLKKWKNWNNELKSDGRKFPNDPEFIEWLKMNPYALRKKALEEDLSLEQLGRIFYHFIQRRGFYSSRKGKDSGKIYQGENNTIGILETEKEIGYNKTLGTTLYEMILPEHQTYIYRTDENRRPLRARNRYTLREMYVKEFHAIWEKQAPHLGLNDKTVTIFKSFHLSGNNDSERNKQRINKIYLQYGIENVTITGKTIKVAQQISLKTLFGGRIEINDETHEILYRSQDSLLFWQRPLRSQKHLLSKCTFEKRIMFDKTTNKWIETGPTPCPISHPDFELYRAWQLINNIRYGRKEQPLDASQRQTVLNVISYQDKVFDFKVIIDALKLQNEYFNYDADQKVSGCPTIKKLKSLFPTEIWVQNKHEIWHDFMFFEDEELLTQRLIKKYHFTEEKAQKSAKITLEDGYASISLKAIHNILPFLEKGFIFQQAVLLGGIKNTFGSRWEYFKDYHSDIEQFIKDLCNGKKYHEGEIIQNIKEYLSSTVNNFGFNPNDKAFLKLYHPSREVGPEKKGDYISPVENLRNPLVQIGLNEMRRLVNYLLKKYRSMPEFGPDFCFDRIHVEVGRDLKNNKKRRQEIRKENAINEQKNKEARERIIEAGLKPSRDNIIKYLLYSEIEQKNGIVICPYTGKTIRLSDLLGPHNFFQIEHIIPYSVSLDDSFGNKTLCEANFNRSKGELTPYQFYLKNSSKSLWNADSWEEIEQRVFQILPYKKARRFTSKKPAMLDDFIQRQLNDTRYISKKSVQILREICDDVRSFPGQLIADLRRLWGLNDILSEPITDIPLNDLNINESEPTIHYLIVDENNHVKKAIPKINFKPIPMDNELAIPGEIKKETGNKFYFESDSKYYASLKIPANGFETGKYWAFIKAQAAQEFIPRFTPQPQISENVIIIKGNLKKKRFINESHGINFNTNKIIEDGYYWAIIPVIKAEIKQNDINDNRKNENKISIQGRVSNQKFISSIYSCEAQLINGFYTALLDFDVNNADFLPALNLPRPPENYYTLNGTVDSQGIFCPDMDYNWKLKADVAPGRYFIYFKIQEIINFQPIENPKPIIDKNNNEKIIESLIRVDTETGEIIIDPKKNREDQRHHAIDAIVIASATTSYYQKLSTYFGNLKNKQRNLAPKPKFEQPNPHFQNAVKEAISKILVSYRTNYRVLVPVYKRIRKNHDTYVSKGYSVKGQLHKDTFYGGYILDQGEGKIVSAAKYLPGIKPQQYHVRCNITEIKDHKHVAKIVDTTIKKLIENRLQNVFNIDISKPYNIPNGFFFDKDKNPAIRLPNRKGGDPVPVYTVRIFEYKGNAVKLKPNINCYVDPRNNHHCIIYKDVEGNLKFEMVKFWDAVNRLRHKQPLYQLPPDGSQIIATVQENDMFIFNYLYASDISEDMKIPYEELSKYLYRVQKISSTEGGIFLTFRHHLASTIKNPEEELRIQSLRSWERHQPIKVKINMDGTVNKIIK

SEQ ID NO: 7647 - protein, 1297 aa, synthetic construct
  REGION 510..518: note = misc_feature - Xaa can be any naturally occurring amino acid
  REGION 1..1297: note = Synthetic
  SITE 1295: note = misc_feature - Xaa can be any naturally occurring amino acid
MSKILGLDLGVNSIGWAVVDDEKASIIDCGVRIFPEGVENLGQGEKETSKNAQRREKRQLRRHYYRKRLSKIKLLETLIPLKMCPLSLNSLKKWKNWNNELKSDGRKFPNDPEFIEWLKMNPYALRKKALEEDLSLEQLGRIFYHFIQRRGFYSSRKGKDSGKIYQGENNTIGILETEKEIGYNKTLGTTLYEMILPEHQTYIYRTDENRRPLRARNRYTLREMYVKEFHAIWEKQAPHLGLNDKTVTIFKSFHLSGNNDSERNKQRINKIYLQYGIENVTITGKTIKVAQQISLKTLFGGRIEINDETHEILYRSQDSLLFWQRPLRSQKHLLSKCTFEKRIMFDKTTNKWIETGPTPCPISHPDFELYRAWQLINNIRYGRKEQPLDASQRQTVLNVISYQDKVFDFKVIIDALKLQNEYFNYDADQKVSGCPTIKKLKSLFPTEIWVQNKHEIWHDFMFFEDEELLTQRLIKKYHFTEEKAQKSAKITLEDGYASISLKAIHNILPXXXXXXXXXGIKNTFGSRWEYFKDYHSDIEQFIKDLCNGKKYHEGEIIQNIKEYLSSTVNNFGFNPNDKAFLKLYHPSREVGPEKKGDYISPVENLRNPLVQIGLNEMRRLVNYLLKKYRSMPEFGPDFCFDRIHVEVGRDLKNNKKRRQEIRKENAINEQKNKEARERIIEAGLKPSRDNIIKYLLYSEIEQKNGIVICPYTGKTIRLSDLLGPHNFFQIEHIIPYSVSLDDSFGNKTLCEANFNRSKGELTPYQFYLKNSSKSLWNADSWEEIEQRVFQILPYKKARRFTSKKPAMLDDFIQRQLNDTRYISKKSVQILREICDDVRSFPGQLIADLRRLWGLNDILSEPITDIPLNDLNINESEPTIHYLIVDENNHVKKAIPKINFKPIPMDNELAIPGEIKKETGNKFYFESDSKYYASLKIPANGFETGKYWAFIKAQAAQEFIPRFTPQPQISENVIIIKGNLKKKRFINESHGINFNTNKIIEDGYYWAIIPVIKAEIKQNDINDNRKNENKISIQGRVSNQKFISSIYSCEAQLINGFYTALLDFDVNNADFLPALNLPRPPENYYTLNGTVDSQGIFCPDMDYNWKLKADVAPGRYFIYFKIQEIINFQPIENPKPIIDKNNNEKIIESLIRVDTETGEIIIDPKKNREDQRHHAIDAIVIASATTSYYQKLSTYFGNLKNKQRNLAPKPKFEQPNPHFQNAVKEAISKILVSYRTNYRVLVPVYKRIRKNHDTYVSKGYSVKGQLHKDTFYGGYILDQGEGKIVSAAKYLPGIKXRS

SEQ ID NO: 7648 - protein, 1048 aa, synthetic construct
  REGION 1..1048: note = Synthetic
MSRGRLAVETILGLDLGVNSVGWAVVQREGPDDTPTVEAGSYVYPEPGELEQGTGLFRSNRQKRGQKRRMRIQVRRKRQRMAALLKLLVAHGLLPAEKEERDRLLSRDRPAGGEPGKRPFHPFMLRQRGLDEELTLHELGRCLHHICRRRGYISTRDLMHLHLEKQLPTLQRAAADLEAEEPGEEGKAADKETSALLGRLKEVREQIEAGAARTIGEFCALRLADPGAFPGGVRASGKRSEPRQQKQDLLGWRADRFLVEEEFEKLWAAQARFHPAALTDGLREEVRTAIFFQRPLASKRGLVGGCEFLPARKRLARAELLAQRTSVLQTLVNLTVVDQKGAGPRRLTGDEVTALADALEHRDSLTWEEARQVAFMPLGARFSDEPERRKAGKRTRGDILGNRTASALRASLGDGWSDLEPEGKEEMVALLLHAHSLADVARGLRRRFGFTPDQVRAAASAPLSEGYTNHCRRVWADLEPHLRQGLVYSEACEAAGYREANTSTVAVVDKPLDRLGAAPDLRNPVVQRSVKMAFRVINAVIDRYGKPTTIRIELPRDVSRTNKQREQMWRDQDKRARDRKQAEKKVLENKPDIAQGEATPRGASIVLSRAVEKVLLWEEAGMRCPYEPDRMVGIQELLNDYDVEHIVPRSRCWDDSWVNKTICPRGLNLQKGNSTPFEWIGRGERWDHMCRYVRSLRGMSPGKRSRLLAEAYDAEGFTNRALSDTRYLSSAIKKEVAKLGVPVEVSRGQITAQLRSLWELGHCVPIDDEEKEKLVRWREAPVKKNEKPRHDHRHHALDAILAALTDIRTLQRMTAWLKAREEGIPRDRLEPPLLWPTLTGDLERAIDRAPVVHATNRSVQGALHKETAYPPPAPEKVAAALAAAGASPGKLPATVVVEGRMVVLGPDGRGLKAYDLASNHHACIWQRTRPDGKVERDMTVTSMMEAARRAAHGEPVVQPAREGWDFVLSLCKSDIVEWTGDKPGLYRVATFSVSTCGAIELVLRHPIRAVASRPQDLRIQGRPKLPSIRRRVCLGPLGDEIASEPLDA

SEQ ID NO: 7649 - protein, 1047 aa, synthetic construct
  REGION 1..1047: note = Synthetic
LRLGLDLGTNSIGWVLYRLNDADSPEPIEIVDGGVSIHSDGRNPKNRASNAADRRMKRGPRRNRDRTLRRRRRVAAQLRICGLLPDPAEDRAPWRQLDPLKLRAEALDRPLSRFELGRVLLSFAERRGFKSNRQADGGEEGAIRASTAELQRRIDQSGTRTLGEYLWGRRQRGSTVRARPGGGPYLGGGLYPERSMIERELEAIRDAQAPHHPEVTADAWNDLVGSLLYQRPLRPVERGRCTLLPDENRVLKAEPLFQFFRILQEVNNVEVAPPGQAARPLTDEERERVVAKLRRSRTRRFDQLVADAGLPEGTRCNLRTVAREELDGDRAAVPLRAKKCFGRKWDRHSLEEQQQIVERLLADTNADDLVDWLMDEFGLDEAAAEAVSEAKLPPGTGNLSRAAIGRMLPFMQNGMRYHDAVTAAGLGRHSDRHGDASHERLPYYGSVLARYATGVKPDAASEVERFGRVANPTVHIALGQVRRLFNAIVDAYGKPNEVVVELSRDLKQTEEQRREDERRQGTNRERNDRLRELAEEAGVPEPSAQDMRKLRLWDEQGPPNQRVCPFTGTPLSIGRVLSDETEVEHLLPYSRTLDNSMNNSVVAMRHANREKANRTPFEAWGADSDRYGEILARAESLPTGKRWRFNADAMKRFSERSDFLDRQLNENRYLSRLVREYLECVVERSSIWVTPGRTTALLRRAWGLESILAAPGSDRKNREDHRHHMIDAAVVGMTSRSLLQRVAQAAGRGTDVGRIAADIPPPWPAFRKDMEALARNCIVRHRPDHFTVLGDKRERRRAGRDVTSGSLHNDTAYGVIDGPDEKGMMTLVERKHLTAIKPKDLGRIRDLALKARLQSLWKQVQAENAESSESEQWQRFAPEARRQIGIRRVRLLTTMGEGSLAFIGDATGGIYKAYKTDGNAYMDIWLLPDGGTRGETVSRFDAHSQRGHSQIKAKHPTARKLMRLHIDDMVAMGEGENRQILRVQQLSDQRVVLVDHAQAGKSKEMPSFSKSATRVLVEGMRKVSVDILGRVHDGGPFKAEARQRSRE

SEQ ID NO: 7650 - protein, 1038 aa, synthetic construct
  REGION 1..1038: note = Synthetic
MHRLGLDVGTNSIGWILIDTENHSFVDGGTLIFPDGRNPKDKTSNATKRREKRGPRRNRDRGLRRRRRLDNLLTDLGLLPTQSEERDAIFKLDPWYLRAKVLDRQVTPFELGRALWSFHDRRGFKSNRKTDKADDKGKMKQDINLLQKRIDQSPARTLGEFLHLRKNNRRHKSGRSIKARLGNGLYPDRSMIEQELGVIMAAQAEYHPDITEKDWQSIIDTILYQRLLKPVEIGKCTLNPNLPRAYKAMPTYQRFRILQDLANLRFARPGEPQQLLDQSQRYKMYYELLNRKDLPFDRMRLLLDLPAGTHFNLEGTSRSKLDGDLTAYSMANKNRWGKEWRNLSLAKQDEIVTKLLHEENEEALISWLQDNGIADKSTAERITTSPLPAGTASFSLSILSALVEVIQDQGLNLSDAVKEIGYDSHSQLQHDGSAVALPYYGAALPRSVLGADSTKDGNTDPVGRYGRLANPTVHIALGQIRRLFNEITDLHGKPSEVAIELARDLKRSQDDKKEIEKQNKKNQDLNLLLKEQMETAGVPFSPHNLRKMQLWHEQKNATGIAECPFTGTPLNIEMVLSDATEIEHLLPFSKSLDDLRNNKVLVMRDANREKGRRTPAEWFMQSKSVDAYQAMIARVQDCIPAKAWRFAPDAWQQFEAKGDFLSRQLNETRYLSRMVREYLTTVVHPDKITVSPGHLTALLRGKWGLNNILNDSNIKDRLDHRHHMIDAAVVGLTTRSILQKVATASHRAEDTDRLIADMPVPWEGFREELASLVRSSTVHFKPNHAKPAKGTTTGALHNDTAYGIVDGPDAKGMYTLVYRKPLDSMSGPGELDKIRNPGLKQKLKTFWESYAEGAVSEKQKWQQFCLGCSADLNIRSVRIYETLSAGSLALIRDKGGKPYKAYKTDGNAFMDIWLLPNGKTKGETVTRYNAHQKDWTSEIKRDHPTAKKLMRLHINDMVATGEGTERRILRVQQLSGQTIVMVDHNEAGNIRERSRTKDTQLQYKPLQKSAGTIMKEGLRKISVSRTGKILDRGPIKLT

SEQ ID NO: 7651 - protein, 1027 aa, synthetic construct
  REGION 1..1027: note = Synthetic
VLYRLSDAVPPEPVEIVDGGVSIHSDGRNPKNRASNAAERRAKRGPRRNRDRTLRRRRRAAAQLRDCGLLPDPAEDRSSWRHLDPLLLRSEALNRPLAPFELGRILLSFADRRGFKSNRRVEGGEDGTIRKENAELQRRIEQSGTRTLGEYLWRRRERSATVRARLGNGLYPERSMIERELAMIRSVQEQHHPDVSASDWDTVVATLLHQRPLRPVERGRCTLLPDEGRILKAEPLFQLFRILQEVNNVEVTLPRQAARPLAGDERKRVVEKLRRSSKRSFDQLAADAALPEGTRCNLRSTERDALDGDLTARTLRAKKCFGSKWNGYSIEDQQMIVERLLSDTDTDYLVDWLTEEFGLDESAAEAVSAARLPLGTGSLSKAAIERLLPYMQRGMRYHEAVQAAGLGHHSNLRGDAHQDRLPYYGSVLARHVVGAKPDAASDVDRHGRVANPTVHIALGQVRRLFNAVADAHGKPDQVVVELSRDLKRTDEQRREAERQQRNNRERNDHLRELAAGAGLATPSADDIRKLRLWNEQGKPNQRVCPFTGTPLSIERVLSAETEIEHLLPYSRTLDNSMNNSVVAMRHANREKANRTPYEAWGGDQGRYRAILARAERLPAAKRWRFAADAMKRFEARSDFLERQLNENRYLSRLVREYLECAVEHRSIWVTPGRMTALLRKAWGLDSILAGPDGGKKNREDHRHHLIDAAVVGLTSRSLLQRIVHESSRGTDVERIAADVPTPWPGFRNDIESLATGCVVRHRPDHFTVLRDKRERRDAGRDVTSGSLHNDTAYGIIDGPDEKGMMTLVERKRLDAIKPGDLTRVRDVALRNLLCSIWGQVQAANADKSETEQRQCFAKEAEEQLGIRRVRLLTKMSKDSLAFIRDATGGIYKAYKTDGNAYMDIWLLPDGKTRGETVSQFHAHRQISHSQVKESHPTARKLMRIHINDMMAIGEGENRQILRVKGLSGQRIELADHARAGKGKQMPSFSRRATRIQHEGLRKISVDILGCVFDGGPLKAAARRQSKD

SEQ ID NO: 7652 - protein, 673 aa, synthetic construct
  REGION 1..673: note = Synthetic
MDEFGLDEAAAKAVSEAKLPPGTGNLSRAAIGRMLPFMQNGMRYHDAVTAAGLGRHSDRHGDASHERLPYYGSVLARYATGVKPDAASEVERFGRVANPTVHIALGQVRRLFNAIVDAYGKPNEVVVELSRDLKQTEEQRREDERRQRTNRERNDRLRELAEEAGVPEPSAQDMRKLRLWDEQGPPNQRVCPFTGTPLSIGRVLSDETEVEHLLPYSRTLDNSMNNSVVAMRHANREKANRTPFEAWGADSDRYGEILARAESLPTKRWRFNADAMKRFSERSDFLDRQLNENRYLSRLVREYLECVVEHSSIWVTPGRMTALLRRAWGLESILAALDSDRKNREDHRHHMIDAAVVGMTSRSLLQRVAQAAGRGTDVDRIAADIPPPWPGFRRDMEALARNCIVRHRPDHFTVLGDKRERRRAGRDVTSGSLHNDTAYGVIDGPDEKGMMTLVERKHLTAIMPKDLERVRDLALKARLQSLWKQVQAENAESSESEQWQRFAPEARRQIGIRRVRLLTMMGEGSLAFVGDATGGFYKAYKTDGNAYMDIWLLPDGKTRGETVSRFDAHSQRGHSQIKAKHPAARKLMRLHIDDMVAMGEGENRQILRVQQLSDQRVVLVDHAQAGKSKEMPSFSKSATRVLVEGMRKVSVDILGRVHDGGPFKAEARQRSRE

SEQ ID NO: 7653 - protein, 1070 aa, synthetic construct
  REGION 1..1070: note = Synthetic
MLRLGLDLGTNSIGWALYRLAEDGEPEALVDGGVLIHPDGRNPRNRASKAAERRIKRGPRRNRDRMLRRRRRVAQLLHGLGLLHSGEEARKASRSLDPLQLRAEALDRPLTPHELGRVLLSFAGRRGFKSNRKTDGREEGAIRKETGELRRRMEQAERDAQREGQHAARTLGEFLWRRRNRGETIRARPTGNRERPYAGLYPDRAMIEDELDAIRGAQAEHHPRIADEDWDEIIGVLLHQRRLRPVERGKCTLLPDEPRAFRAYPLFQRFRIRQEVRNLEVETPGDPSRPLADEERERLVAKLLDSREFKLDHVAAFLGLPDGTRVNLRSTARDKIDGDLTAAVLRAKKCFGRTSWARLSLDRQQELVERLIKDEDHERLVDWLRDEHGLSEDAAEAASSTRLPQGTGNLSKAAIERLLPHMSAGQRYDEAVEAAGLGHHSDMRGDGKAARLPYYGEVLQRAVVGGGKTDGDDTERWGRIANPTVHIALGQVRQLFNAIAKEHGKPGEVVVELARELKQNEEQRLDDQQRQRDNRERNERLRELAEQAGHEDPSPLDMRKLRLWEEQGPPNARLCPFTGEPLSVERVLSAATEIEHLLPYSRSLDNSMNNTVVAMRAANREKGNRTPFEAWGHDRGRFDDILDRARLLPFGKQWRFDEDAMERWQSNRDFLDRQLNENSYLSRLVREYLEAAVAPNRIWVTPGRMTAMLRRGWGLNSILSGPGSDWKNRDDHRHHLVDAAVVGMTSRSLLQKVARASGRDEDRESVIAVAEQPWEGFRHDVGNFVERCIVRHRPDHFTVLHDKQARRRAGRDVSSGSLHNDTAYGIVDGPDENGYMTLVETKPLDALNPKKLATVRDLALRSRLCELWERVAAEGSGESATVAWRRFTDRASEELRVRRVRVLVRLGENGLAFIRDRNGRVYKAYKTDGNAYMDIWLLPKGRKTTGETVSRFNAHQPDFRSPIKAEHPTARKLMRLQINDMIAVGEGDERRLLRVQFLSGQKITAVDHNEGGDLRARVRASDDAESYVPLRVSASRVIQAGLRKVSVDVLGRVQDGGPFGPDGRGRIGRS

SEQ ID NO: 7654 - protein, 1033 aa, synthetic construct
  REGION 1..1033: note = Synthetic
MLRLGLDLGTNSIGWVLYRLVDGEPVELVDGGVLIHSDGRNPKNRASNAADRRSKRGPRRNRDRMLCRQHRVAGLLHDLGLLPQDEEARAVLRNLDPLQLRAEALDRPLNPYELGRVLLSFADRRGFKSNRKTDGGEDGAIRKDVSELRRRIEQSGARTLGEYLWRRHRDGKTIRARLGNGLYPDRAMVEDELEAIHKAQIWHHSELKPDDWDSVIKTLLFQRRLRPVERGHCTLMPEEKRAYKAYPFFQLFRILQEVMNIEVAPSGDGFRPLGVEERERVVDKLLSSKSRTFEQIVVDAKLPEGTRVNLRSIAREKLDGDLTASALSSGKCFGKKWQQLSLERQQEVVERLIEVEDSWELEDWLQDEFDLSEEAAEAVAAARLPQGTGNLSLAAIEKLLPHMQQGQRYHDAVIDAGLGHHSDLRGDGGMARLPYYGKVLARHVLGGRPDGRSDQERYGRIANPTVHIALGQVRHLFNAIVGRYGKPDEVVIELSRELKQSDAQRSDYERRQAKDRERNDRLRELAETAGHPEPSGQDMRKLRLWEEQGPVNGRVCPFTGRTISVEMVLSDATEIEHLLPYSRSLDDSMNNKVVAMRDANREKGNCTPFEAWGHDSERYEALLARVRLLPKEKQWRFNDDAIDNWEKEGRFLDRQLNENSYLSRVAREYLEAVVPPECIWVTPGRMTAMLRRRFGLNGILSDESNGSKNRDDHRHHLIDAVVIGLTSRSQLQRVARATGRGDDGDSILETLELPWAGFRADLESLVQCCVVRHRPDHFQPSHGGTTGSLHNETAYGIVDGPDEKDRMTLVETKPLDSLAPEKLDAVRDPALRDRLKALWELVDMECEGESRGVAWQTFVDRAWAEFRVRRVRVLTILGKDSLAFIRDETGRVYKTYKTDGNAYMDVWLLPSGRTKGETVSRFDAHQPDFRSQVKDEHPTAKKLMRLHINDMVAVGEGSERRIMRVKELSGQRIVAVDHTAAGKAKELRSEKILNKSAGQVLQAGLRKVSVDVLGRVHDGGPFSRDLQGKDRRQ

SEQ ID NO: 7655 - protein, 1080 aa, synthetic construct
  REGION 1..1080: note = Synthetic
LRKRGRGGPKPASQHGAYCLCRLSLLLVPVGTANHSLRMLCYTFFVHAPTRKILRGEKMLRLGLDLGTNSIGWVLYQLDRNDPPEPCGFVDGGVLIFSDGRNPKNRQSNAAERRTKRGPRRNRDRMLRRRARVARLLHEANLLPSDDVQAASLRNLDPLRLRAESLDRPLEPYELGRVLLSFADRRGFKSNRKTDGGEDGKIRQEVRELRRRILQSGARTLGEYLWKRHKKGKTTRARLGNGLYPDRAMIQDELEAIQKAQSSNHPNLKRHDWDQIIDALMFQRALRPVDRGNCTLLPDEKRAHKAYPVFQHFRIWQDVLNIKVASPSEDGTRSLNENERNRIVEKLLTCKERTFDQLVADANLEEGTRINLESTAREKLEGDSTAVKLRSLKCFGKEWSRLTLERQQVVLERLLEEDDYVELESWLRDEFSLSEKAAEAVAGLNFVQGTSHLSKKAINKLLPHMKTGFRYDEAVVRAQLGHHSDHRGDGRSDSLPYYGSVLERHVVGRRQEGRNDAEKYGRVANPTVHIALGQVRRLFNAITEQHGKPDQVIVELARDLKQSLAERSSSEKRQKLGLERNERLRDLARQANVPEPSSGDLRKLRLWDEQGKVNARICPFTGQSLSVELVLSAATEIEHLLPFSRSLDDSMNNKVVVMRDANREKGNRTPFEAWGHDPVRWEKIRSNVKHLPIAKQWRFDEDAMEKWEGKVDFLDRQLTDNRYLSRMVKEYLEYAVNPNNIWVTPGRMTSMVRHRLGLNNILNDENEGTKNRADHRHHLIDAAVIGITSRSQLQKVARAMGKGEDGQRIIEKFDPPWDGYRSDLEALVERCVVWHRPDHFKFRAGYTTGSLHNETAYGIIEGPDTKGIMTLVETKTLDAINLKRLDDVRDLNLRERLKGLYAEIGDANSGAGNVWKVFVSEAERRLGVRRVRVLVRLGSGSLAFIFDKAGQPYKAYKTDGNAFMDIWLLPNGKTKGETISRFVAHKPNARSEVKANYPTARKLMRLHINDMVAIGNGEERRIYRVQKLAGSTVVAVDHVAAGKASELLPLRKSAGQILQSGLRKVSVDVLGRVKDGGPFH

SEQ ID NO: 7656 - protein, 1023 aa, synthetic construct
  REGION 1..1023: note = Synthetic
VLRLGLDLGTNSIGWVLYGLANAGEPEALIDGGVLIHSNGRNAQSQGSNAAERREKRGPRRNRDRMLRRRKRVARLLRGLKLLPTSKSERAEQRRLDPLRLRAEALDRPLTAHELGRVLLTFVDRRGFRSNRKIDGGDDGQIRQEVSKLRQRMVQAERDAQRHDRHAGRTLGEYLWRRRRKGKTIRARLGNGLYPDRAMIEQELSAIQSAQAPHHPAITSAQWDQIINQAILFQRELKPVERGWCTLIEGEQRIYKAEPLFQRYRIWQEVLNLEYAPPREGRQPLDERQRWLVVNKLLEVRSRTFEQLATLAGLPDGSRFNFDTTARDKLDGDQTAAVLGTGKRFGKRWANLGPERQQLVVERLIEESDHETVVTWLRDELGLTAETAEAVAESPLPSGTGNLSRAAIECLLPFMEQAGLPYHLAVTAAGLGHHSDIHGDGSAGRLPYYGAVLTRDVVGGTSRVDDPDVKRYGKIGNPTVHIALGQLRRLFNAIADEYGKPDEVVVELARDLKQTRADRERDQRRNRENQQRNEKLRQLAADAGLPEPSALDMRKLRLWDEQGPVNARLCPFSGEPLSIQRVLSDATEVEHILPYSRTLDDGMNNTVVAMREANREKGSRTPYEAWGGEPLRYEQILARAELLPPGKRWRFQADAMQQIEDRGGFLERQLNDTRYLSRAVKQYLEAAVEPDKIWVTPGRLTAMLRVAWGLNSLLSGNDQKERSDHRHHLIDAAVVGMTSRSLLQEVARDSARGVDELGERVAESVGDHPWEWEEYRRDVEKLIDRTIIRHRPDHFQPKPGGTTGSLHNETAYGPLFTSDGDLRRDDRGNVLLVETKHLADLDRKKLETVRDHALRERLIALWDRVEAEPGEGKLNERFADRAQQELGARRARVIVRLGEDSLAFIRDRDGRIYKAYKTDGNAFMDIWLLPNGKTTGETVTRFDAHQPGFRSRVEGGTSHREKADAPAQRRHDRRRRRRRAAHHAGERTIWTEHRGRRAHSGRQSQGDAVVQQVRRPGAAGGPA

SEQ ID NO: 7657 - protein, 1042 aa, synthetic construct
  REGION 1..1042: note = Synthetic
LCLQHRSDKIPNGNAALEGAAMHRLGLDVGTNSLGWFLYELDGDRQPVRALDGGVLIFPDGRNPKDGTSNASHRREKRGPRRNRDRGLRRRRRLFALLFELGLMPGDEARRNALFRQDPYELRAAALDRPLSAGELARALWSFHNRRGFKSNRKAGNAKEDGALKTAISELRRRIEQSGSRTLGEYLHRRQRNKGKPIRARAGNGLYPERAMLEVEFLAIKEAQAPHHPNLTPEDWGAIFDTLSHQRPLRPVERGWCTLVPGEKRAFKANPLFQRYRILADLNNLKTSPHGEPYRSLNRQEWDKLFLKLLSVKQVDFRKIPALFDLPERTRINLETESRSKLDGDLTATVLSHKDRFGKEWRTFSPDRQREVVEKLIDEEDEDALLDWLMREFDLPRHRSEAIASSPLPAGTCAFSRTALSRLVPILEDQGPRYDKAVVEAGFDHHSDFRLDGNAEKLPYYGEVLIRHVLGADPGNGRNEVERFGRISNPTVHIALGQLRRLFNGITTTWGKPDEVVVELARELKQSSEAKAEIRKRNAANEKRNRDLEAQIDAHGGIATPASMRKMRLWAEQGKEGERVCPFTGTTLSVDLVLSDKTEIEHILPFSRSLDDSMANKVVAMREANREKGNRTPWEAWGVVDPERYDTILARAARLPKNKQWRFFPDAIERLEEGNDFIGRQLNETRYLSRLVREYLSAAVQPNRISVTPGRLTAMLRGKWGFNGILGDENRKTRTDHRHHMVDAAVIGATTRSVLNRMARAAEGSRNRLIDDMPVPFDGFRAQVAGLVHNATVHFKPNHAHPAPGTTTGALHNDTAHGIVSGPDEKGFFRLVTRKPLVTIKAPYLENLRDPTLRDRLKELWDEVRAETGKDGDLEWKHFAARAERELKVRSVRLYDTLHERSLALIRDKNGRPYKAYKTDGNAFMDVWLKPDGKTVGETVSRYLAHRPDFVSEVKTKHPTARKLMRLHINDMVAMGEGSGRSIFRIKALTGQTIVLAAHNEGGKAKEMPTFSKSASRVIQEGLRKVKVDRLGRIRDGGPFGA

SEQ ID NO: 7658 - protein, 1265 aa, synthetic construct
  REGION 1..1265: note = Synthetic
LGPAASKSIQRTRYRRGVGCQHPRTAVASKARYPQTERPRMPTPFARIPGRYDDTARRQEIDNAIGRRRRSTRVANLGVFTGYRIGLDLGNGNIGWCILFERERTPFFMTAETLAAHNASLPPGATRTQLPDPHLFVPLGTHKFEARNSDGKALSKVRAEARAKRRTLDARQRRRWTLKQVLQRHGLYPTAAEATRGLTIPGRQGPVPVKADVLRVRLLQPGTASHPHDLGRALYNVLKRRGWMQVLGRTGAQETSAFGRKATAAYKAALDKFGCRTVGEFLNRCQHDALIADHRRIRKRHKTLAWQETHKVKQRKPEDLQHSFQVMETLSPTFELMWEEACALRVAQKDAVPISDEAWQEIREAADFRRPLRPKEPGLCEFLPQKRRCVRALPSFQQFRILQQVDNLRQDGRELPEHVFEQIVDHLCTRDRSTVQAVGRELGLRRLGLAEKDQSRALAGAKTDVGLAEVLGPGWMEIEDIEQRDRWTMRFLRRHPMPVVDSPPRAWSPDDEERLKRDAERAFGPGALERVDERASQLFDDKFANISTLAARLLSKGIRQRLPHEERLAILQREGGMESPHIDLYERLPYYARVMPDLAVPAANFAPLERTAEEERECGRAANPDLHVVLNRVRKVVNAIIDMMGGILPTQVIVEVAREALSEEAAEKHGKVVRDRTALREAVVADIARVLDGQRMPVGPSLDRIVDRWLAAIRQGWRDYDGSEIAKSHLVDGTIYQLDHVVPAAFGQFQKDNLFVSKTALNRRKGRRLPWEAFPELRPELMTFALFGKRRQLEGLKAAETRLRRGSVSRRELDRIGARITSLQQELEALCAANPAADDPRILGSLERTRSTRLESLLDPAGTPDDARGSGRGPVRPGEQAALFARLGPDAAVPEEQHQARDVANIGWSTKVTTRYLGCLGPRTLTVKPWAVHALRCMFDINKERKDLRNHAVDAFLIAHFDEHVMRPAFARLRGTRYEDLYTAKPLEDALGEVSDGPAVFDAFRENLRRLDDILPTIATAHRPDNKWNPGDRPGGSFGALGGENIYAFRPDKDALARLSKIVNNARGIENGPTYTKAQLRALLEAAVDQINDPAERQACLALRKATTLSYRGRKKPVSFEIFVKNKSNPGSFLNISGKFGVTSRKNVSELEIISIHDFSKSDISKRNSYFSPELIFYRNSDCIVYNGFLCTISAFSENNQITIFPVDDIQVKSNRIQPTVKKFPSKLLEKFPSDVLGRRLHRRRKNPGDLQPVPYPLLRREDRG

SEQ ID NO: 7659 - protein, 1057 aa, synthetic construct
  REGION 1..1057: note = Synthetic
MAKQEKVFAFDVGKASLGICAREGNHILGLQSLLIPAEYGATADFRSRRRAYRTRQAHKKREEWLCRLWTEAGLTPLNNDDKRLKSEFPKRGEEKIYNSALLRIALLQERPLEEWQVFKALWAAIQRRGYDKDCDWNFRNEDELLSEDSKENLESVGKYQEALYYHTNSQTEYLFPCYLEATSMGLWHWEQPDKLNVRIDSNATKVRQKGMVAPRQLVEKEIRQLFEKAQRQLPALGKVNINEFLYGPSGKAYASLSPEFAQYRGSEWDTQGVLSQKVPRFDNRILNKCQMLPKRNVCKANDPLSLQFNLLLKLKNIRFTDENGEVGRFLSCEELKNVYTLCQENLSEKKTQEITFGNLVKFIEKTVETRVMDINLAKGEKIKLNATGRSRFCRPALTIMNQILLEGTDPPDFDVTPFVQQGNNNAITQEELESLISRLGETWNGFHVGDKRYIDLESTPKEKDKNILKLIGSVNNPVVRHRLIFFWNELKKMVHQHGTPDKVILEFARGGEGLDGQKTANDWERAIKESEKRNDRIREQLEEQGLKSHKWNIERFKLAEEQQWHCPYTGERLHAGNLEHYQVDHIVPVSGDIATDAFYNKVLCTSQSNQDKGNRTPYEWLSATDEWPDFLARVTDKNSSYSKKKKELLIRNDARDLVDSYNGLAETAYIARLAQQIVALEFGWGLQTKGDNRRIFVNDGKMTAKIRKIYSLNELLLTGEEKSKLSDAKDAGQQRTVWKKNRENHKHHALDAYCISYSQDLKISRIDEQGRIHWHVPGLEESKAQLERKLIDLFPKPVRRNTKELYPLETIYGYRKRTENGKEVHYLTVRKNLIELLGKDRKKIRDIFDLDIRQDLEKHSEEIKDNKDWNNFLVAYRHPKRNGKVEAVLIIESCSDNPPQVDRAGRMIFGEFKDFGNLDTKEGRKGITRHQFKHSKANKGQLIYNSGKGWKVQQVYVHEKTNNIKQSLLNSGYKLYRDGMLFYPGCQVFIPFAFKAGKKELPGGLYKSRTIKAKGAVLLENNDGEEFLTNIKHLVEAGVELAEYHDKTVKVLSTSNE

SEQ ID NO: 7660 - protein, 1139 aa, synthetic construct
  REGION 1..1139: note = Synthetic
MSKILGLDLGTNSIGWALVQNNIILGMGSRIFPEGVVNLGEGEGREASKNASRTEARGVRRQIFRRRLRKRYLLKELAKHNFCPISADLIKDWNGTEIFKNQELQDWFKLNPYELRAKAIHQEISLVEIGRIFYHIIQRRGFLSNSRSAGADVKETSTLFTGDAKIGKIGISSTLENIKNIGNSEENKTLGSYLNSIQPKENEPYSECLERIRNRYTTRQMYIDEFELIWEFQKIYHSELTENLKSLFGGRKKDGYKDDGVLFHQRPLRSQKHLVGYCSFEPKKTKCKISAIPFELFRIYQWVNTLSYDFNGEKQEITSEEKEKIIQLLLSKEKVAFKAIRKVIDKSESNYQFNYKDKDNIVGTHTISQLSNKKFFGKQWFHFSEEEQENIWHVLSFFDDSDKLKEYALKNWNFDDKKATEISKFNLKEGYSNLSRKAINTILPFLKQGFMFDIAVGLAGVKNVLSKENNWAENEQFVLDNVPEIVRSNIKGGYIEPLKNMLKNEFNCTDKQLEKLYHHSSAIETQIILDKLPVNINADREIQKIKNPVVITALFEIRKLVNQIITTYGKPTEIKVELARDLKASKTNRQETRRRQQILERENDRVKVELEGLDQRTNHANILKYKLWEECNKTCPFTGKVITLSKLFTGEVQIEHIFPWSRSLNDSFNNKTLCFADENRAKGNKTPYEFYTSQGLEKWEAIKLQALSCFKTKAHYPNCYNKFKHFVKQKHDEDFISRQLNDTRYISKEAKNYLSKICANVMVAPGQMTAVLRHNWGLNTVLNKEQDAKTRDDHRHHAVDALVMACAKRSHLQELSKRNRYHKNHELKDFPMPWQSFRMDAETAVEQILVSHKKQKNLVTIRTHKTKKNGVEYKNLGVSARGQLHKESVYGKRTAPDSSQAFHIRKPLESLTTEKHLDKIVDATVRLLILKRVKELGGFVKGKIPADTFFKIDENGIKQAQIFLPNRNGSKVPIKKIRIKENIGGAEKLKEDINQYVNPRNNHHVLIYKDEDDNLKEDVVTFWTAVERKRQKQDVFQLPEDGKKIVTTLQINDMFLLGLQNEQVDWDNIDANLLKDHLYRVQKFTSKDYYFRKDKESNLDGKLGIAFHYIKGFGTGKTGWKTFNPIKVGINSIGVLKKL

SEQ ID NO: 7661 - protein, 621 aa, synthetic construct
  REGION 1..621: note = Synthetic
MRKLYHHSATIEVSEVLDRLPVNKEADKELQALRNPIVTTALFELRKLVNELLDLYGSIDEIKVEMARDLKVSKMQRNKIRREQKRLEKENDRVKARLIEEGQRVTHDSILLYKLWEECKHTCPYTGKTISIQQLFSGEVQIEHIHPWSRSLNDSFANKTLCYADENRRKGDKTPYEFYGSDEANWSAIKERALKLFSDTKEYPNAYQKFKRFVQQKFDDDFSTRQLNDTRFISKEAKNYLLKICKNVQVSPGQATSNLRQKWGMNNILNDANEKTREDHRHHAIDALVMACTKVSYVQELSRWNRYNRNTELKQFPLPWESFRRDAEVAVERILVSHKRVANDITVRTKTVEKNGKKYTNLGVAARGQLHKETVYGKRTVHGEEAFHVRKSIDSIETEKQLEKVVDEAIKNGIRKRVMELGGFVKGNLPANTFFIVDENGIKQPQLFLPNKNGEPVPILKVRMRENIGGAEQLKDNVNQWVNPRNNHHVLIYKNEKGNMKEDVVTFWTVVERKRTGQPVYQLPPDGKEIVTTLHINDMFLLGLDKNQVDWQSLDYDILKEHLYRVQKLTSGDYFFRKHLSSTVTDNQFYQIRGFGDGKTGWFTFKPLKVKISVSGQIQKL

SEQ ID NO: 7662 - protein, 682 aa, synthetic construct
  REGION 1..682: note = Synthetic
MYDVAVGLAGVKNVLSKENNWSENEQFVLDNVPEIVRSNIKGGYIEPLKNMLKNEFNCTDKQLEKLYHHSSAIETQIILDKLPVNINADREIQKIKNPVVITALFEIRKLVNQIITTYGKPTEIKVELARDLKASKTNRQETRRKEQILERENDRVKVELEGLDQRTNHTNILKYKLWEECNKTCPFTGKVITLSKLFTGEIQIEHIFPWSRSLNDSFNNKTLCFADENRAKGNKTPYEFYSSQGAEKWEAIKLQALSCFKTKAHYPNCYNKFKHFVKQKYDEDFISRQLNDTRYISKEAKNYLSKICANVMVAPGQMTAVLRHNWGLNTVLNKEQDAKTRADHRHHAVDALVMACAKRSHLQELSKRNRYHKNHELKDFPMPWQSFRMDAETAVEQILVSHKKQKNLITVRTHKTKKNGVEHKNLGVSARGQLHKESVYGKRTAPDSNQAFHIRKPLESLTTEKHLDKIVDATVRLLILKRVKELGGFVKGKIPADTFFKIDENGIKQAQIFLPNRNGSKVPIKKIRIKENIGGAEKLKEDINQYVNPRNNHHVLIYKDEDDNLKEDVVTFWTAVERKRQKQDVFQLPEDGKKIVTTLQINDMFLLGLQNEQVDWDNIDANLLKDHLYRVQKISSKDYNFRIVEASTILNKEEAVRSSLISFQKLNPIKVKVSSIGVIEKL

SEQ ID NO: 7663 - protein, 1107 aa, synthetic construct
  REGION 1..1107: note = Synthetic
MSRILGLDLGTNSIGWAVVDPEEKQILGTGVRIFQEGVENLGQGQREISRNATRRETRSARRQHFRRKLRKKLMLELLRKHNMCPPAEDEQAMKEWFRMNPYVLRKKALYEEIRLPELGRVFYHMAQRRGFQSNSRIVKEDEGKIFEGNPSEGKIGINSTKEGMSSYPTLGAYLASIDTRNERIRNRYTTRQMYIEEFEKIWEAQNKFHPEMDFSLREAIGGRKMDKEKYGYARDGVLFYQRPLRSQKYLIGKCRFEPKKHRCPVSAIPFEKFRACQFVNTIECNGEKLSREDREKAVSFLLSKDKTTFKNIRKKINKLDSCYHFNYQDEDKIVGSQTISQLSSRKFFGEKWHQFSEEEQEKIWHILFSFDDKRLLKEYAMNRWGFDEEKARKIAGFGLKQGYAGLSRKAINNILPFLQMGFTYDVAAVLGGVKNAFGEEWEQLDEGKRQLVLDHIPEIVHSRKKGGFMNDVRTFLTEQFALDETRLKKLYHHSVETDNGEILDKLPVDTDADREIQAIRNPVVVKALFEVRKVVNGLIDQFGPFDEIRVELAREIKGSKEDRLRIRWEQQENEKENDRIRDILLQHNQPVNHENILKYKLWEECQHICPYTGRQIGIDQLFSGEVQIEHILPWSRTLDDSYMNKTLCFADENRNKGDRTPYEYYTEKGTWEEVRQRALTLFKNSPEFPKRYAKFRRFTQKQLDDDFARKQLNDTRYLSREAKRYLKKVCRTVNVASGGITAKLRYMWGLDSILNPGAQKKSRDDHRHHAVDALTMAALTLYHVQQLSHWNRYRRTGTEPRFPDPWEDFRFQAKRSIEQILVSHEKKNRVITRRMYKARKNGKEYRNLGLAARGPLHKEYIYGKRTTNGEEAYHIRKPLASLDTQAQVMKIVDPVIRGLVLNRIEKLGGFKGKKVPENTYVEMNENGETQWMIHLPGKQGEQVPVRSVRIRENLGYAARLKKDVNQHVNLRNNHHVMIYEDRNGNLNEQVVTFWEAVRRKINKEPLYQLPPDGEKIHTVLKVNDLFLIGLEISADMQNIPRERLARHLYRVQKLSSMYYTFRLHTASTIDNPSDEIRIVSFKKWKQLNPVKVRLTITGHITGIDKPC

SEQ ID NO: 7664 - protein, 1109 aa, synthetic construct
  REGION 1..1109: note = Synthetic
MQVGPKYGLGLDQGVRSIGWTLVKLNERAEPTGVERMGVHLFEAGTEGLIEKGMDASRAAKRRAARQARKQYRCRCLRKRRLLRWLQELGLMPPGDVSSGQARNELLGRVDAELRAKWEPPGTDHRLRQLLPYRLRAAGLKEKLEPYELGRALYHLAQRRGYQSNRKQVADETDVDAGSSPDEAEHKKQKKTKKPRPGSVGEVQAGIDDLRRRMSGAGCTTLAGYFATLDPTGKLHERIRAQWTPRELYRLEFERLWEEQAKHHPSLNSTAAPRPSHRIKHPPGRGQPSRSAGSPVPPPCPLSKQRTYREEVGRALFFQRPLRSAAGLVGRCSLTNSRCAPKAHPLFQRFRILQQVNNLRVQLPGGAERDLTQEERSRLTEALGTRREVAFSTLKTKKWFGKGASFNLERGKQKKLVGNITEARCRAVFGADRWAAVSETDRAAVVHDLIVWVKPAALARRGQSKWGLSPQQAVRFGNCVLEQGYAAHSVQAYGRLVKRMEIGAPYMTAVVDEFQKRDVGVHELLPAVLHRDSVGDPRNPTVLRALTELRKLVNAIVRRYGKPEWIRLELARDLKRSRKARERMSEEMRARESAKNKARAEILRRAGIAGKDGDVEKYLLAEECGFVCPYTGKQMDKDRLTDILGNPEFEVEHIWPRSKCLDNGFLNKTLCHVNANRTKRNLIPHEAYGEERLREIVARVAHWPDSAGKRIKLSRFLATQIPPEHRPEAHLAETRKVSALTAEYLGRLYGGVHGTDGRQRIWVTTGILTSQVREMWRLNALLSKRDVKDRDDHRHHAIDALVVALTDGDTIGQLQQATAEAERLRRRGLPEQDPPWDSFFEQASERVAAINVSFRQTRRVRGALHDETLYAHPRPGESHPRVRKELSKLTEKDAARIIDPRARAAVAGAIRAQGFKPKGTAKAYTEFAERDTHPPLGAGWVHKVRVRSGKKGKLRPIGPGCARDVMLGANHHIVIRDAGPAVGTGAGEWKESATTLMEAHRRAGAGEAVVHRADKGSERFLFSLAPGEFILMDTPEDPSKRALYRITNISEGQSEARLHTDGRPVTALRADKKSGKKDERLRIHGEKLQRLNAQKVNVTYLGEIQNAGG

SEQ ID NO: 7665 - protein, 1098 aa, synthetic construct
  REGION 1..1098: note = Synthetic
VLHVEAGVFVMRYSLGLDIGSESVGWSVVELNESDDPIRLVRLGVRAFDAVRSEAANATTPAEERRVARSQRRRLRNRKRRLREIVNLFAEHGLVGSREELEDVFRTRPDDLTPWQLRVQGLDRRLEPREWARALFHIARHRGFKSTRRGEMETVDAEEKKKLGEMLSGIKSIHDGMVAHGYRTVAEYMESPDWPHGEQRRNKGGQYICTIGRDDLLAEARTLFDTQRRLGNPHASLEMEQRYIEIVDEPPHLTEGPDLMKKVGRCFLEPDEPRAPRATFTAQKFMALQTLVNQTLTHSSGARRRLDPEEIALLFQEALEVKDLKYKRALKALCADDGWLFEVRGRKRGKTLADMQSETLLKLESYHKVRSALEDDFPQAWEQIRSNPDLFDEIASRLTYWLRPDSAYNALIELGIEEGAARELADSVVFDGHARLSLKAMRNLIPYLEQGKVYSEACELAGYNHSLRQTGAKSDRIPPLDTLEDFNSITNPNVKRALTQTRKVVNAIVAEYGLPSRVVVELAREAALSPQKRREIEQEQLKNRREKERIFDRIRELAPAAVPERVWRKYLLYEQQGGKCAYSLQDLDLRRVLTDQTYTEIDHAIPRSVSFDDSMANKVLVLTEENRNKGDELAAVYVKRAHGDAHFERYAAWVQSSPMPPKKKRLLLTEELSEDQKRELQGRYLTATQFAAKYFLRIVKSYLDLPETRVLAVNGRMTNDLRWRLGLGEEKNRQESDKHHAIDATLCAIADHKMVHRMARYFKARERCEKTPDGRWIDPDTGEIVEPPVLEPWPEFRDSVIAAAEQIVVSRMPNRRLSGRGHKETLYSLKHVRKALGELPKRGRVALSGADPRPTKRTKLSQLSDSQIREILKTPSPILVDEEANWRLYELIRQRLREAEHETGKTWAERAFGPQAEPLRMPTNDGRPGPIVRSIRLFTDARSGIVVRGGMAENDTIVRLDIYRKANSAGKVRHYVVPVYAADVAAGWIPNRAAVQGKPESEWPVMDETYEFLFSLHPGDCFRVWKNESQPGPLLYMTSFDRNSVRISGNLHDRSNRKPDGTIDPVRVSPKLAHRIEKVEVSITGEIAPVRRTGKRPA

SEQ ID NO: 7666 - protein, 1094 aa, synthetic construct
  REGION 1..1094: note = Synthetic
MRYALGLDIGSESVGWSVVELDHEDEPIRLVRLGVRAFDVVHREEASASTPAKERRVARSQRRRLRNRRRRTRRVGGLLQSIGLVRNSAELQELLVTKPEDASPWQLRVRALDHQLEPRDWARVLYHLARHRGFKATTRGELESEDTKEKEKLGLMLSSVKAIHEGWHGKYRTVAEYMESPEWREVHGNQKRNRSGSYVCTIGREDLIHEAHTLFESQRKLGNPFASAETENEYIQILDEPPHLLEGEELMKRVGFCFLEPTERRAPKATLTAQQFVALQRLANQRLVSRDGLLRSRGLTPDEIQLLMAEATEVEKVTYKRALKALELNNEWLFLVNGQKRAKKLEELQTETLITLEGYHKVRKALEKEFRDLWEKLRADRDYFDEVAAVLTYYLQADSAVSALIKLGLEREAAQCLAQEVVFRGHTRLSLKAMRALIPYMREGHTYDKAAELAGYVHYRLPAVEKSPTIPPLESLQEFVGITNPNVRRAINQARKVVNAIVREHGLPSRIGLELAREAAKSKARRREEESRMRENERDKKRRFDHIREIAPDADPEKVWKKHLLYEQQGGKCAYSLKDLDLARVLTDPTYTEVDHIIPRSVCFDNSLNNQVLVLAEENRNKGDQLAAEYVRKAHGEKHYEQYLGWVASCQMPPRKRQFLQTPEVTEEQRKEMQRRYLTATQFASRCFLGILRQYFNIPENRIIPVNGRMTADMRWLLGLPEKEREVSDTHHAIDATMAALADHKTVHRMAQYFKMKETAFRDPEGRWITPDGEVIEPPEIVAWPGLREDLLAKSGAVFVSRMPNRRATGKGHKDTIYSLRHVKKVLDELPSSGKLSLPSDAPRPTQRVALTALSDVQIKDILIEPSPILVDEANNKRLYDLIRQRLRAAQDKKDEKDRRTWAERAFGAEADTGPLRMPTNDGSEGPIVRSIRVYVDVLSGLAVRGGIAESDTIVRLDLYRRPNHRGEPRHYVVPVYAADLAAGWCPKKAAVAHKPESEWPEIDDSYDFLFSLYKGDCFRVWKSPEEPGPYLYMTSFDRSGITISGNFHDRSNKSDNGKIQPVRVSVGTSYKVEKFEVDLLGNLHLVKREPRPV

SEQ ID NO: 7667 - protein, 1250 aa, synthetic construct
  REGION 1..1250: note = Synthetic
MKKILGLDLGIGSIGWALIGIDEEKTEESKIEGLGSRVILLKENETTGITQGNGETINSQRTLKRSMRRNMDRYQQRRKMLAQLLEEYGMNFSESLLKLSPLELWKLRSDAARGEHLSLPEIGRVLYHLNQRRGYRSSKDENQENKNSTYLSAIGEREKEALSHDETPGQYFYRKLNESRYQTERGHTACSYRVKEQVFPRRMYEAELKQILTSQAVYYPEILSEENQARIFNIIMYQRPLRSCKHLVSICEFESKEIINNKGKKIQIGPRVAPKSSPLAQLCRIWETVNNIELKNYKNKSKKKQSTIPLFGDGRLSEFIYTLNNSERTAIAEFLSKNEKMSSKELLKILGLKKDDGFTVDKNVSKGIKGNSTYCALKTALEDEPDAEKYLRFDIHSEESSLVDTETGEILKKVSSSYLKEPLYMLWHTVYSINEKEELSKALNSKFGIVNPSTIDKLFHLDFRGEGYSNKSSKFICKILPYLTDGLKYSEACEMAGVNHSSSLTKEENEKRELTTCLEPLPKNSLRQPVVEKILNQMIHQVNAIVKENGPIDEIRIEMARQLKQSKEERNREFSRNNARERENKKISEIISGYGFKPSKNRIQKYRMWKESEECCMYCGKPIGVHEFLSGMDVEKEHVIPRSIFFDDSFSNKVCACRDCNHRKGQMTGFDFMQNEGEKKFKEYTDRVERLYAQYKTSKGTAGISRTKHDRLMTSKSEIPQDFIERDLRQSQYIAKKAIEILKGICRNVYASSGSVTDFFRHAWGYDKILHELNLPYYTKAGQTETITVNHKGSSWEEERIKEWSKRLDHRHHAIDALTIALTRQGYIQRLNTLSSISPDNESKIEGEYMRQGQNLDKWASEQFHFPYHAVKKAVSEIAVSFKSEGKVTVPGKRYIYKRGKAIHVQSGLMIPRGPLTEDSVYGIIKRVNSKTGIGELFKQPQNICSPKIREAIENRLSEFKGNITKAKNSLKKRPLAVSGKDTNPATAAVFESIVVIRYKIEAIKYSKVDQIVDIPVREAIKRRFEELNHSDEAFAKSLSERPIFRDNDCRFPIKRVRCATNNKLESMTVIKKDADGNPIGYSLNGNNHHVALYETPEGTVEISVIPFTHAVRRKQLGIPVIIKDPQQVWEIVSDRDDIEEDILSRIPMPDCKFLLSMQINDMFVIGLTDEELSDCKMNRDFATLTSHLYRVQSISWRDYVLIKHTSALTRSRKEQSANGNYIRITSLETLKKLNNKKVRINRLGKIEFL

SEQ ID NO: 7668 - protein, 1259 aa, synthetic construct
  REGION 1..1259: note = Synthetic
MKQILGLDLGVGSVGWAVIRQSDNTPEEISIEGLGSRVVPLNSDETTGFTKGNGESKCHERTLKRSMRRNLDRFQQRRKMLGQLLDELGMTFDSDLLRLSPLELWQLRADAADGKPVSAAQLGRVIYHINMRRGYKSSKDEESAEGADKRKQSEYLAKISGRAREAAEANQTPGQYFAVRLKESAYTTPSGATCCSYRIKEQTFPRHAYIEELRRILNAQRQHLPDILTDANIARIVDTIFYQRPLRSCKHLVSLCEFESHEITDSKGNKLIVGPRVAPASSPLAQECRIWEAVNNLSLINHHNRKRKDSPLPSLFDISSDARKLAYEYPIDDNDRRMIVGFLNENEKMKGSDLLKLLRLRKDDGFAVPAQVSRGLKGNVTRNMLRKALGDTPGADDLLRFDIEIVETDQYDEVTGAAKTMVSDSYLREPLYQLWHTCYSVSDFDEFDKAIRKKFGITDSEVINRLFHLDFRGMGYASKSAKMMTRIIPWLQSGYKYSEACELAGYKHSSYVTADENATRPLLQQLPPIQNGDLRQPVVEKILNQMVNVVNAAIDKYGPMDEIHVEMARELRRGKDQRKADYEHNSRREKDNDRIMKVLVEKGLKGSRTQIQKYRMLEESDFCCMYCGKPINDMEFLRGIEADREHVIPRSLFFDDSFSNKVCACRQCNAAKGQMTAYDFMAAQGDDTLTTFINRVNMLLDRYKKSGGREGISKTKHTRLLTALKDIPKDFIDRDLRLTQYITRKALDMLHAVSRNVMATSGSVTDFFRHAWGYDEILHSLNFARYDLAGQTDQTEVIHKGQTHLETRIAGWNKRLDHRHHAIDALTIALTRQAYVHRLNSLNASGGDSADGQSDSDQLTGNLNKWATSRPHPSVAAASDAVADIAISFKAGKKVTVPGKRYTYKGSKRTLAQDGLLVPRGALTKESTYGVRKMPIGLQPLKYLFNNPSEIDDIRILRAVEARLADNANDASKALKSCKRRPLTVEGSDVPVTEALCLKPTVVIRVKLTSVTPKNCSDIVDGAVREAVATRYEEVGGSADKFVKSLAERPLYRDAGGRLPITSVRIRKGLSPESITPVRYDSHGNAIGYAEFGNNHHIALYEKPDGTIEECVVPFAEAVRSRQANLPVVVTDPQALWQQIDMLDKELPESSLSRFPSHDSRFLMSMQVNEMFILGLSDEEFSDLVRDENRHELTSHLYRVQKLSSLYYDFKLHTSTLSDCTTDQMNCGNYIRIVSFSALKKYNPIKVRVDILGNIILPS

SEQ ID NO: 7669 - protein, 868 aa, synthetic construct
  REGION 1..868: note = Synthetic
MKGNTTRAAIEKALAGMRGAEDLLRFDLRFEESGSVDEETGEVLMRVSSDYLREPLYRLWHTLYSISDRDELGKVLAEKFGIADAAVADNLFRLNFREAGYGNKSAKFMCKLIPYMEREGLCYADACERVGTRHSESLTKGENDSRELLALIPQLKKGELRQPVVEKILNQTISLVNAAISEFGSFDEIHVELARELKRSADERSSDYERNNKREKENKACIEAIVELGLRPSANRVRKYRMWKESEQVCMYCGQPVGVKDFLLGIDAEKEHVIPRSIFFDDSFSNKVCACRKCNHDKGQATGYDFMAAQGEEKLQQYIDRVEKLHEMYKSSKGERGISKTKHDRLLTSRENIPQDFIARDLRLTQYIARKAMEILRQVCRDVFPTTGAVTDFFRHAWGYDEILHNINRPRYSEAGQTDMIERNNRKEERIEGWNKRLDHRHHAIDALTIALTRHSHVQRLNTLNAGGAELGNLDKWAAAQPHFSVAAVADAARRTAVSFRAGKRVSTPSRRYIRRGGKRVLVQDGLFTPKGALTEESVYGINRTRLHACPLKSMFAAPALICDEQVRKAVELRLAECAYDVKAAVKSCKKSPLTLQGTKTVVEVCDMWKEDYVIRYNVESITYKNINDVVDNAIRSIIADRFAEVGNNDKAFQKSLAERPLLSPGGQPVRKVRCLTGLKPDSMTVVRRSDDGNPIGFSKYGNNHHVALYIAPDGSLEESIVPFAVAVERRRLGLPVVVTNPEALWDTINNRRDELPDELLSRFPLPDRKFLTSMQVNEMFIIGLSDDEINTAIAAGRTELLTEHLYRVQRLSSGDYIFRRHTCTIADTTKEQTANKNYIRIQSADKYKELNPIKVTVDRLGRIHRQI

SEQ ID NO: 7670 - protein, 938 aa, synthetic construct
  REGION 1..938: note = Synthetic
LNLKEKRQVVSHLLHNEKLSERDLLKILGLKKDDGFAVDKNVAKGIKGSDTYVQLRNALGDYPKALELLRFEVHIETDNVVDPETGEVTEVLHISDSYLREPLYQLWHTVYSINDKDELAHALRHKFGITDGDVLSRMFNIDFSGKGYGNKSSKFMCRILPYLMDGYHYSEACEYVGVNHSDSITKEENEARELASSLQLLKRGELRQPVVEKILNQMVHQVNAILEAYGPIDEIHIEMARTLKQSKEKRAADNLRINAREKENSIIASRIQDEYKLRPSRNRIQKYRMWLESEHCCMYCGKPIGVNEFLAGTEVEKEHVIPRSLFFDDSFSNKVCACRECNRQKGQMTGYDFMACKGQSALDTYIDRVERLYDAYKKTKGVSGISKTKHDRLLTPYEDIPTEFLNRDLVQTQYIARKAIGMLKTVCRNVYSSTGSVTDFFRHAWGYDEILHDLNLPAYKEGGQTEIVEVRHKGQTHQEERITGWTKRWDHRHHAIDALVIALVSQAHIQRLNNLNTLKDTEGSGAYERQARNLDRWAESQPHFSYADTSTVVSGIAVSFKSGKKATTPGKRVVYKKGKRVVAQEGLLIPRGALTEGYVYGIVRVLNPKRKLKEIFSNPSLIVDKMIRESVNERLVRFDQDVKRAVASCKKEPLGKDKDGNPVSEFDCWELRVVKRYGIETVQCKNIAKVVDPHIRNLISDRYETLRLTLGNPADGKLVKAYQESLTTDPLYSDEAKHHKIVTVRMFADINQDNMMVVQRNADGKGIGFSKLGSNHHIALYRTPDGDIEECVVPFAHAVMRKNLGIPVIIQDPDTAWTLIDNLKEDVDESLLMNIPLPGWKFLFSMQQNEMFLIGLSEDEVKDMNKMQLSNHLYRAQALSSKYYIFKRHTCSLSDKGPEMLANKQCINIRSFGIIQEREIWKVRIDRLGNSIILPTYD

SEQ ID NO: 7671 - protein, 1081 aa, synthetic construct
  REGION 1..1081: note = Synthetic
MSIHLARSPGHTQSGIARTTIGRSALRYRLGLDLGANSLGWTVLLLGREGAPNGLVAAGVHLFTDGRDPQTKETLAAERRAHRAMRRRRDRYLRRRLRLLAALRQAGLMPSDPAAAKALEREDPLTLRKVGLERRLTPHELGRALFHLNQRRGFKSNRQTDQDDKDAGLIQRGASALEAAMRESGCRTVGEYLYVRRSRGEWVRARPTGTGKERTYPFYPQRRMLEAEFRALWETQAKHHPELLSDALREELFRIVFQQRALKPVDPGRCSQFPDEKRAPWAQPLAQRFRLLQELANLRVIDAEQCARPLTLRERDRVLAELTGQGKDRKPKAKMGFDRLRKLLSLPPYPESRFSLEDERRRELKGDEVGTALARPTHLGPAVWAGLKEERRAALVTALLETEDEEELVAWLMAEHALSEERARHIARKSPLPGSHCRYSLKALAQLVTILEREARPDEISGQPRPIRYDEATQLAGWHHSDRRTGEIHDRMPYYAAVLPTAVVDAPATAEPEAVRHGWVANPTVHIALNQLRKVVNALIARYGHPHEIVVELGRELKLNKEQRKRINSEIQENTRRRERWRTRLAQELDMAKPRGGDFLKMRLWEEMPPERRICVLSGQQISLGQLFSDEIEVEHILPYSRSLDDGFMNKMLCFRDWNRTKGNRTPYEAFGSTAQWPEIAQRIRVLSKAKQDRFRADAIAEPGEFLARHLNDTRYLSRLATHYLRTVCHPDRVWCVPGRLTAMLRARWGLNAVLTDANFKDRTDQRHHAIDAFVVAMTDRGLLNRIARLAGQAEEAGLDRLLEELPPPWPGFSLSDFRSRIRKIVVSYRPNRSHAGSMHNDTAYGLCGEPDAKGRRRVRHRVPLASLKSRSEVEGLCDPALRARLLAYLDAPERRDEKLAAVLEAFGAETGVRRVRLYDSMTVIPILDRTGRAYKGYKGDNNWCWVIFETPRGTWSGRPISVFEAYREMAGKPPEAPPGPEVMRLFKDDPIAIDDPSGDARRLVLRVVKFSGNALVTAEHHEGGKLQQRNASADDPFKWFEKSAEWYRQHNMRQVRVSPIGRVHDFGRPPRPRARLEDRR

SEQ ID NO: 7672 - protein, 1519 aa, synthetic construct
  REGION 1..1519: note = Synthetic
MSKRILGLDLGTNSIGWAVIDEVQEKIVDAGVRIFPEGVVSKTIGSGDKEETKNATRRKNRQTRRQFYRKRMRKAKLLEVLIEQGMCPLSLKELDLWRRWDKEKKSQGRKFPASDEFMKWIRLSPYELRARAVAGTVSAHELGRVFYHMIQRRGFLSSRKGEAKDSETLFEKGKPGVLPINTTVSEMAKTGSQSFGQYLNAVVPKTGKPYAKSCDSEGNEIRARGRYATRQMYIEEFEQIWKAQADKLGLDGRTVVYRKVRKLQGGEDSARNQKKAEKLRKKFGADRVCFERKGKHTFLVSTQDMPFKELLAGKIWEEDGRLKFKSNESVLFWQRDLRSQKGTLGNCTFEDGLPVIQLDGTVRRGKDGKPVTYSKKPCPVSHPAFELFRAHQFINNIKYGNGQRLTREQRATVLELMNSKDRDFDFKEVVKKLELFSEQFNYEKDFKVPANSTICKLSKLDKGKEWQSVLEEHLPEIWHCFYTYTDSDMLCEKIARTYGVRLDLGKVDKVRFKDDYSRVSLKAIGNILPFLKKGLFYSTSVILGGVKNAFGRRWDDYLTDETKEKIQADVLEVLKEKNGEGDVIEKIKAYLSDPANRYAFSENAPAFGKLYHHSQDVERRNSNAAKLSPVKDVRNPIVQQALHEMRMVVNALMAKYREDDPNFRFEFIHVEMGRDLKNGKKRRRELSRVIDENKKKNDEAREWLAEYGLRPSRENLQKMLLFMELEKRAGRAQSPYTGKTIPLSNLLGANNTIQIEHIMPYSKSLNDSFGNKTLCESEINGMKGDETPYEFYLRNSDPGLWGASSWDDVARRAFALLPYEKARRFASKEPVDAEKFVVRQLNDTRYIAKKAVEVLSEICRDVHVMPGQLTSELRHLWGLNNVLESSIGADRLLGDLAASDVGDYYLVLDQDGQAISLSKRKNNQPDTDANEILGAGGVEKRKFDAKHLVLKLDAPEEADGKYWARLVLKPNLKLTPKYLERPDEGEDYIVFKGMIRKGKFNHDSIPVVLDAEQDDGSCWVKLFLKSKRPVDAKSNPRTTKKEIKLFGQVKDGVFECYIYKCKTDAPDGKYWLILEPDFDAPQFVRAVNPPPEHADSEIIMQGTVDESGIFVSDIDRDFVAKTDKVPGKYYAVAELFSHTPRFHLMENPVPDIAKGQRVVEGTVWIDKYSAEIKFDPKKNREDQRHHAVDAITIALTKRSYLNALSRFRSKEHPEEYKPVFSAPWEGFENDVKSAVEKILVSYRKDERVVSKGKKGTAVRGQLHKDNVFGEYVNLTDGSKSYHRRKALTALETHKQAEKIVDETIKKLVLDHLRDNCGIDIKSKKGVKIPADAFFKDGKPRLFLPPNPKKNGSPVPIKKVRLEETINNARQWKKGKNQYVNPRNNHHVLVYKDSEGELKEQIVSFWDAVQRTMKKQDVYELPDDADEQVLVLEKNDMVVLGAGDIEFGEISCDPALLSQKLYRVQKLYSGDDGFEYVFRYHLASTLNNKNEEVMIKSFKKFRGVNPIKIGISELGEIARC

SEQ ID NO: 7673 - protein, 1137 aa, synthetic construct
  REGION 1..1137: note = Synthetic
MGERKFRIGLDIGIGSVGWAVISYTNREDARIEDFGSRIFVSGELNKGRERTSQERRAFRGVRRLERRRKWRKERLKEYFIKLGLLTRREIEEMGKAPCQDIFSLKVRALEEKVRPTELLQILLHSANHRGYRDFYEADSEGFSDADSLEDEKETRVNKKAAQDFDREFAASGCRTISEYLWKHCRNAAGQVDFRNRQHRADLRLIRRCHVEDEMKKILAQQGRFYQELSASVREIISSIIFAQRFFEDGPGNKNDPTRRYTGFLDKLGMCPFYPTERRGFRNTVLADIYAVTNALSQYRYQGKDGRSGLPSPAAREIVETTLRDGNMNLTMAKAILKKHQVYLFKSAYLDETALGKAIKFLRPMKRIAEKAGIAWTSLLGDDPLSMEDPPLLHQIGEVLAKYKTPRYRDDELKKLFAGTTIEGNQGFREELSAASFSGASACSYHYMHDAIEAFMAGEIYGDFQARRIKEENETSAPQRERYAQLPARLLEKDEDIRDNPVVYRAINEARRVVNAIVRLYGAPEYINVEVGRDLGRSFADRERWKKQNDDNQKKRDKAVEAIAGHLHCAADKVKPIQVERYWLYQEQDGKCLYSGEAIDLKDALDPNGTYEIDHIIPYSLILDNTLNNKVLVKWGENQRKGQRTPLMYMADSQKAAFLERVNGIFNKKGSPWSKRKYDYLLQDTLDTTEPEVRQLIDAWKSRNINDMRYITKYVFNLFQRYLQFAEDGKGENSIHVHAIRGAITAKFRKTWLNPKTWGGKKERKSNLHHAVDAVVLANLTPAYIEIASDNMRLQQIFRRYHKKESAEYLDYMKRSVQKMKTYYGFSEEYTRFLLRCHDRVPSFVRRLREEVDIRFNDEDAERFAIQMKEFYGDSANFLVPPHMPLTSHKAERRYRGAIADANPIKVREIDGVPHKISRQSIFAIRKKDLNTLYSYDRLLKDTLHQILDGEKENYTIEKYLKEQGRAVFTLPNGTVVHKVSVIREAVSNFYRKQISTENYSMLGGLKYYCVEIYQDIKGKTRCRGIRYIDLVKRDKKLYLKEKEPPTQYEKHIMYLFAGDYVEAFDKDGVCYLQGTYCSVYAIQAQRFYFKCRNAEESIDVKLKTKGVIKKYSVDLLGHKGGEITCSVPLSSIPAND

SEQ ID NO: 7674 - protein, 1133 aa, synthetic construct
  REGION 1..1133: note = Synthetic
MGERKFRIGLDIGIGSVGWAVISYTSQKDARIEDFGSRIFVSGEIKGSDRASQIRRGFRGVRRLERRRRWRKERLKEYFIKLGLLTRQEIEEVAKTPCQDVFALKVRALDEKVSPEELLQIFLHSANHRGYRDFYEGEADDETFEDEEAAEETRVNKKAAQDFDRDFAASGCRTISEYLWEKCRNPAGQIDFRNRKHRETLRLIRRRYVEKEVSLVLTCQSRFYRELSPAACEIIPAILFAQRFFEDGPGNKNDPNRRYTGFLDKLGACPFYPRERRGFRNTVLADVYAVVNALSQYRYQGQDGQSGLPAAPAREIIETLLQEGSMNITMVKAILKKHRVKLFKSAGLDEKALEKANKFLRPIKRIAEAAGIPWKALLEDEPLSYENPPLLHRLGEVLAKYKTPKYRNDELKKVVSGTVADHEDFCRTLAEKPFSGASSCSYHYMHDAVEAFMAGELYGDFQARRIEEETAAAPQEGQRFAQLPASLLKEDEDIRDNPVVYRVINEARRVVNAIIRTYGAPECINVEVGRDLGRSFLERQQLEKSKTANERKREQDKEKIAEILQIDKENVTGGQIERYRLYKEQDGKCLYSGNPIDIEAALDTKGAYEVDHIIPYSLILDNTLHNKVLVEWDENRRKGQRTPLMYMNEEQKTAFLERVNGIFSKKGSPWSKKKYEYLLQESLYTDEARQLLTAWKSRNINDMRYITKYVFNLFQQHLQFAPDGKGERSIHVHAIRGAITSRFRRTWLNPKTWGTEDKDRKTYLNHAADAVVLANLTPAYIEIASDNMRLQQMFRRYHKSESAEYNDYLERAVRKMKTYYGFSEEYTRSLLRSHDRVPSFIGQLAREVDIRFNDLEEERFAVQTREFYGENPDFIIPPHMPLTSHKAERRYRGMIADANPIKVRVINGEPYKIMRKSVLSIKAGDLENLYTNDRLLKETLQQMLGGQEKKYTVEKYLKEHNLSAFSLPNETFVYKVSVVSSVISNFYRKDITDGNYSMMGGLKYYCVEIYQDHKGKNRCRGIRFIDIVRKNKKLYLKEDKRPENYKQHVMYLFAGDYIEAFDARGKCYLRGTYCSVDSIRHQRFYFKCSNASETKSVTLKAEGIIKKYSIDLLGHKGGEVKCSVPLSSMPAKD

SEQ ID NO: 7675 - protein, 880 aa, synthetic construct
  REGION 1..880: note = Synthetic
MGERKFRIGLDIGIGSVGWAVISYTNREDARIEDFGSRIFVSGELNDGRARTSQERRAFRGVRRLERRRKWRKERLKEYFIKLGLLTRREIEEMGKAPCQDVFSLKVRSLEEKVRPTELLQILLHSANHRGYRDFYEADSDVFSDADSLEDEKETRVNKKAAQDFDRDFAASGCRTISEYLWKHCRNDAGQVDFRNRSHRGVLRLIRRCHVEDETKKILAQQGRFYQELSAAVREIIPSIIFAQRFFEDGPGNKNDSTRRYTGFLDKLGMCPFYPTERRGFRNTVLADIYAVTNALSQYRYQGKDGRSGLPSPAAREIVETTLRDGNMNLTMAKAILKKHQVYLFKSAYLDETALGKAIKFLRPMKRIAEKAGIAWTSLLGDNPLSMEDPPLLHQIGEVLAKYKTPRYRDDELKKLFTGTTIEGNQGFRKELAGTSFSGASACSYHYMHDAIEAFMAGEIYGDFQARRIKEGNETSAPQRERYAQLPARLLEKDEDIRDNPVVYRAINEARRVVNAIVRLYGAPEYINVEVGRDLGRSFADRERWKKQNDYNQKKRDKAVEAIAGHLHCAADKVKPIQVERYRLYQEQDGKCLYSGDAIDLKDALDPNGAYEIDHIIPYSLILDNTLNNKVLVKWGENQRKGQRTPLMYMADSQKAAFLERVNSIFNKKGSPWSKRKYEYLLQEALDTPEARQLVDAWKSRNINDMRYITKYVFNLFQRYLQFAADGKGENAIHVHAIRGAITAKFRKTWLNPKTWGGQKERESNLHHAVDAVVLANLTPAYIEIASDNMRLQQIFRRYHKKESTEYLDYMKRSVQKMKTYYGFSEEYTRFLLRCHDRVPSFVRRLSEEVDIRFNDEDAERFAIQMKEFSRPAAPATDFS

SEQ ID NO: 7676 - protein, 1460 aa, synthetic construct
  REGION 1..1460: note = Synthetic
MAKIGLDIGSSSLGWFISKNKKGVITFETGMSKGQSGGYTSPTKDRREARSKRNLIRARKYRKWELLKVLLNEYVPLNENELNDWCHYQKGKRRKFPESDKFLKWLACDFTYQDGVKYKNPYELRVKALDETLSKHEFGRALYHLVQRRGYKDIGETDQETEKQKERRKTGGFQNALDTNRTIAEALIVEFLDKGDRARNQYPYREEYKSELELICKSQGFSVITNEKGDYSDDFVRNLWKAIIWQRPLKSQKGNIGKCTLEPSKLRCPVSHPAFEIFRALQFINTIKYFDADNKKQSIDKELRDKLFINVFLKKDSNFIFEDIKEFLNMETKTIKKYNYPINPKNNKYDTSIAGMPICKGLISLLGDGTQQALLEIENFNIGNAPKIKNGYSIYDIWHIVFDFDEQHLGKFAVEKLGIDNVIRKRKGEDISISPLVELKRKFLQGYSDVSLKAICKIIPFLKEGYLYNEAVVLAKIPELMGTNWQSSQQMILDILKESNKIYQEKSMVASISNNLIDKHKGQTRSMIDGSEEQVFAYKDFSYTLAEDDIEQVKIACINHFGDKTWNDIQNKDEIIQKVGLEYQEYFYDEKRAYRKTETLTEIFNSLLNEKNIILNGELYHHSNRENLYNKNLKVNFKTGEKYLPKYKNTETEILPLPFIDSIKNPMFNKSMSIVRKLLNELIINGDIDQETEVTVELARELNDNNVRAAIERYQKERRDNREKIRKFLEQYNQEENRSINIEDNIPLFELWTEQIFEETEDESRNKIQNKNRLDILREKEDVKRYELWTEQKGQCMYTGKMISISQLFSNEIDIEHTIPRSILPDNTLANQTVAFSKYNRDIKGAKTPFYCENYSKDTPYGTSISPRLDSWRKLRDYYKSQYESRRRAKGAEDENTKNKRIQDKHYYKLHFDYWNDKVNRFEAEEIKESWARRQLVDTQMVSKYAREYLKLYFKKVAVQKGSVTADFRKIFGFQEQDEIKSRNKHTHHAIDAAVLTMIPTNSSYREEILKEYYAAVENKDKRKIDEIRKKMIPPYFNVQSLINEIESTTLIVNYQKDKILQQTSKTVRKRGAIQYVKNKNGEFILDENGDKIIKKAKGDSIRSSLYAQTYLGKIRDVERYADNQPQRENNNWKYKQGKDEFIFVKRENISKVKESDKLIESIIDPNIQQLVKDQKSNAEIKDFQGNIIRHVRIKTSTGREVKERLNYRSKYDYKNKFYSEAGSVPYSILAQKIHNGAIKRELIPISSFEIAKEFKKYGNFVIENFISEKYPEFDQWDKKQLLKTGQKVIVLNEDGDFEKRLNIDFQQKRLFVISQLSEGSIWLNYHLNALSKDEVKKSIAFIKDEKLLEFEKEYNLPDIIEDVNIQDNKKRREDFLNRKFRFDTIGNSYRLSRLVETIGLEKTNEVKKELDKYKAIPSTIEIEGETPLLKMGKEKWNFLFEGEDFEISLDGKINWEANL

SEQ ID NO: 7677 - protein, 1460 aa, synthetic construct
  REGION 1..1460: note = Synthetic
MAKIGLDIGSSSAGWFIDKDKKGVVTFNTGMTKGTSGYTSPTKDRRKDRSKRNLIKARKYRKWELLKVLAENYAPLAKNEVLNWSSYQKGKERKFPESKKFLQWLACDFTYENGEKYKNPYELRVKALDGKLTNHEFGRVLYHLVQRRGYKDIGETDKETEKQLERRTEDGFKASLENNRSIAEALLNDFLYKGRRARNQYPLREEYENEFNLICSKQGYSIEKIKKEVYKDDFVNKLWKAIIWQRPLKSQKGSIGKCTLEPSKLRCPISHPAFEIFRALQFINTIKYFDVNNEKQSINEELKSLLFNNLFLKAEGNFKFQEVKDLLDKKTEKPYKYNYPINPENGKYETSISGMPVCKGLISLFGDFAKTAIGEIEQYNITTAPKVIKGYSIYDLWHIVFGSNEQYLATFAIEKLQLENVKRKRKDEHYEISPLVELKRKFLQGYADLSIKAINKVIPFLKEGFLYNEAVVLAKIPELLKTDWEASRNTILDCLSDTNKEYKRKQLIATIANNLVDKHKGQTRAMIDGNEDSTFAYKDSSYLLKDDDVKSINEACIAHFGEKTWEKFDDKDNLIRNVGLEYQEYFFDSKRAYRKVPTITEIFKTFLSDKGINLNGELYHHSNRENLYNRNLVTNFKTGEKFLPKDKNTNIEILPIPLIDSIKNAMFNKSMSVVRKLLNKLIINGDIDQDTEVVIELARELNDNNKRIAIEKYQKERADNREKIRRFLQQYKSEENQSLNVEDNIAIFELWSEQIFEETEDENKNIVKNENRIRILKEKEDVKRYELWMEQKGQCMYTGKMISIAQLFSNEIDVEHTIPRSILPDNTMANQTVAFAKYNRDIKEARTPYYCENYSKDTPNGTSISPRLGIWRKLRNYYEIQYNSRKKAKGPEDEAAKNKRIQDKHYYKMHFEYWDDKLSRFEAEEIKDSWARRQLVDTQMVSKYAREYLKLYFKKVAVQKGSVTADFRKIFGFQEQDEIKSRNKHTHHIVDAAVLTMIPTNSSYREEILKEYYSSVENNDKRKLAEVRRKLIPYGFNSQDLIKEIENTTLVVNYRKDKILQQTSKVVRHRGKVQFVKNKDGEYVKDELGNKIVKIAKGDTVRSSLFAQTYIGKIKDVERDENNKAKREDGDWKYKTGKDEFLFVVRKPIADVLSKIEDIVDPVIKELVRAQKNNQVIKDYQGNIIRHVRIKTKSGREVKERLNYQSKYEYKNKFYSEAGSVPYAILVQKIVGDKLEKDLILVPSFEIAKEYKTNHKFDVQNYLRRYDATNKLNYSKWDKAQLLNVGQRVIVLNNDEDFEERKNIEFQKNRLYKITQLADGSIYLKYHLEATEDGDIDKNVKLEKDQIVFEYDKKYNLPDIIEDESINNVVDRKKKFEKDKFSFVGLNDNRLKRLIPFMGIEGVKKLKKELDQFKKQSSFIEVEGSTPLLKMSKENWNYLFEGEDFNMSIDGQITWKNYNP

SEQ ID NO: 7678 - protein, 1457 aa, synthetic construct
  REGION 1..1457: note = Synthetic
MVKLGLDLGSSSAGWAKNEDGEIVKNGVVTFNTGMSKGQSGGYVSPTRERREARSKRNLIKSRKYRKWELLKILVQMKLVPLEEQELQIWSKYKRGRKRRFPENEKFLMWLACDFTYEGGEKYKNPYLLRVKALDQLLSKHEFGRALYHIVQRRGYKDIGETDKETEKQIERRNEEGFKSALEINGTIAKALNEEFLNKGKRARNQYPLREEYQHELEEICKAQGYNVEKEEKEEYKDKFVKSLWKAIIWQQPLKTQKGNIGKCSLEPTKPRCPVSHPVFEIFRAWQFINSIKYFDDNNEKQSLRQGMKEQLFLDKFLKKDSNFKFEEIRKFLDKKFGKAKKYNYPVDRKTGKYDTSVSWMPICKGLIELFGEKAKIALGEIEQYHIGNAPKIIGRYSIYDLWHIIFEFDTQYLENFAIKKLNIQNKIITRKKKEISISPVVELKDKFLQGYADLSLKALRKITPFLKEGYLYNEAVVLAKIPELIDGSWQEQKDIIVKVLENANQLYNERRRVINIANNLIDKHKGLSPQEVFAYKDFEYTLKPDDVEKVEKACEGYFGETSWEYVEDKEKILQEVGFEYQDYFYDTKRAYRQSSTLTDIFKEALKDNEIELKGELYHHSNRENRYNKNLRINWDTGEKQLPTYKDTGIEILPVPYIDSIKNPMFNKSMSILRKLINELIIAGEIDEDTEVVIELARELNDNNKRAAIERYQNLRRDNREKYRLFLNEYKENEKSNLNVEESIPLFEMWTEQTFEETQDENGQKVSNRNHIEILKEKDAIKRYELWAEQKGQCIYSGKMISITQLFSNEIDIMHTIPRSILPDNTLANMTVGYARYNRDLQKQKTPKQCNNYTKDVDGWGTAIEPRLEIWKQTRDRWEKRYKDHSKPKGNEDEDKKNKRIQEKHYSKIHFDYWKDKVERFEADEIKDSWARRQLVDTQMVSKYAREYLKLYFKKVAVQKGTVTADFRKLFGFQEEDEIKSRNKHTHHAIDASVLTLIPVNSSRREEILKSYYKADEDKDKVALKRLRAMVKPSSEFNPQELIREIEEKTLIVNYQKDKILNQAVKKVRKRGKIQYVKDRQGKYVLDEDGNRIVKYAKGDTVRSELYAQTYLGKIKDVERYDDGQPKRKNGDWEYKTGKDEFLFVKREDINKVKSSDKLIKSIIDPVIKDIVDKQKKNNVVKDYQGNTIRHVRIKAKTGREVKERMNYRSEHDYKNKFYSEAGNIPYAVLLQKITSGKIEREMLPIASFEVAKAYKKYGKFNFDSYINEQYPEYIKWNKELLKVGQKVLVIKDDKEFDKKDSLDFQQKRLYVITQFSEGSIWLKYHLNAQSKDEVKKSISLKKDELLRKYEIENNLPEIVEDESIQDRKERMDDYNNRKYRFDTINNSFRLTRMMEIVGEERTKEMKGELDKYKAIPSSIEIEGETALLKMSKENWNYLYEGKDFEVTMLGKLNWLK

SEQ ID NO: 7679 - protein, 1453 aa, synthetic construct
  REGION 1..1453: note = Synthetic
LSFSDTKLRKKYIMAKLGLDLGSSSLGWAIRDGDEISKKGVITFPSGMVKGQGGGYSSPTRDRREARSKRNLIRARKYRKWKLLEILCKNSEYVPLNILQLESWSKYKKGQARMFPENEKFLRWLSCDFSYQGGEMYKNPYELRVKALDQPLTKHEFGRVLYHLVQRRGYKDIGESDKETESQIKRRGESGFQKALDNNRTIAEALKNEFLDKGIRARNEYPYREEYQNELELICKAQGYNVSRDGKYDYQDQFVLSLWKSIVWQRPLRSQKGAIGKCTLEPSKLRCPVSHPIFEISRAWQFINTIKYYDKDDEKQNLPEDLKELLFNDVFIKKDNFKFEDIRRYLDKKFKQKTKYNYPLSKKTGKYETSVSGMPFCNGIIKILGDVAYDSLMNIEKYNIGNAPKIINGYSILDVWHAVFDFDEEYLEAFTNEKLKVENTTVKRNKKEVSLSPLVILKNKLTVGYGDLSVKALKKIIPFLKQGYLYNDAVMLAKLPKLMGNEWESQKEDILKLAKSSQETYNWCRIIVGITNNLIDAYKGEVEDWRETGKSVKAWKDFGYLLTEDDKREVINACIGYFGETSWDKRKDKETIISEVGKEYQEFFFDSKRVYREMPTLTSLFFETLSVNGIKLSGELYHHSTRKNIYGTKVTDKNTGKDILPIPLIDSIKNPMFNKSMSILRRLVNELILKGEIDKDTEVVVEVARELNDNNKRVAIERYQNERRKKREKIRAFLEEFKTKENKSFNVEERIRDFELWCEQSFEETFDKSGKKIVNKKNSEILSEKKAIRRYELWMEQKGQCMYTGKMIPIAQLFSNDIDVEHTIPRSLLPDNTMANLTVCYAKYNRENKGKLMPFFCENYEEDLAGIGTAIKPRLREWEKTMDNYKSLFESRLKSTGNEDEAKKNKRIQEKHYFRMHYEYWKDKVERFTTDEVKDSWARRQLVDTQMVSKYAREFLKTYFKKVAVQKGEVTAQFRKIYGFQETDKIKSRNKHTHHAIDAAVLTLIPVNSSRRDALLDKMYKMEEREGKQFSTKPFDLFNSQELINVIESQTLIVNYEKDKILQQTVKNVRKRGKLQYVKDKYGNFVTDEKGEKIIKKSQGDTVRSTLYKQTFIGKIRDVGRYPDGQPIRENGEWKYKTGEDEFLFTERKPLKDVLSKVDDIIDPVIREIIRTQKSQATDPQGNKIRHVRVKSKAGQVVKQRVNYRSKHEYKNYYYSAAGSIPYAVMLQKNINDKIERKIIPVASFEVSKVFMEHKKFSLELYLEMFHPNLSGYQDTKLLKVGQKVLMLNDDSEFEQRKDMEFQKNRLYRITQFANDGKRIMLKYHLEAQAITDVRKNVNEQKHKILTSEEVKMGISEILENTSITNLADRKKDFEKRKYNFNDRLNKIESVSNKLKKTQVKKMINNYQTEYSSFPENIIPSFLKISNNNWNFLYENYDFKVSILGKLIWLKND

SEQ ID NO: 7680 - protein, 1439 aa, synthetic construct
  REGION 1..1439: note = Synthetic
MKKLGLDLGSSSIGWFLREDEEILNYGSIIFDSGMVKGTSGYSSPTKDRREYRLKRNPIRARKYRKKLILQTLVDNGMVPLESYELKKWTNYRKGKYKEFPSNSNFKDWLACNFRFDGGTVYKNPYDLRVKAINEKLTKLELGRALYHLAQRRGFKDIGETNKETQKQIDRRKESGFQDALSNHRTIAEALQKEYLEKGMRARDNYPYRDEYEDELLQILSKQGFSLKKNDKGKFKNKFVSDTRKAIIWQQPLKTQKGNIGKCTLEPKKRRCSVSHPLFETNRAWQFINTIKYKKNADDSFEFIPQKYRDHLFHSVFLNQSGNFKFEKLRKALDKLFQKKMIYNYRLDEKKGTYETTIAGMPFCKGVIKILGDKALTDILSIEEYTQSSMPKNHENYSLLDIWHNITEFDDENLSEFGKQKLNLDFIERKRKGEIESTSPLLILKETLPQGYGNLSQFVLRKIIPLLKKGYIYNDAVLLANLKEALGVNYERQKDKVITVLNEATKFYKEHKTTIIITNKLIENYKGEIEANLNGQENTLFAQGDFQYLLKDSDKDDIIKACINHFGENRWKNVPNNESIINEVGKEYQEFFFDKNRAYRKLETLQDIFEDLLNKEEIIFKKPLYHHSNRDNIYGNPIKYRNTDIEILPLAKTNSIKNPMFNKAMSILRKLVNQLIVDGVVDNDTEIIVEVARELNDNNKRIAIERYQKQREAKRNKIRVFLEEYKAKEKSSLNVEENIHQFELWEEQIFEETEDETGSAYKNVDRKEILKENNAIKRYELWMEQKGQCMYTGKMISISQLFSSTTNIEHTIPRKLLPDNTLANQTIAFADYNTNIKGTELPVHLPNYSKNVAGVGTEIEPRLQQWKTIRDGFKKAFETRQKPNGAEDENTKNIRIQDKHFYRMHYDYWNDKLDRFTRTDVNDKWARRQLTDTQNISKYAREFLKTYFFKVAVQKGSTTAEFRKMLGLEDKDNQKDRNAHTHHTTDAAVLTYIPTNASRRDKLIKNSFALKDETDKQLRYTPYPNFNAQSIKHNIENNTLIYNFTKDNITTQTFKKVRIAGEIQYKRDTNGNKILSKPLISRGDTIRASLFKDSFLAKIRDVERFDDGQPKRNEDNTDWVYKKGEEEFIFVKNEPISKINKAKIKDIVDPELAKLVESQLGKDKILDWQGKVIRHVRIKKKAGRQVKSRVDYKSEKDYKNSYYAESGSIPYGIMLFNPKSDQRILLQAHAYQIAEVFREKRKFDIDLFVDKFYPDYSSFKKLLLRVGQNLIVLNNDEEFEKRLEKEFQKNRLYKIVKIDNGSLWLKYHLTAIADNDLDLVVKQKKDELLWNYEKELGLGKVREDDSIKDLKTRNEVYERKKFSFSSYNDFRIKRIVDNFGKQKASKIKSELSKYKKVASFIEVEGETPLLKLNTSNSWNFLYENTDFDISILGKIKFKE

SEQ ID NO: 7681 - protein, 1428 aa, synthetic construct
  SITE 1200: note = misc_feature - Xaa can be any naturally occurring amino acid
  REGION 1..1428: note = Synthetic
  SITE 244: note = misc_feature - Xaa can be any naturally occurring amino acid
MKKLGIDLGSASCGWAIRDDNEIINKGVITFSTGMTKGQGGYSSPTQDRREARSKRRLIQARKYRKWELLEILIQNDLVPLKIKALELWSKYQKGIQRKFPETEEFLQWLACDFSYDNGDSYKNPYEIRVKGLDGKLTKHEFGRALYHIVQRRGYKDIGDNNDETKIQKERRDEGFGAAIHEHKFISKALQIEFLDKGKRARNEYPFRDEYEEEFEALCKKQEYDVSKNKKGEYNNDFVKKLRXTIIWQRPLRSQKDKVGKCTLEPNSPRIPVSHPLFEIFRTLQYINTIKTVNENGEKTQIPKEYRDSLLIDEFTRRDSNFKFSIIKTYLDKKFQQKMEYNYLNKRTGKYDSTVSGMPVCKNFIALFGKEIVTDLLKLSDYNITSEIPKTIKGYSIHDLWHLIFNSDDVSFLKDFAENKLKIESTFKEKDGTKIRENEFANLQKVFMQGYSDLSAKAIRKTIPFLQEGKLYNEAVVLAKMPELLGDDWQDKKEAILNAIAETSVLYDYNSDVINIVNGLVNAYKGLNYDELFAYKDTDYLLAESDISDIEKACFNYFGGKTWEIKEDKEAVLNDVKNEYQFFFKDSKRTYRKKVTHTELVATSLKKIGIELNGDLYHHSDRKNIYPKPIFSEKYELNILAVPLIDSIKNPMFNKAMTILRKLINELIIQGEIDEFTEIIVEVARELNDNNKRAAIEKYQNERERNREKYREFIREFNSKENKKININERIDDFELWTEQIFDENNKKIDDKSSNRLSILKETKAIDRYELWTEQKGQCMYTGKMISITQLFSDEIQMEHTIPRSLLPDNTKANQTVCFRKYNNDIKNNQIPFDCPNYANDDSNGSAIKPRLATWQKLKDKYQKDFNDNKRAKGNEDEKKKNERIVRKHYAKMHLDYWTDKLNRFTCDEIKESWARRQLVDTQMVSKYAREFLKTYFKKVNVEKGIITAQFRKIYGFQEEEEIKSRNKHTHHAIDAAVLTLIPNNASRKKALLEKSYEKQERREGQYTTSPYPNFNAQELIRNIEETTLIFNHTKDKIISQTYKKVRKRGEIQKNKDGSIKWMKGDSIRGDLYGQTFLSKIKNVELDENNKPKRDEKGAWEFKKGKDEFTYATKKPIEEVKAKYIKDIIDPNIRTLVGNQKKNNKIFDHQDKEIRHVRVKVKKGRVVKERVNYRSKNEHKNFYYASAGEIPYAVMLEKIXDGKVEERKMIPIAIHEVAKVFKEHRQFNADLYLNFFHNEIKRNYNNWRLLRIGQKVMVLKNDSEFEEVVDINFQRNRLYKITQFKYDGSKIMLSYHLEAQSKKDIDTQIKEIKHSILTNFELEIGLSKLIPNENIENAKDRNEDYQKRKNNFKGRLEIIKNHSNGGSETSKKIEAEISKYKTESSSIEIEGMTPILGFSQKSWNFLYEGEHFEMDVLGNIEVLVEKLT

SEQ ID NO: 7682 - protein, 1470 aa, synthetic construct
  REGION 1..1470: note = Synthetic
MKKLGLDLGSSSLGWTILDIDESKIIKQGVITFDTGMLKTQGGYTSPTRDRRITRSGRNLIRARKYRKWSLLKILIKHDFVPLNEEELNDWSKYEKGKIRKFPSNTRFLKWLACDFGYQQDGKKYKNPYELRVKAIDEKLTKHEFGRALYHLIQRRGYKDIGGQDDETKKQLERRSKEGLDNAIKENRTLAEALQKDFLQKNKRARTQYPYRCEYEHELEVICKQQGYNIDKDNKGNYQESIVEEIWKAIIWQSPLRTQKGNIGKCTFEPSRQRCPISHPIFEVFRAWQYINTIKYLDQDDNKQPLPIEHKRELFDFLLKKDKNFKFEEIKKFLDKKAGKDQKYNYISKEGKYDSSVSGMPICKELINLFGDKAKEAILSIEDEDENKSSKIVKSKIKRENKKEAEADYSIYDLWHFLFNFDKEFLETFAQNNLGIANELSKKGVESNPMVKIQEKMIQGYADLSVKAIRKILPFLKEGYLYDKAVLLAKIPDILGDRWIEHKSLILEILEQSYNTYIYRKQIIDITNKLIDKHKGLPCEDKFAYKDYSYTIDQDDETDIECCCENHFGEKSWPKVKNRDEIKRDVKEQYQSYFADNKRAYKTIPSLTEVFKKLLNDNQIALNGELYHHSNRENIYNKKLDINYKTGEKRLPTRKNNKGIEIEILPIPLIDSIKNPMFNKAMSILRKLVNELILNGDIDQDTEIIIELARELNDNNRRIAIERYQKARREERDKIRTFLEQYKTEENQHFNIEEKIPVFELWTEQIFDKPKENKHFNKAQEILSKEKEERYKLWLEQKGQCMYTGKMISITELFSNETDIEHTIPRSKLPDNTMANKTIAFKWYNEQIKKDKIPSECPNYLKDEEVGTAIIPRLDKWKELRDRYQKLYEDRKKAKGREDENAKNKRIQDKHYYKFYFDYWNDKVSRFEATEIKSGWVRRQLTDTQLTSKYAREFLKLYFKKVFVQKGSITSEFRKILGIQGQEEIKERGRHTHHTIDAFVLTLIPTNSSYKEDILKKYYLWLKSKDNDILKELEKSKKVLLQGISIQKTIQTIENTTLAYNFHKDTILVQSNKIVRHRGKIQYVKNKSGQYILDKNGNRIIKRTKGDTVRSELFAQTYIGKIRDVERDEKGKPIRENGDWKYKTGKEEFVFVKREPINSVKSSEKNINSIVDPQIRKLVKEQKNNSVIRDSQNNIIRHVRIQTKAGREVKQRINYESKYDYKNKFYSEAGSIPYAILLQKIHKGKNIKNIIPIPSFEIAKIHKQKGKFDIESCIQTFHPNYKDNNWNKQLLKVGQKVLVLKDDSEYSQIENIDFITKRLYVIKQFKTDNRIVLEYHLNAIPEQDIDNAIKKYKDNLLLEYEKKYGIPEVVEDLSIKDEKERDKDYKNRKYSFNNLGDFRLSRLTNIIGREETLKVTHILGSYKKYSSTIEKDGDTPLLLMSRNNWNFLYEGIDFDTTITGNLNFKKANNL

SEQ ID NO: 7683 - protein, 1087 aa, synthetic construct
  REGION 1..1087: note = Synthetic
MKKIGLDIGSSSLGWFIDKNKKGVVTFETGMSKGQSGGYTSPTKDRREARSKRNLIRARKYRKWELLKVLLNGYVPLTETEMNEWCHYKKGKQRKFPESEQFLKWLACDFTYQNGEKYKNPYELRVKSLDSNLSKHEFGRALYHLVQRRGYKDIGERDQETEKQIQRRGESGFQSALDGNRTVAEALVKGFLDKGERARNQYPYREEYRKELELICESQGYSTDLNDKGEYADKFVKNLWKAIIWQRPLKSQKGNIGKCTLEPSKLRCPISHPAFEIFRALQFINTIKYFDTNGEKQSLNSDLRNKLFIDLFLKQDGNFKFQEIKKFLDKHSVSVYKYNYPINPKNNQYETSVAGMPICKSLIYLFGDSAQQALLDIEKFNIGNAPKIKGGYSIYDIWHIVFDFDEQHLEKFGQEKLVIENVIRKRKGEDISVSPLVELKRKFLQGYSDVSLKAICKIIPFLKEGYLYNEAVVLAKIPYLIGADWKSFKQIILDVLKESNKRYQEKLMIASISNNLIDKHKGQTRATIDGNEDGSFAYKDFSYTITEKDVEDVKNACRNHFGDKTWNETKNQDDIIQKVALEYQDYFYDQKRAYRKTETLTEIFNSLLKEKNINLNGELYHHSNRENLYNKNLHVNFKTGEKYLPKYKDTEREILPIPYIDSIKNPMFNKSMSIVRKLLNELIINGEIDQETEVTVELARELNDNNVRAAIERYQKERRDNREKIRKFLEQYNEEESRTLNVEDNIPLFELWTEQIFEETEDESRNKIQNKNRLDILREKEDVKRYELWTEQKGQCMYTGKMISISQLFSNEIDVEHTIPRSILPDNTMANQTVAFAKYNRDIKAARTPFYCENFSKDTPNGTSISPRLDNWRKLRDYYKIQYETRRRAKGAEDENSKNKRIQDKHYFKLHFEYWNDKLNRFEAEEIKDSWARRQLVDTQMVSKYAREYLKLYFKKVAVQKGSITAEFRKIFGFQEQDEIKSRDKHTHHAIDAAVLTMIPTNSSYREEVLKEYYIAVENKDKRKMDDLRKKMIPPFFNVQSLIKEIESTTLIVNYQKDKILQQTSRTVRKRGKIQYVKNKQGEFTPL

SEQ ID NO: 7684 - protein, 1438 aa, synthetic construct
  REGION 1..1438: note = Synthetic
MKIIGLDVGSSSLGYSLRVGNEIYKKGVITFDSGMKKGQGGYSSPTKDRREARSKRRLIQARKYRKWELLKILLNGFVPLEKEELSKWCKYEKGMNHIFPENESFLKWLACDFSYIGVTNTYKNPYELRIKGIDTILHKHEFGRALYHLVQRRGYKNIGETDAETEKQIKRRSESGFQNALDNNRTIAEALKNEFLDKNDRARNQYPYREEYEHEFELICKGQGYDISKNKRLEYNDSFVESLKKAIIWQRPLRSQKGNIGKCTLEPSKLRCPISHPIYEIYRAWSYINTIKYTDFEANEAFLAEKERKLLFSFFLKQKKNFKFEDIKKFLDKNFKKVKSYNYPYNESKKEYDSTVAGMPVCDGLISVFGDKIKETIESLHLYNIGNAPKIVGNYSLFDLWHILFEFDKAHLEKFAAEKIHISNQKNKNEEEFNPFADLKNSITQGYADLSLKAMSKIIPFLKDGFLYNEAAILAKIPETIGVESWILNKETIIDTLKVCNNIYQWNKLIGAITNILIDAYKGLEQPYAYKDFKYELKKDDDTEIETACKNHFGEQKWQIRKDKNKILSEVRIQYQAFFKDEQRKYCVQPNHSVLFETLLKEQNIPITTDKLYHHSKKENLYGKTIIDKKTRLEILPEARIDSIKNPMFNKSLSILRKLINELIKNGDIDEQTEVVIELARDLNDNNKRIAIERYQNERNKKRNEYRKFLNEFKVKKNLNFNIEESLAPFELWNEQIFAETEDENKNVVFNKTRKEIIDEKNDLTRYELWTEQKGQCMYTGKMISITKLFSSEIDIEHTIPRSILPDNTMANKTVAFKNYNTDIKNEKLPIFCPNYKIDTIQGTSILPRLEKWIKIRDDFKGLYESRAIKTINTEDEAAKNKRIQEKHYFKMHFDYWNDKVYRFLADNVNDKWVRRQLVDTQMIGKYAREYLKTYFNKVSVQKGIITSEFRKIYGFQEADEIKNRNKHTHHAIDASVLTLIPLNSNKKISILKEMYKMYETTGKQYTEMPFKDFNSQKLIEEIENTTLIYNYEKDNILKQTAKNKRKRGKLEKLKDKDGSFILDDNGNEIQIKLAGNSIRSTLFAQTFIAKIMDVERDENDKPIKEPNGNWKFKKEKFAFVKRVPVKDCLSKIKDIVDPVIRKLVEQQKNNDVIKDYQCNTIRHVRIKTGAGKEVKERVNYKSEHNYKNYYYSEAGSIPYAILIQRSNNGIIEREMIPVASFEIAEMFDLYLKEKSIGNIISKFDIQKYLVKNKIDISDIKETKLLKVGQKIIVLKSDKEYENRNKIDFQNKRLYVITKFSEGSIWLQYHLESNPKEIDKTVKNEKDRLVQFYENKYNIPEITEDVTIKDNKARKDDFEDRKYKFSSISDFRLDRLVAEIGIEKTKKIMDELSQFKTQAATIEVEGKTPLLKTSSKNWNFLYENYDFTVSILGKLEMM

SEQ ID NO: 7685 - protein, 1474 aa, synthetic construct
  REGION 1..1474: note = Synthetic
MRKIGIDLGSSSLGFVVMEDGRIIKKGVIRFDTGMMKGQSGGYVSPTRERRIARSKRNLIRARKYRKWELLEILVKENYVPLNKQELEIWSKYKKGQIRKFPENELFQKWLACDFTYENGKKYKNPYKLRVNALNKNKKVSKHEFGRALYHILQRRGYKDIGETDSETEKQKERRGESGFQKALNDNENIISKALLNEFLNKNKRARNQYPYREEYEYELEQICKAQGFDISKKENGKYTSEFVEKLWKAIIWQRDLRTQKGKIGKCTLEPKKLRCPISHPVFEIFRVWQFINTIKTINEDGEKEELPLLLKNKLFEFFLKKDDNFKFEQIRVFLDKQFHSKKKYNYPINSNEKNKNENYTDGTYETSVAGMPICKGLIDVFGEDAKNALATIEHQNISQRDKNGGFGSAPKVIANYSINDLWHILFSFDKKSTKEKNFLEIFAKEKLILTDEKQIAKFVKLNNKISQGYADLSVKAMCKIIPFLKEGYLYNEAVVLAKAPEILGKDWEENKKGILSAINEANKEYNWNKVIVGTTNNLIDKYKGDPYFACKDYSYQLSEHDYNEVEKACQGYFGEKTWEKRDDKSEIIEDVKQKYQEFFHDEKRVYREVPTFTDIFNEKLKSKKINLDAYQLYHHSNIENIYLKKCKINKKTGERKLPQATNIHGIKVDILPGVQIDSIKNPMFNKSMSILRKLINELIKEGTVDENTEVVLEVARDLNDNNKRIAIERYQNERRSNREKYREFLTEYKKSKKPDLNIEENIPKFEMWTEQIFEQTIDDEGVEHSNKNRIEILKEKDAITRYELWMEQKGQCLYTGKMIPIGKLFSNEIDIEHTIPRSKLPDNTMANQTICYAWYNRDKKKNQIPTQCDNYYKDEEGWGTRIEPRLNKWKTIRDNWKARYDKSAKPRGNEDEAAKNTRIQEKHYCKMHFDYWNDKIERFEATEIKDSWARRQLVDTQMVSKYAREFLKTYFLKVAVQKGTVTAAFRKLFGFQDEDEIKSRNKHTHHAIDALVLTLIPTNSSHRERILKDYFKYIEENKKDKIKELKEKEIPENFNVQKFISDIESSTLIYNFEKKSITKQTFKIVRKRGKCQYLKDKSGNFILDNEGKKILLISRGSTVRSDLFAQTYLGKIKNVERDEKGKPIREGDDWKYKSGKDEFSFVKREDINKVKSSEKLINSIVDPIIRELVRKQKRNSEIKDYQGNVIRHVRIQVKAGREVKERVNYRSKHDYKNKFYSEAGSVPYAILLQKSEETGVKRELLSIASFEIAKMRRDTGGFDVEKYVEDYNPEYKDWEKQLLKVGQKVFVLNEDSDYEKRFDKSFQTNRLYVITQFSESIWLKHHLCALSLNNIKDAVSLAKDEIMTKYEKELNIPPVVEDHSIIDNNERRNDYLSRKYRFDTINNSFRLTRLQAIVGTKKTKEIKKELDKYKAIPSKIEVEGHTYLLKMSKENWNYLIEGKDFEMRLDGSIEFFD

SEQ ID NO: 7686 - protein, 1450 aa, synthetic construct
  REGION 1..1450: note = Synthetic
MSNLLKFNNMQRLGLDLGSSSIGWAIRDENKIEKRGVITFQSGMKKGQTGGYSSPTRDRREARSKRKLIQARKYRKWELLKILLCEFVPLDKIELEFWSKYKRGQIQKFPSNENFLKWLACNFTYEDGIKYNNPYELRVKALDNKLSNHEFGRVLYHLVQRRGYKDIGETDKETEKQIERRGESGFQAALEANRTIAEALTKEFLDKGQRARNQYPYRDEYRHELDQICKSQGYDISKSGNGEYINEFVQQLWKAIIWQRPLRSQKGNIGKCTLEPAKPRCPVSHPIFEIFRAWSFINTIKHYDDNGEKQSLPPDSRNQLFEFFLRKDKNFKFEEIRIFLDKQFISKKKYNYPIDKKTGKYDTSVSGMPVCKGLIDVFGDEIKEAIPSIHTFNIGNDPKVIQGYSVYDLWHILFEFDESHLKNFAIQKLNVQNQKTKKGQEYNPFAKLKNHVESGYSDLSLKALCKIIPFLKEGYLYNEAVVLAKIPELLGDEWEARKEDVFKIIKQSNKQFNWSKSIAGIANNLIDQYKGLEHEERFAYKDFKYRLDYGDINDVEKFCQRYFGEKSWKDRTDKTEILEAVKEQYQAFFNDQKRAYREVPLLTDLFKEKLKENKINLDGKIYHHSNRENIYGNPVTDNSTGIDILPEPRIDSIKNPMFNKSMGILRKLINELIINGTIDSDTEIVIELARELNDNNKRAAIERYQNERRNNRDKYRAFLEEFKEKEKPSINVEGSISTFELWTEQIFEEIEDEKGKKINKNTSILKEKEAVRRYELWMEQKGQCMYTGKMISITQLFSNDIDIMHTIPRSLLPDNTMANKTIGFKRYNTDLQKQKLPTQCDNYYKDVEGWGTRIEPRLDIWIEKRDNYKKQYEDRLKPKGNEDEKTKNTRIQEKHYFKMHFDYWHDKVDRFTAEEIKESWARRQLVDTQMISKYAREFLRTYFKKVAVQKGSITADFRKIFGFQEEDEIKSRNKHTHHAIDAAVLTLIPVNSSYRDNILKKMYEQYEIGKGQYTTSPFEGFNSQKLIQDIDNNTLIVNYENDKILKQSYRNVRKRGKLQYVKNKQGVFVRDKDLNKIIKKAKGDTLRSVLFKDTFVAKIRDVERYSDGQPIREGKDWKYRQGKDEFIYTVRKPIKDVLSKIDDIIDPVIKKLVSEQKNNNEIKDYQGNVIRHVRIKTSAGQPVKDRVNYRSSHEYKNQYYSAAGSLPYAILLEKGSSRNKLTKEGNIPNEKTERVMFPIASFEVAKMYKQSGKLDIEQYIKEQYPDYANWDKRLLKVGQKVMVLNNDLEFEKRNDLSFQVNRLYIITQFSEGSIWLKFHMEAKSKDEVKESVSHFKDTLLRKFEISLEIPEIIEDKSIIDTKKRKEDFENRKFRFDTINNSFRLMHLANKIGIEKTKEIKIDLDKYKAISGSIEIEGNTPLLKMSSKKWNFLYEGDDFEMNFFGKIKFLI

SEQ ID NO: 7687 - protein, 1459 aa, synthetic construct
  REGION 1..1459: note = Synthetic
MSKLGLDLGSSSVGWAKNVGGKIVKSGVITFNTGMSKGQSGGYVSPTRERREARAKRNLIKSRKYRKWELLKVLAEMKFVPLDEQELQIWSKYKKGSTRRFPENEKFLKWLACDFTYEEGENYKNPYVLRVKALNHIVTKHEFGRALYHIVQRRGYKDIGETDKETENQIKRRNDDGFKKALDIHGTVAKALNEEFLKKGKRARNQYPLREEYKHELEELCKAQGYNIQKEGKEGYKNKFVKSLWKAIIWQQPLKTQRGNIGKCSLEPTKPRSPISHPIFEIFRSWQFINTIRYYDDDGEKQVLSQKIKQALFYEKFLKKDSNFKFEEIRKFLDKRFQKAKRYNYPIDRKTGKYDTSVSGMPVCKGLINVFGEKAQSALDDMELYQINNAPKIIDKYSIYDLWHIIFEFDAEHLDKFATEKLKIQNKIVTRKKKQISISPLVELKEKFIQGYADLSLKALCKIIPFLKKGHLYNDAVILAKIPELLDTQWQEKRDLINEVLEKSNKLYNERKAIINIANNLIDKHKGLNHSEKFAYKDFEYALVPDDIEEIEKACVGYFGEKSWIKNKKKEEIIKEVGFEYQDYFHDTKRAYRKFPNFTEIFKDDLKENGINLKGELYHHSNRKNIYDNTLEINHETGEKYLPTYKDTGIEILPVPYIDSIKNPMFNKSMSILRKLINELIVAGEVDDNTEIIVELARELNDNNKRAAIERYQNLRKNNREKYREFLKEFKNRENINLNVEESISAFELWSEQTFEETNDENGKRISNKGHIEILNEKAALKRYELWMEQKGQCMYTGKMISITQLFSNDIDIMHTIPRWLLPDNTMANMTVGFSKYNRDLQKEKLPKQCDNYSVDVDGWGTSIEPRLEIWKKERDKWKSLFESRRKPKGNEDEEKKNKRIQEKHYFKMHLIYWNDKIERFEADEVKDSWARRQLVDTQMISRYAREYLKLYFKKVSVQKGTVTSDFRKLFGFQEEDEIKSRDKHTHHAIDASVLTLIPVNSSKREQILKNYFKSQEDKDKLSLKKLRASVKPSSDFNPQELIRKIEEKTLIVNYQKDKIINQSIKKVRKRGKIQYVKDKQGEFVLDKEGNRIIKYAKGDTLRSELFAQTYLGKIKDVERYDDSSPKRNTENTDWIYKKGKDEFIFVKRENIDKVKSSDKLIKSIIDPVIRNLVEEQKKNTIVKDYQGNVIRHIRIRTKSGREVKERINYRSRYDYKNKFYSEAGKIPYAVLLQKSINGEIEREMIPVASFEVAKVFKKHRKFNPELYMNEFHPDIGNWDKKNWLKVGQKVIVLKNDKEFEKRDDIDFQHKRMYVITQFSDGGIWLQYHLNAQSKDDVKKSISLAKDKLLRKYEIQYNIPEVIEDESIQDRKNRTADYNNRRFRFDTISKSFRLTTLMETIGEKRTKKIKAELDKYKAIPSSIEIEGETALLKMSKENWNYLYEGTDFEVTILGKLNWL

SEQ ID NO: 7688 - protein, 1449 aa, synthetic construct
  REGION 1..1449: note = Synthetic
MKKLALDLGSSSIGWALRENNELNERGVITFDAGMQKGATGGYTSPTKDRREARSKRNLIQARKYRKWELLKILVNEFVPLDITELEIWSKYKKGQLKAFPENGNFLKWLACDFSYLKIINEYKNPYELRISALDKMLSKHELGRALYHLVQRRGFKDIGETDKETEKQIEKRSAEGFEDALNKNRTIAEALQNEFLNNGKRARNQYPYRDEYEDELLLILESQGFDISKNEKGNFSNDFVQKVWKAIIWQRPLKSQKGTIGKCTLEPTKLRCPISHPIFEIFRAWSFINTIKFSKKDNEMEFLDSNTRMRLYENIFLKNDKNFKFEEIRKFLDKELKSKNTYNYPFDVKKQIYDSSVSGMPICCGLIKVFGEKLSSELFKIKNYNIGTAPKVYKNYSIYDLWHVLFQFDEEHLKDFAIIKLEIKNIIDKKEQEQNPFVNLKKLISNGYSDLSLKAMVKIIPFLKEGFLYNEAVVLAKIPELMGEQWESKEEIIKKYIKTSNDIYNANKVIIGITNGLIDIYKGEDLKYGDYDFTYKLENKHDDEILNACKGHFGESKWEKKRNKEQIFESVKKMYQEFLSDKKRMYRELPLLTTIFKDLLMKEGLEIKGTLYHHSNTENKFLKKYIDARSGNIKLPFDKKTGTEILPEPRIDSIKNPMFNKAMFILYKAIKELIVNEKVDKDTEIIVELARELNDNNKRAAIERYQNERKNNREKYRAFLNEFNEKKNQTINVEDNISVFELWTEQIFGETSDDKGKKTNISTSIIKEKNALNRYELWMEQKGLCMYTGDMISISTLFSNQIDIAHTIPRSLLPDNTMANMTVCFARYNRDIQETKTPLYCVNYSEDIEGIGTAIMPRLDNWIKIKDSYQERYDKKCKPENGEDFDKKNARIQEKHYCKLHLDYWNDKISRFTATDVKDSWARRQLTDTQMISKYAREYLKTYFKKVIVQKGSVTAEFRKIYGFQSVDDIKDRNLHTHHAIDATVLTLIPTNSSKRDKLLRNMFEKMEIEKKQFTELPFEGFNSQFIINEIENKTLIVNYEKDQLQKKTKKIVRKRGEIQFVKNKNGEYKLDKSGNKIVKIADGDTARTVLYAQTFLGKIKDVERFDDGQPIHKDGDWKYKKGDSEFIFVKREKIDKVKSSDKLISEIVDPVIKQLVVNQKNNTEIRDYQGNIIRHVRIKTNSGKEVKLRLNYKSKHDYKNKYYSESGSIPYAILLQKNNSGKIIREMIPVASFEVTKTSKKSTKFNIESYLEENHSDKKDFSDKKLLKVGQKVIVLNVDSEYEKRNNIDFQKNRLYKIEQFSEGSIWLKFHLEAQSKDQIDSSIKNMKDIALREIEKKYNIPEVIVDSTIKDAITQKEDFEKRKFSFDQLKRFRFDRLIKILGEDEVKIIKKQLDLYKTQSSVVVEINKENKSPLLKISSENWNFLYEGYDFEVSLLGKITFLEKSI

SEQ ID NO: 7689 - protein, 927 aa, synthetic construct
  REGION 1..927: note = Synthetic
LQRLINVFGEKAQSALDDMELYQINNAPKIIDKYSIYDLWHIIFEFDAEHLDKFATEKLKIQNKIVTRKKKQISISPLVELKEKFIQGYADLSLKALCKIIPFLKKGHLYNDAVILAKIPELLDTQWQEKRDLINEVLEKSNKLYNERKAIINIANNLIDKHKGLNHSEKFAYKDFEYALVPDDIEEIEKACVGYFGEKSWIKNKKKEEIIKEVGFEYQDYFHDTKRAYRKFPNFTEIFKDDLKENGINLKGELYHHSNRKNIYDNTLEINHETGEKYLPTYKDTGIEILPVPYIDSIKNPMFNKSMSILRKLINELIVAGEVDDNTEIIVELARELNDNNKRAAIERYQNLRKNNREKYREFLKEFKNRENINLNVEESISAFELWSEQTFEETNDENGKRISNKGHIEILNEKAALKRYELWMEQKGQCMYTGKMISITQLFSNDIDIMHTIPRWLLPDNTMANMTVGFSKYNRDLQKEKLPKQCDNYSVDVDGWGTSIEPRLEIWKKERDKWKSLFESRRKPKGNEDEEKKNKRIQEKHYFKMHLIYWNDKIERFEADEVKDSWARRQLVDTQMISRYAREYLKLYFKKVSVQKGTVTSDFRKLFGFQEEDEIKSRDKHTHHAIDASVLTLIPVNSSKREQILKNYFKSQEDKDKLSLKKLRASVKPSSDFNPQELIRKIEEKTLIVNYQKDKIINQSIKKVRKRGKIQYVKDKQGEFVLDKEGNRIIKYAKGDTLRSELFAQTYLGKIKDVERYDDSSPKRNTENTDWIYKKGKDEFIFVKRENIDKVKSSDKLIKSIIDPVIRNLVEEQKKNTIVKDYQGNVIRHIRIRTKSGREVKERINYRSRYDYKNKFYSEAGKIPYAVLLQKSINGEIEREMIPVASFEVAKVFKKHRKFNPELYMNEFHPDIGNWDKKIGLKLDKK

SEQ ID NO: 7690 - protein, 1468 aa, synthetic construct
  REGION 1..1468: note = Synthetic
MTKKLGIDLGSSSLGWFIREDNQIINNGVVTFNTGMKKEQGGYSSPTKDRREARSKRRLIQAKKYRKIELLKILVENGYVPLSNEDLDVWSKYKKGHLRKFPETKEFIKWLSCDFSYLENGKKYKNPYKLRVKAIDNKLYKHEFGRVLYHLVQRRGYKDIGESDKETNTQIARRVDSGYKAAIEKANNRTIGEALSNEFLEKNIRARNEYPYRVEYEAEFKTICEAQGFDISQNEKKEYKNEFVRKLRKAILWQRPLKSQKGNIGKCTLELSKQRCPASHPIFEIFRTWSFINTIKTVSETEGYKTVKENIPLKFRQQIFEDVFLNKEKNFKFDVIQKYLDKLFEKKKTYNYLNRSTKKYDSTVSGMPICKGLIKHFGDKVKQELEQLHTYNIGTKEHKILGNYSIYDIWHLIYETDDEHLEDFAINKLGQSNNERTNKKGKIIIENPIVKFKKANFSTSFADLSLKAMCKIIPFLQEGFLYNEAVLLAKIPEQLKSDWKEKKKIIYKLIENVNKKYISQKTIIGIANNLIDKYKSLTYEDRFAHKDFSYKLKDIDFEEIETASVVFFGEKTWIKIDSKNDIIKKVSAYYQSFFADKKRKYIELPTLTSLIEEEFKNTSIEIDGEKLYHHSVRRNMYPEPIYSKKYNKEILEVPLIDSIKNPMFNKSMSVLRKLINQLITQEYVDKYGVIQPYIDEDTEIIVEVARELNDNNKRIAIEHYQKERRDNREKYRQFINEFKDNENRPSLNIEDNIPVFEMWTEQTFEETIDEKGNKVTNSNPHEIRKEKDAIKRYELWSEQKGQCMYTGKMIGIAQLFSSDIEIEHTIPRSLLPDNTMANQTVCYSKYNSDIKNNKIPSACPNYENSTNEGSAIEPRLEKWKKIRDGFKKQYKDRTKPFGNEDEAKKNKRIQDKHYFRMHFEYWKDKVNRFTTEEIKDSWARRQLTDTQMVSKYARKFLKTYFKKVVVQKGSTTADFRKIFGFQNEDKIKSRNKHTHHSIDAAVLTLIPTNSSKRVSMLNAMYMAHENKQKIKRKIPDGFSGFNAQKLIKYIDSNTLIVNYEKDKITEQTYRNIRKRGKLQYLKKNGEYVLDQNGDRILLKAKGTTIRGKLFQETFIGKIRNVERDKKNKPLRNDDNSWKFRKGKEEFLNVVRKPITEAKIGEIVDPDIQKRIQDQLENGVSRTYLKDHQGNIIRHVRVKTSTGKIVKERLNYKSKHDYKNAFYSAAGEIPYAIFITSLVNARVERKMIPVPIHEIAKVFKENHKFDIKNYLNIFHKDIKDYQDIKLLKVGQKVFVLKEDSEFEKRKNIEFQINRMYKITQFSDGNIWLKFHLDARELNEIKKDVKNKKSEIVFVKEKELNIPIVKEDETISDRLSRSKDYEDRMFKFSSIDDFRLNRIKDVVGEEETKNLRDKLNKYKAFSSKIEIERETPLLKTSKNNWNFLFENYDFEIDITGRLKWIESGNESEFN

SEQ ID NO: 7691 - protein, 1078 aa, synthetic construct
  REGION 1..1078: note = Synthetic
LVLAFDLGKGSIGEAVRLGNDFVHVASWLIPQDLAARGPSAKPGTPASRYRAWRTRVAHRERENALRRICADAGIEVLAAKRVARDAADKKKWIVVSKADERLTREFPKKGDSTCYNSALLRIQLLRGVKLEGWQVFKALHAAIQRRGYDNAVPWKHRAVRDTETEEDGITQQRADSYCLALEQMAPNKPECQLPSYLDAHRLGLWDASRPDEYILRIDHHVAPARNREHPDNTPIVAPRELVIKETRALLTAAAKFFPKLAGREDEILFGRGGKAYASYFDDVRRAHSLRLGGANDWDGILGQKVPRFDNRIIAKCALIPRLNVCKATTRKDKTGAIISESLLPSEVTFLFKLKNVRVQRPDKSITGLKPDEIRTLFNDPKREPEKLSYTKKQWSKEIARFGCEAAAGHEEIAAPSFGGRSRFCRPALEILKKLILSGESPATAHSRELAERVKGNTNPQQGLVVSDLDFLSPARIGETWDGIHVADQQHGALLRLAAEQGPEVAIRALIGKVNNPVVRHRLEAFWGRLRAIEADLKKRFGRGPDEIAIEFIRTDFMGPKAKLALAKFQSERAEAREDARAQVGKIGADGRASPLKYELWKAQGGICLFVGESLAPTDIESLEIEHIVPRSQGGSDAFINYVVTTKATNKLKDNRTPYAWFEANGFTGWDAYVKRVEACATALRNKKVRLLTAPDAIELVERYTALAETAYIARLAQTVAALHFGWPINSQPGERRITIVNGGLTARVRRNYRLNSLLNPCPTGKDQKEWEEDADVEKNRKDDRHHALDAMVISFIPAWTRDPKKEKFFRLPDGVTPETFQERLEEVLPRQLHYERSELEATAFGQRTLGGKLYGVARVDFCNLVVKVALNGNRSLNIKPDGSGEADTIVDQAIRRDVQAFIDQNRATITLAIWDAWVSSYHRGGSNGPLVKKVLVTITNPDSLEEYADLAKDQSGQLRRGKKHKGYWILRILSPTKKDPTKTTLQVRPIYAHANPHALKAEIGEDHGCEIILELESGCLVQIDKPIAHAKTPLAAGIYKLNSVWTQGNVVVSSQSGVTSAPIGLAKFIEAGLRRLK

SEQ ID NO: 7692 - protein, 1070 aa, synthetic construct
  REGION 1..1070: note = Synthetic
MNVLGIDLGTNSIGWALVDNAAEKILATGVRIFEAGMEGNMSDGTQESRNLARREKRQLRKQHDRRARRMRKILRTLQDAGLMPVADNMAEAIVQIDAQALQRLKTEANAQTLAHVVPYRLRAEALDNRLDNFEMGRALYHLAQRRGFKSNKKADAKEDEKEAGKVKTGISELAQAMEAANARTLGEYFSRISPEEERIRGRYTARKMFEDEFRAIMAAQRSLGNAALTADYEKVLYKAIFHQRKLKSCSHLVGFCPYEKGKRRAPWYHPLAQRFRVLQTLNHLRVVLSDAERSLSPEERQTLLDILLRQRSVTIASAKKAIGLGGKKNTCTFSIEEGGEKSLPGHQTNAKMIEVFGEERWMAMPEAEQLAAIADVQSYENDAALKKRGMAHWKLTDEQATLFANTVLPDDYAGLSLAAMKKIVPRMEQGTEYMTAVTDVYGDTLRTDTVFDSLPMIKGIGRTRGIMPDLRNPAVERSLTQLRKAVNPVIRKFGKPDAIHIEMAREMKKSVKEKKNATKKMREQEKRRKDAIGELMAQLPEFQTNEPRRRDIEKYLLWRECREQCPYTGEHISLTDLFGDHPQFDIEHIIPYSVSLDDSFVNKTLCHARVNRTDKRNRTPWQAFSEDAARYEAMLARVGKFEAADHVRLEKLRRFKVEDTTEFSDFSNRQLNDTSYACKLAKGYLATLYGGTYDAEKKQRVVAVSGGITATVRNFYKLNRILGEGAANPQSDAPVRKSRSDHRHHAVDAIVVAITSQGTVNTISRAAADYEGVNTRLMYQGDTDYWDGFLNDARRAIEGIKVTHAASRKARGQLHEETIYGRVKDCEGNEIKGKVSYRKKLESLSEKDIKQIADATVKELVVEKLSELGIYDAATGKLDAKKLSSAFSNTDNYPWMMCSDGSQGPQIKSVRCHKDLATMDVGDAAHPHPVVSGNNHHVEILEVSDGKGGVKWEGVCVSMFDAYQRKKQNLPVVQRDHGEGKRFVFSLAISDIIECDIDPSNPKALYVVKAVSQEPRIEFARITDAREKGERKKEEKETKMELRKRIEPLRNLNMKKVTLTPFGEVRYAND

SEQ ID NO: 7693 - protein, 1042 aa, synthetic construct
  REGION 1..1042: note = Synthetic
MILGLDLGTNSVGWALLGKHKIISAGVRIFEAGMEGNMQDGTQTSRNASRREKRMLRRQHARRARRMKNIMRILQEAGLLPKADNMAAEIEKLDSQALRRMRMTTEVQHLAHVVPYRLRAEALNGRLDDFELGRALYHLAQRRGFLSNRKTAVSDNDEETGKVKTGIHDLDLKMKAADARTLGEYFSFLNPEEERIRSRYTGRKMYVDEFKAILKAQREYGNQRLTEDFEKRLYRAIFRQRPLKSCRDLVGACSYEKGQKRAAWYHPLAQKFRVLQAVNHLRLVFDSGDTRGLTPDERSTLLSLLMRSSTLKITAAKKALGLNGKKNPCTFSIEEGGEKSLPGNAVNAKLIPIFGESRWMEQLSEAQKIEAVLDIHSYTSAEGLKKRGVARWGLTEEQAEEFADVRLPEDYAGLSLAALRKILPHLEAGSEYTTALIAVYGDLLRTDMVYDELPMIKGYLKDLRNPAVERTLTQLRKVVNPLIRKYGKPDEIHVELAREMKKSKIEKKRTIKKMRDQERLRQDAVSELKAQFPEFQTAEPKRRDIEKYLLWKECGGRCPYTRKTISLSNLFGDTPEFDIEHIIPYSVSLDDSFVNKTLCHVLTNRSDKRNRTPFQAFSGRKDDYEAMLDRVAKFISPCRVEKLRRFKLENTDEFSDFANRQLNDTSYASKLAKAYLASLYGGTYDDKGQRVMAVSGNITAIIRNYYRLNRILGEGDRKTRSDHRHHAVDAIVLALTSQGTVQSVSDTAADFATRSTRLMYQGDSEPWSGFSNDVRRAIEAVKVIHAVSHKTRGQLHEETNYGLVKDSGVLVSYRKRLESLSEKDLANITDGVVKQCVLAKLIELGIYDPAGEKLNPRKLSLLGDPENLPRMKTKENLPGPLIKSVRCRKPLAVIRVGSKEHPRAVVTGNNHHMEILETSDNKGNVKWEGVCVSMMEAYRRKREGLPVVQRDHGPSKRFVFSLAKGDIIECMLEEAKGSELFVIRSLSASIPPISFVRVSDARDKKEITAAKDLFRPWIEPFRKMKARKVTLTPFGEIRYAND

SEQ ID NO: 7694 - protein, 1072 aa, synthetic construct
  REGION 1..1072: note = Synthetic
MSYVLGLDLGPSSIGWAAVNIDGNGDYKGLAQIPDGKNSIPAIGARIFPAGVENYGQGLREETRNKNRREKRSVRRTLRRRRIRRLKLVSLLEEKGILPADNEKVNTLQTSPDIDPYEIRARALKEKIKLEELGRILLHICKRRGFKSNRKSPPKKEEHGKIKDAQKRLNEALNGKTLGEFWHEKRTQNKLTSIRNRLGNYQWIATRGQYEDEFEKIWERQQKEYPQLLTNEFKKQISAILFKQITYEQLPGKMKKMIGQCSLLPKEKRCPLSNRKAQEFRCLQKINDLLIVKRGKQKPLSPEQRQAIIDILNTEEKPDFKKIQKKLNLEEDERFNFEFEDDAKLQGNETDAQLSKLFGKDIWLGFNEKIREQIWQTVIEYINNEHVKEDETVQRIEHICGQKIEKTDKLPEITLPDGYVKFCEKVLDKILPFMRKGLQYYDAVKNARFKISWAALDKLSMPDREHGFYITNPNVSTVLFQVHKLVNRLIAEIGKPERIVVEFTREIKADKERRQNILKLQTERRKAKERIAEEIKQKQEWDGPDKIPNWAIEKYLLWDEQNTLSPYSGSGKSISLSELFSRKTEIDHILPYSMTLDDSLSNKVVCFASENQEKGQRTPFDWLGHNEEKWQIVQQTIDHWKPQRKTRGRGKDAKSKADTKVINARKWEKFFITADQIEEVYEPERYLVETGYIAKEVREYLESLYEPAESKKKVRTTKGGVTSQLRKWWDLNRILGVDESNGEKDEQGNSDKKNRGDLRHHSIDAAVIAVTEPKLVKKVTSEIQRCYPRKSPRDIYVPRPWQNFEDEIKQAMSDVNISHRTQRKVKGELHGQTHYWKETNGKYAGKYITTKSLNSLSDAEVKRICDEKIKKMAEDKIREFEGNIKKAFDQPLLLPNKNGEPIPVRKVRICTDKTDKNMMFLKKGLYYVERPENHHIEIFKLSIKGKTKYICKTWDMWDITKRIRNCQPIYLKKHPDYPEAKFVMSLCKGETIELDGTAQKRVLARIKEVGADKNNGLGTDIKLWEVEIGRLDEKITKSTPKAYRIQSINELLERNAKKVIVDLLGRVRWAND

SEQ ID NO: 7695 - protein, 1105 aa, synthetic construct
  REGION 1..1105: note = Synthetic
MSYVLGLDLGPSSIGWAAVTIDENGNYKGLAKIPDGPNFMPAIGARIFPAGVERYGQGKREQTRNKTRREKRGTRRTLRRRKARRTKLIALLRTNNILPQDDAELQKLQQTDPYELRAKAIKENEQLSLTELGRIFLHLCKKRGFKSNRKAPPKKEEKGKINDAKNKFKEELGNKTPGQLWHEKRTADKFKAIKNKGGKFQGLAVREQYKEEFNRIWDNQKKIYQKNGNGGFFSVEMKKQIESLLFDQISYKQLPSKMRKMWGRCSLMPKEFRCSLANRKAQRFRFLQKVNDLRVIKRGITRGLNDEERKKIINLLSCKDEVNLKDIRKELELADDERLNFEFDDDNTLTGNEIDSQLCKLVGKDVWLNFSEETRDKIWQEILRYIEDERGEITEIKTADEIYRICGIKSIDLKKISEIELPDGNVKFCEKVLNEILPKMSKEGLPLSDAIKAAGFKQKWDELPSLPVPDKKAGFYITNPNVATVLYQVHRLVNRLIAEIGKPEKIVIEFTRDLKASKKQRQKILKQQSERRRTKALIAEDVQKSPEWKWGKKIPPWAIEKYLLWVEQNTLSPYSGDQISVGQLFSEDTQIDHILPYSMSLDNSMSNKVVCFTAENQDKKQKTVFDWLGHNEIKWERVQNAIDHWKPQRKTRGSKKTARNSADSKLINERKWERFFITGDQIDEIYEPERYLNEAGYIANETREYLERLYNSNEAKKRVKTTKGGVTGELRKWWDLNRILGVERKIDESEENTDAQKQPAKKNREDLRHHAIDAAVIAVTEPKTIEKVTHELQRAYPRKRRKEIYVERPWKDFEEELAAAVDLVKISHRTQRKVCGELHAATHYWKETNGKYAGKYITRKFLTDLSKAEVGQICDEAIKKLVKDRIKEKGDVKGAFDSSIYLPNKEGTPVPIWKVRIWTKHTDENMIPIRGKEGEPQTVWVEKPENHHIEIFQIKENGIKRYICKIWNIWEISQRIEEYKKQEIKDKDPIVLRKHPNHPDAEFVMWLSKADTVLIKNNDKKEILARITGIGEGDERDESVDLKLWELRVNCKSTDLPTKETKDGYRLRNINDFMAMTPKKVTVDLLGRIRWAERKTGWAKCFGND

SEQ ID NO: 7696 - protein, 1016 aa, synthetic construct
  REGION 1..1016: note = Synthetic
MSTSSSRKLLFSFDIGYSSIGWAVIQMGSEVEIIGSGVVLFPKDDCLASQRRMHRRMRRTIRARRQRIDRIGKILEHYGVITPQERRMPGHPAPFVLAAEALSGKRILTGLEVWHLMRWYAHNRGYDGNARWAKTTQEREEEKEEAQRVETAKKKMEEMGTATMAETMAALLGLKDGEWDSGKAFKTLNMAFPRRIVQEEVSRLLAASSLSKTVQSLIAGDSSEHADELKACGVVLPRRFHGSVLFGQLVPRFDNRIIARCPVTWAKEYAAAVREGMDEKMAKARADKYAKVPKADCREFYEYRFARILANIRVDGNPLPAEARRELMTRARQRGKFGKKDFRESVRSIAGGKDDNLYNFFQIHPDSEKALVLVPGSEREKATGRAPYARPVLRQVVEEILRGEDATRPALSSRHPEGEKKAQDGILYSLLDPESEVHRRQASRRVEEMSNNHLVRHRMLIFGRLLRDMISQYADGEPERVKVCCIEVGRELSEFSGKTSKEISAELGKRMENFRSAVNYLQKNAPDLSLSAGLIRKCRIAMDLNWTCPYTGAKYSAYELPRLELEHIIPFSDRNSNALSSLVLTWPEVNRMKGKRTGLQFVEEDTEKPVPGRENLTITTPRLYKDFVQKLDDRKGAPDDVRRKKTRKRLMLVDALPVRGARDENIGFTEGMMTQSSHLMKIAAHVMRGVCPNVRSIMIPGAVTAAVRASWKAWDALAGVSPGIVGDDGKLREKAEIRDITHLHHALDACILGLIPLLIPAGTNGVVWQALAMRRLSSQRQIDELRGELHLLGGRRSFKIDADGRLHLDPMPESVRSSLARALKEERVAFHVPSDMSGAHLKETTWGVIGREEGGKMIQLRQRKIKGQERTQKTESSEKLVGISPHGNSKLREIKGVRIIADNYGLALTPKPVVIPHHNVYSRLREYGKGVKLIRKGQLIRLTKHKDTRRNRVWRVASVKNNKTGLALDLQIPSSARRLADKTCSDNWTNVSVKSLQQWGVIVLSVPYTGIPADSK

SEQ ID NO: 7697 - protein, 1126 aa, synthetic construct
  REGION 1..1126: note = Synthetic
MADSLSRPWRLALDVGVGSIGWAALNLKRSERSNTPGDKWVACSLLDLGVNLFDSGVEDGIPKNTARRTYKAARHRLQSVKVRKRNLRDVLVAADCLPCDSATSQRSLLKGEPRSASIALRDQMVPIDGDGSVAIPAVWAWRWKALRKPGQLTHHELGVILMALASARGQGFSEESDSRTVAPLVSELQEKISRAGCTAFGDYAAEILAKSPGATIRARNAEPNFVSRQMVLGEFRAIRNAQTRLLSPKRWDEIENIIFDQAPLAPPRPGNCPLVKEDVRLERAHPLAQRLKIVQTLRNVRLFDADGAVPEDRPTQLTPDEIRKAEKFLSTRKSATAISLFKALGIKSLRSNYHGGSRAEATDLPGNETNVAAAREDAFGAAWAAFEPSKQRDIVELALSIRGGRTADEIRAAADTWGISIDAARAFIDMLPKGRAAYGLTATNRLLAVMLEEGLSLFDARDREYPQAAQSRKFCSLPYYAIALPDHVFDGDPRADETATDEQRYGHVRNPIVHVALNQIRGLVNALVAEFGAPVEITVELAREISLSDDEKKKLLKSQKERAEMRETAAATIRECGYKPSRDLIDRYVLYCGQDRRLVQGEFAEIKCVYSGKPIESFKRLFSNDIEIDHIVPRQRSHDDSLANKVLAYRGANRNKLNRTPFEFWGHTEHWAEIWERAEFAFRKNPKKLARFRETAAQEFTGDFASRHLNDTRYISKMTRLYLERLKGTECVYATRGSITGRLRKAWELAKLLPVPAAVQSLIDISRASSRDVPIELKRHDHRHHAIDAALIGLVDHHTLQYYFEKTESQTDKRFPLPWPTFKEELAERLQGLVVRRRPEHKRGFRYQGQLVEDSRYRLRRQNEKNVLSSRTSLIGLVIDKFGNLIPGTRSAGIQFSCKEAFESSIMRIDPTGRLITLLNWETLQAIRNSYLTSRPGDGDSGPLERKKAEREATAFAWKSLCSRAATTAGGISSVRKKIVLEDPVIVGPEKSAVKSAGYAFAYVIKRNVPNTRYQLFPVAMKDAETDQGPPLKPGEVVVCKLHKGDMLSLLLESNSLSSPVYCTVQGFKSSGVLTLTTQYNAARNGGRAVNTVPEIESSDGRNAVNKVFGTWRARIVRPTVLGRLP

SEQ ID NO: 7698 - protein, 1042 aa, synthetic construct
  REGION 1..1042: note = Synthetic
VKVREDADGKVLFEGIPAWDTEPLDEPRLTVAELLEPLLAPNRNNRFRKTPPAGFPAEQFVHVGKLHQSDNYYELSRIFEIQNVPEAQQKVFFEAVFRQANPKDTGAAASLIAKDDLQPSKIRASRASLAFQRYRILTTFANLRIKQKGEGRRPLSDEERHGLFDYLTSWEVSCRGSDLTWHDVADVLGVERCDLGGVGGQTADGSPISSKQPPYLNTEYAILSCDKIDKQLEPLREWWREAEPLSKEFLIEFLGNVGISGSSLSDEGQRAMASVEELLADLGEMGEETMASLDKIRLSSGRVAYSVDTLERLNRRMLDEGLDLFEARKAEFGVENDWQPKANPLGTPTGNPAVDRTIKIASRWLRACEREWGKPETVFVEHVREGFKSEKQKREEQSNMDKRYRANGAVREEIVAALGEKPGSGAVDKEAIRLAEIRRWQAIQRQNGCCLYCGTGIDFSNSQMDHIVPRKGVGCSNELPNLVAVCADCNASKNNTLFYSWASPEMCEAAVERVFFWNRDSYFSSEKQFGSFKNDVIARLKQKEEDDPIDARSIESVAWMALELRNQIAGHFGYEGMVSLATEGNDPFAMQRVRVFKGWITSEARKASGLEKSLPWIGSSSEKTRLDRRHHAVDAAVIAMMRPEVAKTLIERDAIRRSSRDIGRRFKRGEEGDWHVYRGADENQSKLYCFWRDVQMQRLKELMIQYMKDDRIVVSNPLRLRVGVGRAHKDTISKLTKRRVGDELSAAAIDKAETSALWIALTRQPDYDENTGLPANDARRIRLHDRWLSADDPIYFMASESELDMVKDAVYAPVRNGYAPIGDTIHHVRLYRVPKLNSKRKRTGWQYASLRVFQVDLVKHAQHNLFDIDLPMHSISVRSAVPILRSSLAGGTAEYLGWVVVGDELVVDVEAALFSPEGSQKMNKFMKAFPGVRRFSITGFNTNSKLTLAPRYFSSEGLPDIDWKGVDVDIEKTINRTYGSYGWNKSDVDAINFVIEKGCPLSIDKVLATHPTVMRRNALGVPRWGSDNNMPVSWKIPPHPIQ

SEQ ID NO: 7699 - protein, 1191 aa, synthetic construct
  REGION 1..1191: note = Synthetic
MAQQKIRYRIGIDVGLYSDGLTAIEIDDSSDDPRDAMPIRILSSMSVIHDGGVDPQNAKVADSRKAVSGVARRTRRRMKQQRKRLSQLDVILKKLGYPVDRARDMSDGTIPENTYWMWNARIFAATSYIKNDDERALAITAAVRHIARHRGWRNPYEKESSLIEDSKKPSEFYLEFYKRIAKWEYERQQQGIQDANTYGATFSYDDKNNLVITPPSWGEGDRPTPAELVKDLLVPQTGFRIRRDPPKESEKGNKSSNVADIPETQMKKLHQSDNCYELLKIFKMQKVPENQWDEIITAVFKQVNPKEVGAAAKLVAKDDLPPGKPRASRASIAFQKYVILTTITNLRLVDGKEERRFTAKEIQTAYKFLCSRKVSKNGGCTWSDLAETLGTERNNIRGTGGVTKDGEPISNKVPPYLSTEKEVQKVKQLADWWYDDTPTKEIEREIFIEMMGNAGLDVSHLTKEEQEAKRSVDSFLDELGKMDEAVLNKVDNIHLKSGRAAYSVDTLTRLNRRMLHDGMDLFEARKAEFGVDDNWRPQPNKLGTPTGNPAVDRNIKIVARWICACNKKWGKPETVNIELVRQGFMTPKKAREEDQAYTRESNKRYEANQKVRQQVAKIKSKYKERQSALSEEADANIHGDDAISHGDIRRLQAVQRQNGQCIYCGKPITFQTCQMDHIVPRKGVGSSNDLPNLVAACASCNKDKSNQLFYTWAKTDEKRKEVIERVDHWNMDSYFTSENEFNKFKKDVKARLLQKEEDDPLDNRSIESVAWTARELREQIEGYFGYRGTTTGHTEGNEDYSLQRVSVFRGSVTAAGRRASGLENSLPWIGDKSKKTRLDRRHHAVDAAVIAMMRDSVALVLAERDNLHRNLLDGAVSEQKYLLQKLKIKDWTDYCGDERHRGLFVHWRDEQMKYLISLLSNAMKDGKVIVTNPLRLRLGLGRAHEDTIKPLYKCKVGDKLTPTNIDKAETPQLWCALTRHPDFDPKEGLPEDWNRRIRVNDKWLDADDEIGFMADSQEDFNSVKDAVYEKVNGGYAAIGNAIHHARFYRYPKISKAGKQTGWKYGYVRVFQTDLLKHQSEDLFHVDLPQQSISVRSAIPDLRRALFEGTAEYLGWAVVGDEIDIVRSDPYYGPTRTSAINLFLKAFPTIQKFKVIGLKSNEQIKLAPMEMASEGAYSINDLKKLDEKNNYG

SEQ ID NO: 7700 - protein, 1085 aa, synthetic construct
  REGION 1..1085: note = Synthetic
MTKILGLDIGANSLGWALLNNDNNTIIDMGSHVFPAGVSDFDTAKEKSKMADRRSARSARRRFWRRKRRLRKLRYIFKEYNISNLKVHDYNSLDPYEIRKKALDKKITFDELARAIYHLAKRRGYFDISCADAGEEAIKEKGKIFDGLKEKGEVVIAGINDLRKQLITYGGNFRTVGEYFASVNTDEVRIRCRYTERQMFIDEFEQIWNKQKEYYPDILNDELKEKIKKAAFWQRPLKMQKSLIGYCKFEKLHRRAPKSHPIAQLFRMYQVINNLTISGGNRILDNEKELSELERSKLINKLLISKGIELGKNANKQIVALLKLDKNSHYVTNYDHQGKIDGIKTYSAIFGILKNKSIFNYNFKQITETSLQEKIKINEELKKDFLKDEITIEELLQAIWRIIFTEKRTDIRINNLKRKFDLDDETANKLANIGLEPGYASLSIRAMRKMLPYLRMGYKYDDAACKAGYHHSLWDEEVEKLDYLPPPAFIRNPIVTTSLNELRKLVNELITRYGKPDIIRVELARDLKKSRKERQKIKEQNLKNRAEREEAIKEIKNYFSDSEYYAQDFPRDRYITKYRLWKQQKHLCIYSGQNIGINQLFSAETDIDHILPYSKTLDDSMNNKVVCFRYENAFKANKIPWEAYAQDKAKYHAILDRVKTFPTSKAKKFQMNTKQFKDYIQGKDEEHKDFIERQLNDTRYISKEALKYLKHICDEVNVSTGSTTAYLRKYWGLNTILAPAGEDFKNREDHRHHAIDAVVIALTNRSTLQRLSTYSHITGDYYLEDFEQYNPNQFPLPWENFRKDVQEKVDCIIVSHKVNRRARGKLHDETYFGLRKNHYGQERTDEKGQKLFHVRKPLDSNLTHSQIKSIVEEDIKEAIFQRLLKFGIDPDSKFTLPVDFFNEPLVIHAKNGNSYRTKSVRIAVPSYTMRKIRDYNIWVETGSNHHIIIYKDITIGKQNGKVVTLLDAVQRKRKGLPVIDKELGTNEEFMYSLIKNELVYLGEFPENFDLNNKNYYKVMFDKIYRVQKFDQYGRIILRQHNIAVLESIDKEGKKVEPGILRKSAPSLEATKLKITTLGFLSIAND

SEQ ID NO: 7701 - protein, 997 aa, synthetic construct
  REGION 1..997: note = Synthetic
MERVLGLDLGTSSCGWALVDVPTTDGESGKVIALGTRVFPAGAEISGSISTTPGKERREKRTMRRQIARRAHRKVLLRGELTRLGLLPGDLVEYEQLMDKNPGELLKRAENDEQLSLRDIGRIIYWMSCRRGFLSLRKGGSSLIDEDDESDWQPSRFRLSQYNPTTGERVVTGQEEVLVNVLESQRRFYPEILTSQIIFGRRGRMTYPARPIRRDAFLGDGDGNYVDEFGIHGLVFFQRSVYWDKGTIGYCSLDPKSRKQRASRADRVSQEFIIRQLLINLKVGSDKRQLTDVERQRLFEVLMQQKTLAFSKVRSILSLSDDDKINFERQDDKGLSGNQVDPPLSKAVGATWATWSEMTKNNFVNLLIGSATEESIRTQLTKQFSLNDDQISAVLKVPLPSGRMSYSRKTILRLLPFMSSALTVKDVIQQAGFSSREDTPATSTVDLDSITNPLVKSSMRQLAKVLGDIDSRFKRNDGTTFDKVRIELARDVANSAKKRGEITKSQRRNKGDRDKAKVKIAEFAPGAEESSDSIRRQRLYDEQRNICVYCNKPISQVDVFSNKVQIDHILPRSQTLDNSMGNVVLVHSAENQEKGERTVFEWLGQEGVDQVVETAKRLDLREGKINKLRLEHVEPDHIPQSLLTTTGYITTLARDYLRDITGLSEKFIEVSRGRLTASLLYLTGLSKKDLVDDHRRHAQDAVMVALTSPKMAQNLAKRYKRERDFNKPRDDEYGTSEPWRGLRDDIKKHLSVMVTSHKPNRKNSGQFVEETNYGRVNSPYLKGNTVYARRRPLVSGFTQAQFAQIADPAIKQILIEDLKRRNIDVTTASKITFDPKDPPTFDGNAIKSVRCHANYPSHIILKPDTEPKTGVASGGNHIAYVYKNQSTNDYRMKVINRLDSYRVRNKPEKERQKDFIESGEVFVMSLCVTDTLEVLKDRVQSLYKVTSIGALPPVIYLAPINDSSGDNKWKVSINPLMSFSCKKIVVTPSGLVRRSNQ

SEQ ID NO: 7702 - protein, 1351 aa, synthetic construct
  REGION 1..1351: note = Synthetic
MNRGITIGLDIGSNSVGSAWVDEDKREIEVGCSVFPAGVEDSEKGRGAPKNQDRRQKRSARRSIARRSQRKRNLRKFLIEVGLLPRDRESAETLFRQDPWQLRRLALTELLTPHQFGRVLLHLAQRRGAAGLRPVVEEDGKSANDSDGPIKEAIDETRKKMLARECQTFGQLIADIADEQAVPLTAPDGKPKRNEYNQVVKFRNKIRNSSGEFLYQANREMIRDEFHILWEKQKELGGDLANLLTDEVRLALDDPTRDETWRHRGLMFGQRKTYWDVGTLGRCDLEPSDRVAPVADCYASRFRVIEYVNNIRIQRPGETEFEPLSQDEHAAVVEKLGKQKTATISTVRQALKIDTKSLKKSNFSTDDFVLNLERDEQRPPNTDWFECAIASPLTEAGHTDLLSCSVQLSKLNKAILRFDPAEPDDEVRLRNKLVHLKLCQQGIDAVVEGWRTRPKLENRLKLSRRAIRNLLPYMEQPDSDGHWRTQIEARCAFADDEHVLDSATGKPPTDEQRKRYRLGRGRLNSAARHYLKKHPEEYLPLPPVLSNPVVRKAIYEVRRHIIAYLKRHDGRRPDRIVIEFAREATKPAIVNDRMLARNRNRDQIRRQIRESIIRPAWGAKFDSLTTNQIKAAETRVLLCLQQRGVCAYSLESVLDDENGMCGYSGRSITPRQAALGTNLEVDHIVPYSRCGDNSMNNKVLCYIDSNRDKGNRTLREWWGDQFDERIKPMRFFENARPAKGDYFEIRDYTKKWRNLSADKVPKEWQGSQLSDTAYAAREVQEYLEAALWPDEPGHLEGGPRRIFVTRGGNTARLRRDWQLYRQADPNELPPSPEEQERRNAKNRGDHREHAIDAVVIALTSESRLQKLARDVNDHNDAWTQARRSGQRPKQLRRKPLPPPWGDVQSFRQQVMSLIYPTGADETSNTPLVVSHRAVGRKLSGRLHEESLFGPVARQKNVFIAKKAIGDLTPKHLRMQVAENPQDAIVRLAKRYQQADRNLSAKDAKARAKKVVEGRGYQPRMVAPSPEKSGLIRDIGLRRVLRKQITERAEKLGILRDADSFTKSDLRKMLAESFGPFRQESGVPIKSFRLLRTMNGPVVMPRREFDYERMQWIELDSKKRPTSPRAHLSGNNHHLEIRRDLRGKWVGNVVSMYEAARRAKKLGVDPVDRTSDDERGTYVMSLAIGETVYMKDKETNQPGYFVVAKLDSRKGKNLAEFCPHWDARRAVGEKDDGGNLIDGTCRRTISISPSQMQSLAPPDFDTPVKVLVSPIGQITVIEPHEPRTVDLDELDAEVVAIAREAIAARQSRNAEKRKGRRCYGSWSWMRERLRKCNKDHLAAELSSAMRLMTSCE

SEQ ID NO: 7703 - protein, 1349 aa, synthetic construct
  REGION 1..1349: note = Synthetic
MKRGVTIGLDIGSNSVGSAWVDEDKQEIEVGCSVFPAGVEDSDKGRGAPKNQDRRQKRSARRNIARRSQRKRNLRKFLIEVGLLPRDRESAEALFRQDPWQVRRLGLTESLTPHQFGRVLLHLAQRRGAAGLRPVVEEDAKPANDSDGPIKEAIDETRKKMLARGCHTFGQLIADIAEEQAVAVNDQDGKPKRNANNHVVKYQNKIRNSTGEFLYHADREMIRDEFRILWEKQKERGGELATLLTDEVRLALDDPTRDETWRHRGLMFGQRKTYWDVGTLGRCDLEPSDRVAPLADCYASRFRVIEYVNNIRIQRPGETEFQPLSQDEHAAIVERLGKQKTATISTVRQALKIDTKSLKKSNFSTDDFVLNLERDEQRPPNTDWFACAIALPLEQAGHTDLLSSTVQLAKLNKAILRFDPAEPDDEARLRNKLVHLKLSQQGIDAVIEGWRTRPKLENRLKLSRRAIRNLLPYMEQRDSDGHWRTQNEARCAFADDEHAADSATGKPPTDEQRKRYRLGRGRLNSAARHYLKKHPEEYLPLPPVLSNPVVRKAIYEVRRHIIAYLKKHDGRRPDRIVIEFAREATKPAIVNDRMLARNRNRDQIRRQIRESIIRPAWGAKFDSLTTNQIKAAETRVLLCLQQRGVCAYSLESILDDDNGMCGYSGRSITPRQAALGTNLEVDHIVPYSRCGDNSMNNKVLCYIDSNRDKGNRTLREWWDDQFDERIKPMRFFENARPAKGDYFEVRDYTKKWRNLSADKVPKEWQGSQLSDTAYAAREVQEYLEAALWPEEPGHLEGGRRRIFVTRGGHTARLRRDWQLYRQAAPHELPLGPDEQERRDAKNRGDHREHAIDAVIIALTSESRLQKMAKDVNDHNDAWTRARRTGQRPKQLRRKPLPPPWGDVQSFRQQVISLIYPTGADESSNTPLVVSHRAVGRKLSGQLHEESLFGPVAQQENTFIAKKAIGDLTPKHLRMQVAEKPNDAIARLAKRYQQADRKLSAKDAKARAKNVVEGRGYQPRMGDPSPEKSGLIRDIGLRRVLRKQITERAEKLGIPRDADSFTKSDLKKMLAEPFGPFRQESGVPIKSFRLLRTMNGPVVMSRREFDYEMMQWTQLDSKNKPTSPRAHLSGNNHHLEIRRNLRGKWVGTVVSMYEAAHRAKKLGVDPVDRSCDDDRGTYVMSLAIGETVYMRDKETDQPGYFVVTKLDSESNRVFLCAHWDARRSVGEKNESGLVTEGTKRRTLPYPPSKMQSLAPPGYDTPVKISVSPIGQITVVEPHEPRTVDLDELDAEVVAIAREAIAARKSRNAEKRRGRRCYGSWTWMRERLRKCKKEHLAADLSAVMRAMASGE

SEQ ID NO: 7704 - protein, 1443 aa, synthetic construct
  REGION 1..1443: note = Synthetic
MKKILGLDLGTASIGSAYVLEAEKSADQTKIVYLGTRIILSSADAENFSKGLSCSPTTDRTFKRSMRRRLQRYKQRRSSLIQQFKKIGIITNTEQIIREPISETHELLRIRSKAVSEHVSLEEFARILLTINKRRGYKSNRKTSKSTEEDGKLVDAMAVTKELIKLKKTPGQYMFERFKRGKYAEIDFYPFDLINELKQIWEVQGQKYPDVLTEGLLSSLLKQKTGKAKELIYSKSDLNPAEVPIDYQKGKKLRKTILNKYFAYESRSLAVTNIIPVEQAITAIVAICKQINNSSGYLGAIGDRSRVLYANNQTIGQYLYERIKANPHDRIRGEVFYRQDYLDEFDRIWECQQNYYPAILTNDRKQYIRNRIIFYQRPLKSKKSELAFCEFESREVEHNGKKYTEGLHVAPKSSPVFQHFRLWQRLGQIEVSPLRKWDKQSNELFEQQNNADREGILNTEAKQKLFSYLNLLDHLTDNEILNILGYSPDKWKINFREIIGNRTNNLMMKAFFSMKEMTDGEQIDWEKNLTKITNGQSLISPEQIVDLIRQFFEREGITTSLLYFDPATDNFREQSHYSLWHLLYSYEDDNSPTGTTSLCKTLAKRYGIPHELCPLLASLTFERQYGSLSTKAMRKLLPFMQEKRYDEACELAGYRHSAWITKEENAKRTLKNKLPLLRKGSLRNPVVEKILNQMTHVINTHIAEYGNPDEIRIEMARDMQANSKQRKAMTAAITEATKRNTQFIEEIQKEFGFNPSKNDLIKYKLWKELAPLGNKTLYSNIYIPKEELFTAKFEIEHIIPRALFYDDSFSNKTLELNSVNKLKGNKTALDYLDTLGQEKANDYILRVEELKKIGAITQAKYKKLLIREKDLGDDFTNRDLTNTRYIIRHAADRDLTNTRYIIRHAADMLLQVTPSIVHTNGSITAILRRDWGLLDILKELNLPTYESIDRKISDPEEKLTQSVDRKDGQAIKMIKDWSKRDDHRHHAMDALITALTTRKHVQYLNGNSGAEETDKAQKLEQLKALRKQLIGSDGHFIPPMHDIRVQAKEALSRVIISTKVKGKVTTPNTNIICSRDKTTGRKIYVRQTTLTPRGALHLDTKYGINRYYQEREVSIGSKLTQEEIRLVSSPHIQSILLERLRAFDNNPKSAFTGRNSVDKKPLEDKNKKLVYTDKKVKQTILANRFVKRDRVNSKLDLDNVIDTGIKRILERRLKQYGGKYETAFSDLENNPIWLNEEKGIAIKSVRIRGKNNTITIRQTNTCRIKYVANDNNHHLAVYALPDGSIKDDIVSFFDAVERSRKRLPIIDKHKNQSLGWKYLFSIKQNEYFLLPQQVEKIDIDTGEISMQTTFSPKDLSHEYIMNPDNYAELASHIFRVQSISKTPQGNRDVRIYLFKQQYISGSQKDSLHLKGITHRQISSAKDLAELVKIRVNHLGRIVSVGEK

SEQ ID NO: 7705 - protein, 1438 aa, synthetic construct
  REGION 1..1438: note = Synthetic
MYLILNNFKTMKKILGLDLGTTSIGGAYVLEGERPEEQTKIVYLSTRTVLSSADAENFNKGLSCSPTTDRTTKRSMRRRLQRYKQRRSSLLQHLQKTGIIEDREKILQKPISDTHELLRIRSKAASEKVSLEEFARVLLTINKRRGYKSNRKTGKSAEEDGKLVDAMAVTKELIRNKKTPGQYMFDRYVQGKYAEIDFYIFDLTNELKQIWDIQAQTNPNIFTQDLLDSLLNLKTGKFEKHIFSKTNLAPAELPKDYLNGKKLRKSILNKYFSYECRSLAAAGVISIPMAIAAIISVCKQINGSSSYLGAIGDRSRILFANDQTIGEYLYQRLQKNPHDRVRGEVFYRQDYLDEFDRIWAQQEKFYPEVLTKEAKLPIRNRIIFYQRPLKSKKSELAFCEFESHEIERNGRKYTEGLRVAPKSSPIFQHFRLWQRLGQIEVSRLRKWDKQEAQLFQQDEKTDQGGFLCLEAKEKLFGYLNLLDSLSENEILNILGYNSDVWKLNFREVLGNRTNNRMMRAFFTMKEMADGEQIEWEKNLTKITNGQPALSPEQVIDVIRQFFNNEGINSELLHFDPFADDLRKQPHYSLWHLLYSSEDDNSPTGITSLCKALSKRYGISPELCPPLASLSFEQEYASLSTKAMRKILPFLPEHQYDQACKLAGYRHSSWTTKEENNQRKLIDKLPLLRKGTLRNPVVEKILNQMVHVINAHIAEYGNPDEIRLEMARDMQSNSKQRKAMTASIAEAAKRNVLYLEEIKIKCGINNPSKNDLVKYRLWKELAPLGYKTLYSNTHIPLEELFTPKFDIEHIIPKALFYDDSFSNKTLELNAVNKNKGNKTALDYMGTLGFQQANEYVLRVEELKKSRMISPAKYKKLLLLEKDLSDEFTNRDLANTRYIIRLAADMLLQVTPSIVHTNGSITAILRRDWGLLDTMKELNMPIYESIDSRISNGEEKLVKTIERKDGQSIKVIKDWSKRNDHRHHAMDALVTALTTRKHVQYLNGDSGSDVTDKRQKLELLKKLRSQLMGSDGRFALPMPNIRAQAREALSRVIISTKVKSRVTTPNTNVIAGRDKMTGRKTAIRQTTLTPRGALHLETKYGKNRYYQEKEIAIGAKLTMEEIQYVSSPLLRSILTERLQEFNGDPKLAFTGKNSMEKNPLRDKNMNVVYTDKKVKQTILDDRFVFRKPIDKDLKLDKVIDVGIRRILEKRLNKHNGQQEKAFSDLENNPIWLNEEKGIAIKSVRIRGKNNAMPIHEAGRPIDYVANDNNHHLAVYALPDGSIEDDIVSFFDAVERSNQNLPVIDKVKNQSLGWKFLFSIKQNEYFLLPRQEDTVDIDTGKIQRRTTFVPQDLSPEYIMNPDNYAELAPHIFRVQAISKTRQKVGYVRIYMFKQQYVSGSQKESSFLRGVTQVQISSAKDLAQLVKIRVNHLGRIVAVGEY

SEQ ID NO: 7706 - protein, 1069 aa, synthetic construct
  REGION 1..1069: note = Synthetic
MARVLGLDIGIGSCGWAVVELPEIDPETGEIAGEFAILGCGVRGFQVPEEPDTRELKNKQRRQKRGQRRVIARRRLRMRQIRRLLREQGLPADPGPLPPGSPHDLVWRLRVEGLSRLLAPAEWARVLIHIARHRGFRATSKRDRNRGAESRLAATPASEPDESLTYAQRVMRIAAAEGCYRNRVGRSEPTPPSRDEVERQSRARAFGVDRTPLRDEVEREAQRLFEVQRRFGNPATSPDFERQYRHTAFSQRPLQGIAELVGRCRFLPEEKRAPKQAPSFELFRFLQSLAHLRLVESGSRERPLGAEERRQAESLFATRKHVTYAQLRKRLGLAQDVRFAGLVSSRKNPARKSPENPEDKTFASCEGSHLLAEALGSQRFFQLLDQAPEQLDRAAEILIREEDIATIRQRLAEAGFRPEEVSALTRDEVLDTVSGFKGVGHISTAACRRLIPHLREGLSYTEACAREGWDATAEGDLRLEDVRNPVVQKILRESLKQIDVVVREFGEPDRVHLEMARDIGKSPFDRRAIARAIQERTKERNDRAKEFENLLNRQPNDEELLRFELWKEQGGRCPYTFPDESAYIPVEALIASDNRVQVDHIYPYSRSGDDSFRNKVLCWTSANQQKRRRTPFEWFSQDRPDLWEAFEKRVQHDFPHMHKEKKRKLLARSFAERETEYRRRHLNDTRYAMRVLASALRQRFPTVGTRRVFARPGQITAIVRRAWGLDSLKRNNELGDRDHALDAIVVACTSESLLNRLTRLHQRLEELGRGRLVPEIETPLGSSSEARERFRTLVKRTVEAVLVSRSETRRGRGPLHGDTLYAFTRLPDNSEIQYERKYVWELTRADLDRLKDHDTRGRRVREALEEWFERAERAEKDLGKTSRAEKLQHFWRQSPPRIGQGPAIRRVRLKRRTTAGIKLRRGEGVAHADQETMVRIDVFEHDGKYSIVPIYAWQLALLDSPPNRAVRSGKGEDEWEEIGPEHRFLWSLYPGSFIKAETRDGKTFKGYYRSFDRNTVRISITPPHLWDSRAIERFGSRTLARFEKWHVDRLGRLSRIAQEVRTWRGEPCS

SEQ ID NO: 7707 - protein, 1140 aa, synthetic construct
  REGION 1..1140: note = Synthetic
MKYVIGMDIGIGSIGWSVIRSDADCKRIEDFGVRIFDPGENASDRKSNSQIRREYRSVRRVLRRRKHRKELLKAHLENIGLTTIDRINEYFKHADGDIISLRVKGLDKKLAPEEIAACLINIANRRGYRPFYENEELSQYEKTSLNKTRQFMLSGEYRTSAEMILKNEQFDSEESEYRSYRNRSGNEETVLIERKWLRDEVEKILKKQSEFYPCLNDRNTNAIKRIIFDQRDFEDGPGDKNDPFRRYTGFLESMGQCRFYPDEKRGYRATLTADTYSLVNELSQYSYVDENGCFVFDSALAHDLIASALKNAKFTKSDFNKICKAHGIVPIYGGKGKDTDISRCFKFLKAIKPILEADGFDWETVCNIDTASDPDSILNRIGIIVSENITPARRKKALKNLNILNDDSITALCNYKFGGTSSVSYKYMSGAIEAFLNGDIYGKHQASHIEETATESVKHTKLPVFDKDFEFFKNPVVFRAINESRKVINAIIEKYGSPSAINIEVGSEVSRSFANRTADKNEQTKRMKEKDAAKKAIAELLGVDIASVTSKMIDRYFLGELQGWKCMYSGKEINKEECLRGSKTYEIDHIVPFSLILDNTLNNKALVLTSENQLKKQQTPLMYLSGERRKNFIGTVNELFRAKKIKKKKYAYLLQPDLNDEKMSEWKSRNLNDMRYISRFMVGYLKENLKFDNSSKSEGRWQNVYAVKGSLTSMFRKLWLNETTWGRADKASIKAETYLDHAVDAVVIGNCLPVYVEIAQVNLRLRDIYKSNGRQFVAEYWDCFNKGVEMISRYYNIDKDTVRAFLKKSDRIPSLIPDLREEVDRRFVDHAIYSKYQKEIADHEGKKFKEPTYEEAEQAYRTSMENLYPTDLQFAHSLSMPLISCKPERKFSGKITADNPVKLREIDGKLYTLSKKRIYSAADKDKIKRTDIEKIYTSDANLIAYLIELFDGAKDTATLRDIMKENGISEIRTKNGNAIRKLTLRNICDKDFLKKEIDENNHTYLDTAKYYCVELYKDIKDKLRVQGIKRADIIPQNGKLCLAPWYKQPDNYFKHVMYLQKNDYLKVYKNGKLSFCGYYRSAAGLTNSKVHFIIDNQPEDKEKYITLKLEVKKYPVDILGKIGKKEIKCGEPLSSAKVKK

SEQ ID NO: 7708 - protein, 1033 aa, synthetic construct
  REGION 1..1033: note = Synthetic
MEKGKEVILGIDLGTNSVGWAALSCAPDKENDSELLDAGVRIYESALSGLEKDGVGESKCANRRVKRGQRRIIERKARRLAKLAGLLQKAGLLPSEYNIHDPQIRNALFEMLDKEQKVSPYKLRARALDEKLMPFELGRALYHLGQRRGFWSNRREGIEETEKSDNVSTKNKERKFDDDKKDKDDERKKVKAGINSLAKEMGDSTLGEYFASIEGKKRIRERYTSREMYQREFSAICNKQKEFYPDLLTEGFYKSIYKAIFFQRPLKTPKRFVGFCELEKGERRYPWAYLEAQRFRYLQKVNDLTIIDPNTFTQNPLNDKQRTDLIEALEKKEWLEFKDIRKKLSLPEDTIFNLERGGEKRIPGNKTAAKLRRIFGDDRWDSMADKEKNKVVEDWRSIVKDKTLMRRGINHWKLDAESARRFGRFSLESGYCRFSKMALDKLLPELNNKVQLQTAINKQYEKQISSAADLLPPVLETFPSLTNPAVIRMLTQLRLVVNAYIKKYGKPDTIRIELARAAKRTAKERLEYSQMTRKRQKEREGARILLREQRNIYEPSNDDLTKALLYKECFPDCPYTGRPINFNSLFDTNSEFHVEHIIPYDRSLDDSFTNKTLCYNETNAIKGNRTPYEAFHDSPEWNNIIDRVKKFRGDKSIVKAKLRRFLATPEEVQKMLDNFVNRQLNDTAYAAKLSKKYLGKLYGGVDDKGYDEPKKLRVQATNGEATAKLCYAWGLNNILGEDNRKNRGDHRQHAVDAIAIALTTPNFIKMLSDNARSAQNINRLLSARFRQPWNGFHAQVRQQIDKMIVSHMASHRVRGALHDETFYSVKLNENGKKEVYTRKSIKGLTEPEKKRITDINVLNIIGGNDQGAKRVKIIPKNKNVIKIGKPPHERFVLPGSVHHMEIFEEHKKNRIIWTANPPVTLFEANRRKNKGEPIINKAGENNGKYLFSLSCGDTIELDNVKTGKPEFYVVKSTPQSKQIEIFPINVAMKKKEYHKINTKGGLAPKLNGPKGLKDRHCRKVIITPLGEVRYAND

SEQ ID NO: 7709 - protein, 1589 aa, synthetic construct
  REGION 1..1589: note = Synthetic
MTNFKKILGLDLGTASIGYAMVERSDDGEFGGFVKNPKGHEAIGVRVIPTTDDVLNAYNKGQSVSACRERTSKRGSRRLLQRYKARRERLITTLKHLGWLNINFPSLESRQAHQYRRVNPFFMQDSLRQIAQVNGWPEAQSKNASFVRAVLTKTQVEKRQKQFIQEFAEKLGSKEDFWNEELLVYYLRHLGVTERLELEEIALVLYHLNQRRGFKSSRKTNNEDDKDKNQGSAKQQEAEEDNSDYKDYEVLRIEGKKHTLKDPDTEEEFVVNVSQEHQPLFKEKTVFLSIEKSGKTSKYHLPKAHKTVTLARAEVKFIKYAEETEIKGKKFKVYRLRLVVEDKTMDGDMYFTLENNGAAKNLLEEGKACFLEITESTDAKGETTRTFKRAKLNEWAKNKEKVKEELEKNLDPRTQKPIEVASLHLQKMLDGIEQQSAFAGTIYSTRDQIILRKFYIRELQAIMSKQAELHKGLVQEQEILGLLDRLYQNDGEGDKQTIKGKDGHKIEVIKKGKTYKDEVKKYLHKTQSPDDTLRHLLEKHIIYYQRPLKSQTNSISTCRFETQTGKDGKPVPVRVAPISAPYAQEYRIWNQINSLMYAEEDETKKERPLSPTDKAKLFEMLCNSKEVGVGSLAKKLWGKNPAKVEFNKKNDIKLKGHDTRCDLKNVLKKAQSDQDRMRLEEILANAQQFELLWHLLYSIEADLEAEPIRNPIVKTLQKRFGFSEAGAVLLSKVQFKNDYSALSKRAILKILPLMRSGCYFDAQKLPNKAHDLLQSIKNGLEMPDIDPKTYKTLHSANLEGGWLYHMAASLLYGSHSREENLTHFSEPAEIKAMRQHSLRNPVVEKVVNEVLLLVKELWENFGRPDEIRIELAREMRMNAQEREQMTRYIGAREKANKQAAANTGLTNPSKNDVLRYQLWDKAGEKCVYSGKKIRKEDVFNHNITQVDHIIPRARFFDDSAANKVLVFTEENKAKSDKTAYDYMKSKGPEALESYKKDIACFKDQKQKYKHLLMRAEDIPDDFINRQLKETQYITKKAKELLRAVVPEGGQVWVTSGGVTDYLRHIWGLDTLMQELLRPRYEAMQEKSKEALKGQKLIFDKETLDKETGEIQTQEVFLNFSKRLDHRHHALDALVIACTTQGHVQLLNNKNKVYGQNPQMHAGELTKVELLSPEALEKMTAAGIPEGGERNLTHKLILQWAEKQREAEKMSAEAGRKHKKGGPTRFAEPFKNTRKLAQNALENIVVSVKSKKEMRGKLHDELPLGEVWVNEKVKIAELFKLIVKPDAYQKIPTPLAWLEAKLRERLAECQNNLKKAQKSLQEKPIRKANGQEIEEVTLLKAYLVKRRKIESLSEKQIEDILDEKLKTAIKEELLGGIIPNPKQLKEMLSEQNITAFNELRKAEGLPPATHVRTKASPLNADTQETNKKLANKKYATKGNNFCFVVGVNLDKNGNKKRVFGAVPLADALESGLEPEAAFLTENQATLAFKLVQNDVVYVPYEGQNMREVDFRNASSRLFRIKKFTGPQIFLEPLNMSSALKFDVNDEISTNGIEIVDKGSKAAKNYFYKLKTNRLGHIEGYWNDEGVFVKV

SEQ ID NO: 7710 - protein, 1031 aa, synthetic construct
  REGION 1..1031: note = Synthetic
MSKSDRGLVFGVDLGKSGNGLAGIDYENKNIKFLSSRCFKAPEDRAGKSLAKVRREARSIRRQLDRKSTRKKQIIKVLKQFGVIGQECDSRWFETKKNGNGGVDLPIITLRSQGLDRQLTNREWARVLYWFCGQRGYINRGEDILSNEEASVEDSSGSDEAGKVLSAISDNRNALKKSGYRTFGEYLYKESYTTTRSYRNKNGEYKHCVSHSMVVDEINELFKQQKKLGNTYTSEKFRDAYLEQLNWLKDTIAFDKLTYQKVGYCVYFDQYSDEPQKRAANADLISEVVKAYEKLGNIRLKFEDKSEQSLTKEVRDAVINEMFSIHQGSRIKSVTYKTLRKLIDNENLIEFKGIKLDLEKNPVFVPKAWNIYCRVLSVSESGLQLLNRMKNDFKFANAISESLTYATSLESLESRILMYQDKENLEISEEELTLIESLPYNSKIFKGYGSRSIEALEMLYDQFTEGGAFTLDEAEKQSGLQGFRLRDKGIKQRLLPPYSDYDPQCTNPVVLRALSQARKMINSGIKQFGMPDIIRVELGKELTKSPKQREKIAKEQNKNRKENERIRKEVSDLLGIDCSCVTKKQILKKKLYEEQKGLDVYTGESLGASLHADDLTYLKDDSYCQIDHILPYSRSADDSIANKVLVLAKSNQDKGNRTPYEWMTSGHGHHLSWEEFSIRVSTNLLFPDSKKWRLLEEDFDKKEVQFMNRNLSDTQYMSKAIVAWLSDSLDFPSRYGQKQHVYATNGRMTSKLRKEWGLNFGENGLKDRNDKRHHAIDAVAIAACSASMVKEFATSYSRLRETKNSSLAEPWEGFADQVREAREWVIPTMYRPNKKNGLLFEDRRYRYARKTNKHVLIGKEGKEKTSGNIRFFDDEKDGKHVKIVGDVAYIRLWLDANAREGKGEWLIEPVYFADLRTIKNGTYVPKYIATYNATNEEWKPVPDDVLSKNIPLLVHRQDVIKVESSFFRVNSVDIAKKTLELVPVFYDSKYSNPELMVIRKWNKSTKIELVSEDALGMMWFNFLKNQNSSES

SEQ ID NO: 7711 - protein, 755 aa, synthetic construct
  REGION 1..755: note = Synthetic
MSKSDRGRVFGVDLGKSGNGLASIDYENKDINFLSSRPFKAPENRAGKSLAKVRREARSIRRQLDRKSTRKKQIIKVLKQFSVIAQECDSRWFETKKNGNGGIDLPIIILRSQGLDRQLTNREWARVLYWFCSQRGYINRGEETLSNKEASVEDSSESDEVGKVLSAISDNRNALKRSGYRTFGEYLYKEIYATTRSYRNKNGEYRHCVSHPMVVDEINELFKQQRKLGNTYTSEEFRDAYLEQFNWLKDTIAFDKLTYQKVGYCVYFDQYSDEPKKRAANADLISEVVKAYEKLGNIRLKFDDKSEQNLTKEVRDAVINEMFSIHQGSRVKSITYKTLRKLIDNENLIEFKGIKPDLEKNPVFVPKAWNIYCRVFSASNPGLQLLNRMKKDFKFANAISESLTYATSLESLESRILMYQDKEDLVISEEELTLIESLPYNSKIFKGYGSRSIEALEMLYDQFTEGEAFTFDEAEKQSGLQGFRLRDKGIKQRLLPPYSDYDPQCTNPVVLRSLSQARKMINSGIKQFGMPDIIRVELAKELTKSPKQREKIAKEQNKNRKENERIRKEISKFLEIDSSCVTKKQILKKKLYEEQKGLDVYTGEALGASLHDDDLTYLKDDSYCQIDHILPYSRSADDSIANKVLVLAKSNQDKGNRTPFEWMTSGHGYHLSWEEFSIRVSTNLSFPDSKKWRLLEEDFDKKEVQFMNRNLSDTQYMSKAIVAWLSDTLDFPSRYGQKQHVYATNGRMTSKLRKE

SEQ ID NO: 7712 - protein, 1027 aa, synthetic construct
  REGION 1..1027: note = Synthetic
MSKSDRGLVFGVDLGKASCGLAIIDYEAKEVKLLSSRIIKAPENRSGKSLAAVRREKRSIRRQIDRRAARKKNVLKVLKQFGITPQDCDCKWFETKKNGNDGIDLPVIVLRSQGLDRQLSNREWARILYWFCSQRGYINRGEETLINGEVSTEVSSESEEAGKVLSAISENKKALKESGYRTFGEYLYKESYVSTRSYRNKAGDYKHCVSHPMVVDEIKELFEQQKKFGNTHTSEEFRDAYLEQLNWLKDTKAFDKLTYQKVGYCVYFDQYSDEPQKRAANADLISEVVKAYEKLGNIRLKFDDKPEQSLTREVRDAVINEMFSVHQGAKVKSVTYKTLRKLIDDDNLVGFKGVKPDLEKNPVFVPKAWNTFCRVLSASESGIQLLNRMKNDFKFSNAIAESLTYASSLDSLERRISMYQEKESLEISGDELALIESLPYNTKIFKGYGSRSIQALEMIHDQFLDGEAFTLDEAEKQSGLQGFRLREKGIRQPLLLPYSDYDVQCTNPVVLRVLAQARRMINSAIKQYGMPNIIRIELGNDIAKSAKEKSKIAKGQNENRKENERIKDKIAELLHIDQSEVTGKQITKMKLYEEQGGKDIYTGEGLGDIAFAGGRRFLIDDNYCEIDHVLPYSRSADDLKSNKVLVLAKSNQEKGNRTPYEWMNSNDGSHPNWEQFCLRVLSNIRLSDGKKSKLLEENFAEKEVSFIKRNMVDTQYMARAIAAWLSDSLNFSTEFDQKQHVYAVNGRMTAKLRRKWGLNFGEDDTKDRSDNRHHAVDAAVIAACSASMVKEFAISCSSLREVRDSVIAEPWKGFADQVREAREWVIPTMYRPNKKNGLIYEETKYKYLGKEVSDKKIVHILKGKKQGIGTVDLFRDPTGGQFARILGDRAYIRLWLDEEGKSGRGEWLIEPVYFADLDKIKRGSYVSRYIPRQKVTTQEWEPIPSRITENSMPVVLRNDDIVRIDGIYGRLSGLDINSKRLIFDRILSKDVKTIGSWTKDTSVEVIHEDCLGLMWFNLLKNQNSSES

SEQ ID NO: 7713 - protein, 1031 aa, synthetic construct
  REGION 1..1031: note = Synthetic
MSKSDRGLVFGVDLGKASCGLAIIDYEAKEVKLLSSRIIKAPENRSGKSLAAVRREKRSIRRQIDRRAARKKNVLKVLKQFGVTPQDSDCTWFETKKNGNDGIDLPVIALRSQGLDRQLSDREWARILYWFCSQRGYINRGEETLINGETSIEGTPESEEAGKVLSAISENRKTLKKSGYRTFGEYLYKESYVTTHSYRNKAGDYKHCVSHPMVVDEINELFKQQQKLGNTYTSEEFRDAYLEQLNLLKDTKAFDKLTYQKVGYCVYFDQYSDEPQKRAANADLISEVVKAYEKLGNIRLKFEDKPEQSLTREVRDAVINEMFSVHQGAKVKSVTYKTLRKLIDDDNLVGFKGVKSDLEKNPVFVPKAWNIFCRVLSGSESGIQLLNRMRSDFKFANAISESLTYASSLDSLERRISMYQEKENLVISEDELALIESLPYNTKIFKGYGSRSVQALEMLHDQFSDGEAFTLDEAEKQSGLQGFRLREKGIRQSLLPPYSDYDVQCTNPVVLRVLAQARRMINSAIKQYGMPNIIRIELGNDIAKSAKEKSKIAKGQNENRKENERIKEKIAEILRIDQSEVTGKQITKMKLYEEQGGKDIYTGEGLGDIAFAGGRRFLIDEKYCEIDHVLPYSRSADDLKSNKVLVLANSNQEKGNRTPYEWMNSNDGSHPNWEQFCLRVSSNVRLSDGKKSKLLEENFAEKEVSFIKRNMVDTQYMARAISAWLSDSLNFSTEFDQKQHVYAVNGRMTAKLRRKWGLNFGEDDTKDRSDNRHHAIDAAVIAVCSASMVKEFAISCSRLRDVRDSVIAEPWEGFADQVREAREWIIPTMYRPNKKNGLLFEESRYRYVGKKKKHILTSRDGKEKSSGNIRFFENEKDGKHVKIVGNIAYIRLWLDESARKGKGEWLIEPLYFADLQSIKDGSYVPRYISASHVTSDEWKSIPKDVLSKIPPVVVHIQDVIQVDSSYFRVDGVDIDSKALNLIPVFRDSNNSNPALAKMSKWNKGTEVTRISEDALGLVWFNFLKNQNSSES

SEQ ID NO: 7714 - protein, 1030 aa, synthetic construct
  REGION 1..1030: note = Synthetic
MSKSDRGLVFGVDLGKSGNGLAGIDYENKEIKFLSSRCFKAPEDRTGKSLAKVRREARSIRRQLNRKSIRKKQIIKVLKQFGVIAHECDSRWFETKKNGNGGIDLPIIILRSQGLDRQLTNREWARVLYWFCSQRGYINRGEEVLSNGEALVEDSSESDEAGKVLSAISDNRKALKKSGYRTFGEYLYKESYATTRSYRNKNGEYRHCVSHPMVVDEINELFKQQQKLGNTYTSEEFRDAYLEQLNWLKDTIAFDRLTYQKVGYCVYFDQYSDEPQKRAANADLISEAVKAYEKLGNIRLKFDDKSEQNLTKEVRDAVINEMFSIHQGSRVKSVTYKTLRKLIDNENLIEFKGIKSDLEKNPVFVPKAWNIYCRVLSVSESGLQLLNRMKSDFKFANAISESLTYATSLESLESRILMYQDEESLEISEEELTLIESLPYNSKIFKGYGSRSIEALEMLYDQFTEGNAFTLDEAEKQSGLQGFRLRDKGIRQRLLPPYSDYDPQCTNPVVLRALSQARKMINSGIKQFGMPNIIRVELGKELTKSPKQREKIAKEQNKNRKENERIREEISIVLEIDSSCVTKKQILKKKLYEEQKGLDVYTGESLGPSLYADDLTYLKDDSYCQIDHILPYSRSADDSIANKVLVLAKSNQDKGNRTPCEWMTSGHGHHLSWEEFSIRVSTNLSFPDSKKWRLLEEDFDKKEVQFMNRNLVDTQYMSKAIVAWLSDSLDFPSRYGQKQHVYATNGRMTSKLRKEWGLNFGENGIKDRNDKRHHAVDAVAIAACSASMVKEFATSYSRLRETKNATLAEPWEGFADQVREAREWVIPTMYRPNKKNGLLFEDKRYRYVGKKKKHILIGKEGKEKSSGNIRFFENEKDGKHVKIVGNIAYIRLWLDESARKGKGEWLIEPVYFADLQSIKNSTYVPKYISAAHVTSDEWRKIPNHLLVSSNPIIIHLQDVIKVDSVFFRVEGVNIDNKSLDLKVLHSDKQGDSGEERISKWHKETQISVFEEDVLGRNWFEKLKNQNSSES

SEQ ID NO: 7715 - protein, 1222 aa, synthetic construct
  REGION 1..1222: note = Synthetic
MKRVLGLDLGVGSVGWALVEKDEQNIPINVNKIGSRTVPLSNDEENNFSKGAAIPTNKDRTIKRTARKCNNRYKLRREQLTNGLRALKMLPDETLFKLDPLQLWELRAKAATEKVSLPELGRVLYHLNQKRGYKHSKDNEQDSKQTDYVATVNKRYKDLQSKNLTIIGQYFAQKLKESEHIQEGGKSYSFRIKDNVYPRAAYEEECKRILSTQKQFYPDILTDNNVKDLFQFIYYQRPLRSCKHLISRCSLEEQLHDVKEKDFYAPKVAPISSPLAQLDKIWEAVNNFTVRGKRNEELYITHEQRSAIVEHLEHNKDIKLTAIQKILGIGKSKEWFIKKEQLKPLQGDITRIKLAEAFSSGHLSKEKIESLLQLKIDFEEMADTTTGEVMGGIVVKNNVESQPLYQLWHAIYSIDDEKALRKTLAKLGIDDDDVMDALCKISFKTSGYAKKSTRAIKKILPYLMEGYQYSEACQMAGYNHSNSITKEEEASRPLQDHIPQIQKNELRQPVVEKILNQMINIVNTLLKDGPIDEIRVELARELKRSKDEREMANIRMNRNKRRNDEIASIIQNEYGLIPTKNRIMKYKMWEETDGFCIYCGTKIKLAEFLGGVDSEREHIIPKSLLFDDSFSNQSCACRKCNKEKGNRTALDYMRDIGKEKQYVEHIAELLEKDKISKTKYNNLLASYKDYLERKAKGKETEEDKNLWESFIDRQLRLSQNIARSAMELLRQVCHNVYATSGSVTDFVRHQWGYDNILHDLNFSRFAKSGNTEFITVVGADGKETQQERIKGWSKRMDNRHHAVDALAIALTTQSIIQRINNLNASREFMQKDVEASKEKFKEKKSLLEKWVAIQPHLSYGQAKDAISGILVSQRSGKHITTPGKRYEYKGGSKILRQQGLVVPRTALHDEFVYGRISRYDKNGVLQPEIVRKYGILGGMGCLFNGKETYKETTVTDKKTGLSMIKVTDGIKDVLDKIVDGGIRKRILERLNRGFEQGTDYRSNIKKALDNLRNLDQDPIYLDDAKTIPIKTVRKYTRSTKAIPLRYNANGAPIAFVEPGGNHHVALYKTPDGTIKEHICTNWHAVQRRMYGLPAIIDNPSDIWQQVANNDKLPEDLLTHLPDDNSQFIMSMQIGDAFILGMEEDEYQRVMAEKNYALLGEHLYFVQNLSSSNYRFRRHVEAQFDVTQMNKEDKRFYNIKSIGALSILNPHKVKISITGEILL

SEQ ID NO: 7716 - protein, 1222 aa, synthetic construct
  REGION 1..1222: note = Synthetic
MKKVLGLDLGVGSIGWCLVEKDDKNIPLRIIRMGSRIVPITKEEENGYTRGNAISKNADRTTKRTARKCYDRYQLRRKALVNLLKRCGMMPDKGLILEQSPLDLWQKRADAASKEISLEELGRVLLHINQKRGYKHSRLSNSDSKETAYVQEVNSRYDELKAEGLTVGQHFAAKLKENEQISADGKKYYNYRIKEQVYPRHAYEEEAKRILEVQSQFHTDVLTTNVCKEIFDTIFYQRDLKSCKNLVSFCEFESYTIKKNGKNITIGPKVAPRTSPLAQLSSILETANNITIRNRRNDELYISPEQRQAIANFLDNNEVMKLTDLYKILNIGRKDGWWAGKAIGKGLKGNTTKCQIRNALSKLSQEQIDKLTSFDLIFDEYVDEETGEVRKRINNSHAERQPLYRLWHLVYSIKDNDELSGALRGLGIEDEECIHNLCNLDFRTAGYANKSAKAIGRILPYLMEGMMYSEACKRAGFDHSRRVNPERELLTSLPQIQKNELRQPIVEKILNQLVNVVNALLEKEGTIDEIRVELARELKQSKDERNETYRRNNQNEKKNKEYAERIKKYELTPTRNRIMKMKMLEESEYKCMYCGQPVKEKEFLQGADVEREHIIPRALLFDNSFTNQVCSCRSCNSQKGMRTAYDFIADDKGQEGLEAYIERINDLFNKKKISRSKLNRLLVSHKAYVSRKAQGKETEEDVQLWENFIDRQLRQSQYIAKKSVEILQQVCKNVYTTSGSVTDFVRHQWGYDEILHDLNFERFKKANLTTMVKQLHSGKEVEVERIKDWTKRLDNRHHAVDALAIACTTQGMIQRLNTLNASRDAMLDELNNKEQRMIDSERSMLEKWIISQPHVSYAEAKKEINKILISLRPNTRITVPGKRYITKNGKRTLVQTGIIVPRGALHAEFVYGRIMKQEADGVTLTPQYVRKYKLGIGTQGYIFNGNETYKEELKKDKKTGLPQIVVTDKIKDVLDKIVDSGIRKRILERLNRGFEDGTDYRTNTAKALENLKNLDEDPIYSDDAKTRPIRTVRKYVNSSTMVAVRKDGNGKPVSFVEPDGNHHVAFYKDKDGVITESIVTKWQAVQRKLKHRPVIVDNPTQTWNDLVGRNDVPEELLQSLPKDNSEFMLSLQKGEAVILGLEEAAYQKAIDSNDMHTLSNHLYFVQSASLSDYRFRRHVESSFDKMGMNKEDQRFLNVKSIGAFFNYNPHKVKVTILGDIIK

SEQ ID NO: 7717 - protein, 1224 aa, synthetic construct
  REGION 1..1224: note = Synthetic
MKKVLGLDLGVGSIGWCLIEKDDNNTPKRIIRMGSRIVPISSDEETGYTKGNAVSKNADRTAKRTARKCYDRYQLRRQALVNLLKRLGMEPNKKLMLEQTPMELWQKRADAASKEISLEELGRVLLHINQKRGYKHSRLSNSDSKETAYVQEVNSHYDDLKAEGLTVGQHFAAKLKENEQKSVDGKKYYNYRIKEQVYPRHAYEEEAKKILEVQSRYHSEVLTPDVCKEMMDIIFYQRDLKSCKNLVSFCEFESYTITRDGKKITIGPKVAPRTSPLAQLSSILETANNITIRNKRNDELYISPEQKKAIADFLDNHEVMKLTDLYKILNIGRKNGWWAGKAIGKGLKGNTTKCQIREALSTLPKEQVDSITAFQLEFDEYVDEGTGEVRKRINNTLAEQQPLYKLWHMLYSIKDNTELSGALQHLGIKDKESIEKLCKLDFRTAGYASKSAKAIGRILPYLMEGVMYSEACERAGLDHSRRIDPNRSLLTHLPQIQKNELRQPVVEKILNQLVNIVNALLEKEGTIDEIRVELARELKQSKDERNEAFKRNNQNERKNREYAERIKEYGLTPTRNRIMKMKMWEESEYTCMYCGQPVNVTEFLKGADVEREHIIPRGLLFDNSFTNQVCSCRRCNSKKGMRTAYDFIADDKGLEGLNVYIDRINDLFDKKKISRSKLNRLLVSHKAYISRKAHGKETEEDKELWENFIDRQLRQSQYIAKKSVEMLQQVCKNVYTTSGSVTDFVRHQWGYDELLHDLNFERFKKAGLTAMVKQLHSGEEVEVERIANWTKRLDNRHHAVDALAIACTTQSMIQRLNTLNASRDDMLEELNSKDQRLVDPERSMLEKWVFIQPHISYADAKSEIDKIIISQRPNTRVTVPGKRYVTKNGKRTLAQTGIIVPRGALHAEFVYGRIMKQEADGVTMTPQYVRKYKLGIGAQGFLFNGKEFYKEELKKDSKTGLSKIVVTDKIKDVLEKIVDGGIRQRILERLNRGFEEGTDYRANVAQALANLKNLDEDPIYSDDAKTRPIRTVRKYVSSSTMVAARKDDKGKPVAFVEPDGNHHVAFYKDENGVIIETIVTKWQAVQRKLHHIPIIIDNPSQTWNEVLGRNDVPDELLQSLPKDSSTFLLSLQIGEAFIMGMEEIDYQRALEEKDVQSLSEHLYFVQNISSNNYRLRRHVESSFDTTDMNKEDQRFLNIKSIGSFFNSNPHKVKITILGDIIADV

SEQ ID NO: 7718 - protein, 1028 aa, synthetic construct
  REGION 1..1028: note = Synthetic
MSKNLLTEKSIITIESRNRFILDIILTPDVCKEMMDIIFYQRDLKSCKNLVSFCEFESYAITKDGKQITIGPKVAPRTSPLAQLSSILETANNITIRNKRNDELYISPEQRKAIADFLDNHDIMKLTDLYKILNIGRKDGWWAGKAIGKGLKGNITKCQIREALSALPKEQVDSLIAFQLEFDEYVDEETGEVRKRINNTLAEQQPLYKLWHMLYSIKDNTELSGALHHLGIEDNESIEKLCKLDFRTAGYASKSAKAIGRILPYLMEGVMYSEACERAGLDHSRRIDPNRPLLKHLPQIQKNELRQPVVEKILNQLVNIVNALLEKEGAIDEIRVELARELKQSKDERNETFKRNNQNEKQNKEYAERIKKYGLTPTRNRIMKLKMWEESEHACMYCEQPVDPIEFLKGADVEREHIIPRGLLFDNSFTNQVCSCRRCNSKKGMRTAYDFIADDKGQEGLNAYIEHINDLFDKKKISRSKLNRLLVSHKAYISRKAQGKETEEDKELWENFIDRQLRLSQYIAKKSVEMLQQVCKNVFATSGSVTDFVRHQWGYDELLHDLNFERFKKAGLTEMVKQLHSGEEVEVERIANWTKRLDNRHHAVDALAIACTTQSMIQRLNTLNASRDDMLEELNSKDQRLVDTERSMLEKWVFIQPHITYADAKKEIDKIVISQRPNTRITVPGKRYVAKNGKRTLAQTGIIVPRGALHAEFVYGRIMKQETDGVTMTPQYVRKYKLGIGAQGFLFNGKEFYKEELKKDSKTGLSKIVVTDKIKDVLEKIVDGGIRQRILKRLNRGFEEGTDYRANVAQALANLKNLDKDPIYSDDAKTRPIRTVRKYVSSSTMVAVRKDDNGKPVAFVEPDGNHHVAFYKDENGVITETIVTKWQAVQRKLHHIPIIIDNPSQTWSEVLGRKDVPEELLQSLPKDSSTFLLSLQIGEAFIMGMEDADYGRALEGKDVQSLAEHLYFVQNISSNNYRLRRHVESSFDTTDMNKEDQRFLNIKSIGSFFNSNPHKVKITILGDIIADV

SEQ ID NO: 7719 - protein, 1044 aa, synthetic construct
  REGION 1..1044: note = Synthetic
MKRVFGFDLGIASIGWAVVDFLKENEELVDVETGEVFEGKIEASGVRIFSEAENPKNGASLALPRRLKRLSRRITRRKARRKESLKNLFIKWEWAKSIEEIEDICKQQKGGDVWALRVKGLTEKLSKEELMRVILHMAKHRGYQSYRKAEEEKDSESGKILKAIKQNKESLGDSSYQTLAQMFYEKKKTPDENGRFFIRNYEIIDEKGKKKPVYKNSIPRTEIKSEFEKIFEKQKEFNLLTEEKYRILAGSGKSDTDPEEQGIMFRYRDISSVEKMIGKCPFEKGEFRAAKQAPSSEFFVAWNKLNNTKIFEQGKERELTKDEKNSILTLLKAVQKVTYKSIKKKVLKNEETTFKGLYYSTKTGAKNPEEGVFCKMEGWHQLRKALGEKRFEELVEKDITLLDKAVFVIAAQKNDKAIEEGLTEVGFEQTDIDILKKCSFKKFLHLSFKAIYNLLPHLSSGLFYSDACEKCGYHEILKLVDKKSEKLPALPPESLPKNPVVCRTIAQFRKLYNAMVREYGVPDQINIEFARDLKRTYEERMEIKKKNDENAQKNEALEEELKAFNMELTGKNFLKLKLYKEQGGKCIYSGKPIDISRLDEMGYCEIDHAIPYSRSYDDSYNNKVLCLTKENREKTNQTPFEYLSSKGIWEEFKGRILASHSINRRKKEKILIEEFKDKEQGFKLRNANDNSYISKFMKKYLEDSLDFSKSEHTEIKNKIQVRSGSLTACLRHQWGLKKDRKAGDKHHAQDAIVIACATQGMVQYLSRMSSIIENKYALQKEKGRAWWEGLKHKIGEPWSGFRNEVEKTLEGIFVSQSPSKKATGPFHDETIRSLNENHKNYSAKDVKSGIKVRGGLANNGSILRTDVFVKKNKKGKNQFYLVPIYLSDMGKDLPNKAIVASKSEDEWVEMDETYTFMYSFYAHDLISVKKKEKKKKENNSEEEREGNKEELKEREKETEIIEILGYFKGTDRSTASITIENHDRTEEYRSIGVRNLEEIKKYQVDALGNYYPVRFEKRISLKQIKTQKQRKKDRYVSDFYHQHS

SEQ ID NO: 7720 - protein, 1080 aa, synthetic construct
  REGION 1..1080: note = Synthetic
MSTSRTTQTVLGLDIGVASVGWCLLEYRNEVPSRILGTGSRIFSPGVDGDFKNGRDEPKNQKRRQARQMRRQLWRRRRRLLKLLRALVRLGLLPDPGAFDPASIDRMLKELDARLGAQDPLMGDRRGAQVFHYRLRARAAQTVVPAHELGRALYHLAQHRGFLSNRLAKKKDGEEDGVVAEGIHELQAKMNASGLLTLGAYFASIDPEVERIRARWLGRNEFIIPEFKAIQRAQSRHQSSLSEADWQLIEDAIFRQRPLRDQSHLIGRCSIEPAEIRCPVAYPAAQRFRVLQNVNHLRVMEMDGEIERVNRALTSTERDALIKALELESHLTWTQAKKLLGFKPKGVKFSIELGGEKDLIGNRTAATMRVAIGACWDDMSEEDQARLIDDVLEYESQEALETRCVRRWGLSKDDAKNVAAIKLEAARLNLSARAIRNLLPHLEAGLFVAEAKVLAYPSQSGVDAPWEFLPPIKPDRVWQEHSSGGRPYRGIEIRNPAVERSLSELRKIINAVIRRWGKPDQVRIELARDLKKPRKERVDETKRMREQEGRRDSALDRMVKEGFSHIADSNKRSDVEKVLLWEECGGVCPYTGKSINFEDLFGQSPRFEVEHIIPYALCLEDGFGNKTLCEVNENRNRKRRNSPYGAYHGTPQWDSIISRAKLFRSPSARKKLRLFESVANGSEIFGDFLKRQLNDTRYASRLAMDYVGLLFGGGIDLTKRQRVFVSAGGATAIVRRKLGIEGVLGGGGKNRSDHRHHAIDAIAIALTGPAEVKAIADASEAAVVRGEASHRLKLDVPWPNFIDDVKRSIAGIVVSHRADCRLSGPLHQEKNYSRPIRDARGDVRRGVGKTSALRHRRYLLVELGEGDVKYIVDPRVREAVQQKLAELKQPNPKVAFKDKVNLPSMRHGDGRDVLIQKARIQVNVTLDEVGRGGAARHVVPGSNHHMEVIETLDAEGKVIGCELEVVTLLEAFRRKQRGAPIVQTDWGTGRRLAFTLRSGDSVSLKDREGVRCIALVTAVSDGDLHLKRVSDARPRGEARAESKAGRDTGLLRVSSAKAFFAAGVEKLVVHALGDVRRSND

SEQ ID NO: 7721 - protein, 1072 aa, synthetic construct
  REGION 1..1072: note = Synthetic
MNMSTSKEARTILGLDIGVASLGWCLLACEGKQPVRILGTGSRIFSPGVDGDFANGRDEPKNQARRDARQSRRQLWRRQRRMLKLFRALVRAELLPDPGAYGPDDIDQSLKTLDAQLTARDELMKDRRGAQVFHFRLRARAATECVAAHELGRALYHLAQHRGYLSNRKAAKKDGEADGEVATSISELKERVLASGLPTLGAYFASIDPEEERIRKRWLGRNEFIVPEFNMIATEQRKHHPQVTEDQWKEISDAIFRQRPLRDQSHLIGKCSLEPAERRCPVAYPEAQRFRILQAVNHLRVLEMDGEIQREARALSTQERSILLEALSRESHLTWTKARKLLSLKPALAKFSIELGGQKDLIGSRTEATMRVALGARWDEWDTKAKVRVIDDILEYETAEMLATRCMRAWMLTKEEANEVAQLTLESARLDHSLKAIRRMLPHLEAGLSYAEAKIAAYPRRAGAEAPWDLLPPIRPDHVWQEHCSGGREYRGIEIRNPAVERSLSEVRKVVNAIIRRWGKPDVVRIELARDLKKPRKERKDETTRMREQEDRRGRALGRMVKEGFSSVADRNHRSDVEKVLLWEECNGICPYTGKSISFEDLFGSQPRFEVEHIIPYSLCLEDGFGNKTLCEVNENRNIKRRFSPFDSYHGTTKWDGIAARVKLFKSRSAAKKLKLFLSESNGQDVFGDFVERQLNDTRYASRLAADYVGLLFGGRIDVAHTQRVNVSAGGATAIVRRKLGIEGVLGGGEKNRKDHRHHAVDAIAIALTGPREVQAIARASEAAIVRGEPSHRLKLDPPWVDFANDVQRSIDGIVVSHRCDRRLSGPMHQETNYSRPIRNIRREVSDQEVRHIRCGIAELTVKDVDAIVDPRVRDAVKRQLRALDEADPKKAFKGDENLPSMRHGDGRDVAIRKVRIKVRKKLDVVGSGNAKRYVAPGSNHHMAVVEVLGPSGKVVARELAVVTLLEAVRRKQRREPIVQTEWGPNRRLAFTLRSGDVVEMMFDSQCELCVVGGISKGSTEMKLHMDARPTSELKKGGKAGGRLKFAPNQLLRALRRKVDVRPLGTTCCAND

SEQ ID NO: 7722 - protein, 1108 aa, synthetic construct
  REGION 1..1108: note = Synthetic
MVETKRYRLGIDVGINSLGICAVELDDGDHPERLLNCQVVVHDGGLDPTAQKISGTRLAVSGVARRARHLVKQRRRRLEELDKFIVSQGWPLTDLSDSDDPFLPWRVRAELADGRVPTEELGEKLSIALRHIARHRGWRNSFTRVESLLSVDEPSKFFEDFRSHAEDVLNYDLSNDDLTTAQIVMLVGLVDVKGGRRLRANGEKEGLLRGKLHQSDNAREIRKIFETQGLDQDLAVQAINKVFMAKRPGAKAAEKAGRDPLPGQDAPRALRASLVFEEYRVAAALGNVRVVGLGEKRRLTPEEMKKAFKFLTSRVDNDVMWADVAEYLGLPSASLRGAAADLDGERLSAKPPVMVTESRVLAAKIKPLSRWWETADTDDRDNLVKVLTHGEELDESLGGLLAELDENDLAKLDQINLSPGRAAYGEDSLRRLTARMLNDGCDLYAARKTEFGVENDWQPKAPPIGEPIGNPSTDRVLKETARVINALRSVYGDPLSVNIEHVREGFASTQMAKQRDAENQKRYKRNREILEQIMKEEQLSSPPRREDVQRYLAYQRQGGVCVYCGEPITFRTAEMDHIVPRAGVGSTNTRNNLVAVCRRCNQSKGKMNFARWADECGIPGVSLAEAVARVEMWEGDSSDGSASTKRFKRDVISRLKRTDEDPEIDGRSMESVAWMARELRRRVDQEIKGATVNVYRGELTAEARKASGIEKMIPYIGGGGKTRFDRRHHAVDAAVIAMMRPAVAKVLAERTELRREQRYSTGEDSSVWKQYQGSSPILYQDWKQDMNVLADLLKTAFAEDRIPIRQNLRLRMANSAAHEANPSSLENTGRKGAKAPRYRLGDALPVDVIDRAGTPALWCALTRLPDFNENKGLPEDPSRIIKVNGRVVTADELLPIGPDKAFVLVRGGYASIGDRIHHARVYRIPGKKNPVYGMVRVFAEDLRRHAKEDLFNVRLAPQSISLRMADHKVRQAVLEGSAEYLGWLVANDEIHLNMSRLKNDKVGRFMKILPMISRWRVVGFGDPRTLSLKPIQLAEEGFEKLPPDSEIVRSKDVHDIVAGHGWRVKVNVLFGNHAPIIIRRDSLGRPRLVSAAHLPVCWNSDHGTMAGS

SEQ ID NO: 7723 - protein, 1101 aa, synthetic construct
  REGION 1..1101: note = Synthetic
MEQTSLDLSQAMKKVAQPQKPYRLGVDVGVASIGAAAVTDTEILGIHVRTFEKGEINGKSGRKPLNADYRRQKGQRKRLRRKKNRLLSLRRLFRRVGMIESAAIEAFPISSTSPWQLRTEGLDRRLTNEEWAQVLYHIAKHRGFQSNRRVDMDEATKLSDAAGDSPETTTNTESDSDTKKMLAGVADNKRLLAEKGYRTIGEAVARDPKFSHRIRNKEESYSHTIGRDEINAELNCLFQAQNHYGNPHATEELSEQIIDLINWRRKTVTGDDIKRMVGRCTLEPKEYRAAIHSVSAEEFRWLSTLSRLRIVTQGESRPLTKCEWDKVVDLPWRQEAITYTSIRNAIGLRHDIRSRFNIRYETGGKKTKTDTKNETTKGQSADAVTSEVKTAEKETAFKAKGYHILRKAYKAFGYDEQWDRDRFNTELLDTLATAVTFYKDDSEIQAHLETNDTPEYAIQIALRLPTLTKFSKLSNKAILKILPHMRERQSYSNACLLAGYKNHHKQYDDTPQNGKIPRSAIEHIKNTVVYRSLNQARRVINAMVKEYGAPQEVHIELARDMEKSAKKKDEIDLWMKKRKKKNDELRERFGKNLSRDELLKYKLYEEQNGQCAYSLQPIQLGRLLEPNYVEVDHALPRSRSMDNSYNNKVLVLTKQNRDKGDRTPFEYFGEDQESVDWKRFTNWVESNPQMPQAKRRKLLTKSLQKGILDNFSARNLSDTRYIARELKTLIEHYILNTPEREKTKYERCVVISGKLTAQMRQLWGISKARDVSDRHHGSDAAVIACITPSMVRRITRYLQLQERRAMPSAPGKGDEHPAVVARAIPHAPVPWPTFEHDLEAALEKVLVSRPQSRKWSGPIHADTIYGEHKDQETNTVAPTQRIKLTQLTKSNYKNIVGYDEERNKDFIDQIEERLECHNFNGKQAFGTSQSPIYRIKKNGELGPEVKKVTIKLPIKNSVFRIRRGYVKNAKNSTIYINIYQNTKTGKFEMHPVYAKDLTSSANASKSFEYSPDLQLVDTIRRGDYIEITRRNGEVISGYYATHNISTSVLELQPHDTTDSRNNRTPAIKTSLNIERFHIDILGRKRRVVRRAKNGLADDRDK

SEQ ID NO: 7724 - protein, 1365 aa, synthetic construct
  REGION 1..1365: note = Synthetic
  REGION 974..1170: note = misc_feature - Xaa can be any naturally occurring amino acid
MILYMEGNISYAIGIDVGLNSVGLAAIRLDDNGEPIRILKVISVIHDAGIDPNGAKESDTRKAISGVARRVRRLYRQRRRRLQKLDFLLQSLGWPVVENKDLEFSNSFIPWIFRAKLADEYIEDEEQRKQMLSVAIRHIARHRGWRNPYQSIKSMMQETEYSEFYNELLKNIEKFAPGVGCEGSTPAQLVRDYLLSQQGKPSRRLRITTDDKKKNHPNSLDPVLPRKLMQSDSMLEILNIFNVQHIDDKYVREQIINAVFYEKSPRGSAENRVGKDAITGKGKRALKASLAFQKYRIISTISNLSIRENSKERCLTIEEKQNVYKLLTTSTDESSKKKSAEVPLYTWIDVADCLGIERYKLRGVGSQIGDGESVGNRPPMLNSELAIIYANNKSLRQSLLTWWLDANRTQEDKEALIEILSNTVDIEAIHDNPEYQDKYGSAIAFIDSMDETEIAALENISLPNGRAAYSLETLDKLNKQMLETDDDLFKARKKLFNLPNNWRPSEAPIAEPTGNPSVDRVLKIVHRFLISAKNRWGNPVRINIEHVRSGFQSKKMANSYKELLDKRTKGKENLKAMMRNSLHLGMSDSISDADIRRYEAVQRQNGQCLYCGYEITYHTCELDHIVPRKGPGSTNTRENLVATCLSCNAQKCNTPFATWCEQSTYCKNHDISVDSAINRVRAFIFPPKSYDKRGANQFKKEVISRLKQKVGDEAFDNRSIESVAWMANELHRRIDWYYNSQNYQTNNGISDISNKAQTNVGVYAGLLTAIARRMSGIDGKLEFFDGRRKTRFDRRHHAVDASVIAMMTPGMARILAIKCNLRETQLLQGNKVVPGGIDWREYPTANDQGYQQYANWSVRMNALLKLLNEEMRADRIAVVNSIRLRYSNSSVHKDDVHALLKLHVGDEIDSETIRRASTPALYCALTRNPDYDVNNGLPENPDRTILLHNKKLNAYDSITFFKAQAAQLFVREGXXXXXXXXXXXXXXXXXXXXXXXXXXXXXXXXXXXXXXXXXXXXXXXXXXXXXXXXXXXXXXXXXXXXXXXXXXXXXXXXXXXXXXXXXXXXXXXXXXXXXXXXXXXXXXXXXXXXXXXXXXXXXXXXXXXXXXXXXXXXXXXXXXXXXXXXXXXXXXXXXXXXXXXXXXXXXXXXXXXXXXXXXXXXXXXXXXXXXGKIKKSYGMIRVFQNDLHKHIHEDLFSCDLPEQSISMRYADTEVTHAVQTGNANYLGYLVPGDEIIVDFSHAKLSGYIGDFVEFLNKIGADCTAYKHWVVVGTDDKTTLILKPSMISSEGIDKLYSNCKRNNFDYTSYEESINKILAGKGWRVSVNVLAKYNVATIRRNALGEVRWVSRSHLPISWRWDTGENRE

SEQ ID NO: 7725 - protein, 1190 aa, synthetic construct
  REGION 1..1190: note = Synthetic
MILYMEGNISYAIGIDVGLNSVGLAAIRLDNNGEPIRILKAMSVIHDAGIDPNGAKESDTRKAISGVARRVRRLYRQRRRRLQKLDFLLHSLGFPVVENKDLDFSDSFTPWIFRAKLADEYIADEKQRKQMLSVAIRHIARHRGWRNPYQSIKSMTQETEYSEFYNELLKNIEKFAPGVSCEGSTPAQLVRDYLLSQQGKASRRLRITTDDRRKNHPNSLDPVLPRKLMQSDNMLEILNIFNVQHIDNKYVREQIINAVFYAKSPRGSAENRVGKDAITGKGKRALKASLAFQKYRIISTISNLRIRENSKERCLTIEEKQSVYKLLTTSTDESSKEKSAEAPLYTWIDVADCLGIERYKLRGVGSQIEDGESVGNRPPMLNSELAILYANAKSLKQSLITWWLAANRTQEDKEAFIEILSNTVDIEAIHDNPEYQDKYGSVIAFIDSMDETEIAALENISLPDGRAAYSLETLDKLNKQMLETDDDLFEARKKLFNLPNNWRPSEAPIAEPTGNPSVDRVLKIVHRFLISAKNRWGNPERINIEHVRSGFQSKKMANSYKKLLDKRTEGKENLKAMMRNSLHLGTSDSISDADIRRYEAVQRQNGQCLYCGSEITYHTCELDHIVPRKGPGSTNTRENLVATCSSCNAQKCNTPFATWCEESTYCKNHDISVDSAINRVRAFIFPPNSYDKRGASQFKKEVIARLKQKVGDEAFDNRSIESVAWMANELHRRIDWYYNSQNYQTNNGISDITNKAQTNVGVYAGSLTAIARRMSGIDGKLEFFDGRRKTRFDRRHHAVDASVIAMMTPGIAQILAIKCNLRETQLLQGNKVVPGGIDWKEYPTANDQGYQQYANWSVRMNALLELLNEEMRADRIAVVNSIRLRYSNSSVHKDDVHALLKLHVGDEIDSETIRRASTPALYCALTRNPDYDVNNGLPENTDRTILLHDKKLNADDSITFFKSKAAQLFVREGSVEIGNSIHHLRIYEYFEKLKSGKVKKSYGMIRVFQDDLHRYIHEDLFSCDLPEQSISMRYADTKVAHAVQTGNANYLGYLVPGDEIIVDFSHVKLSGYIGEFVEFLNKIGANCAAYKHWVVAGTDDKTTLILKPSMISSEGIDKLYSNCERNNFDYASYEKSIDKILVDKGWRVSVNVLDQYKAATIRRNALGEPRWASRSHLPISWSWDTGENRE

SEQ ID NO: 7726 - protein, 1190 aa, synthetic construct
  REGION 1..1190: note = Synthetic
MILYMEGNISYAIGIDVGLNSVGLAAIRLYDNGEPIRILKAISVIHDAGIDPNGAKESDTRKAISGVARRVRRLYRQRRRRLQKLDFLLQSLGWPVVENKDLEFFNSFIPWIFRAKLADEYIEDEEQRKQMLSVAIRHIARHRGWRNPYQSIKSMMQETEYSEFYNELLKNIEKFAPGVGCEGSTPAQLVRDYLLSQQGKPSRRLRITTDDKKKNHPNSLDPVLPRKLMQSDSMLEILNIFNVQHIDDKYVREQIINAVFYEKSPRGSAENRVGKDAITGKGKRALKASLAFQKYRIISTISNLRIRENSKERCLTIEEKQNVYKLLTTSTDESSKKKSAEVPLYTWIDVADCLGIERYKLRGVGSQIGDGESVGNRPPMLNSELAIIYANNKSLRQSLLTWWLDANRTQEDKEALIEILSNTVDIEAIHDNPEYQDKYGSAIAFIDSMDETEIAALENISLPNGRAAYSLEILDKLNKQMLETDDDLFKARKKLFNLPNNWRPSEAPIAEPTGNPSVDRVLKIVHRFLISAKNRWGNPVRINIEHVRSGFQSKKMANSYKELLDKRTKGKENLKAMMRNSLHLGMSDSISDADIRRYEAVQRQNGQCLYCGYEITYHTCELDHIVPRKGPGSTNTRENLVATCLSCNAQKCNTPFATWCEQSTYCKNHDISVDSAINRVRAFIFPPKSYDKRGANQFKKEVISRLKQKVGDEAFDNRSIESVAWMANELHRRIDWYYNSQNYQTNNGISDISNKAQTNVGVYAGSLTAIARRMSGIDGKLEFFDGRRKTRFDRRHHAVDASVIAMMTPGMARILAIKCNLRETQLLQGNKVVPGGIDWREYPTANDQGYQQYANWSVRMNALLKLLNEEMRADRIAVVNSIRLRYSNSSVHKDDVHALLKLHVGDEIDSETIRRASTPALYCALTRNPDYDVNNGLPENPDRTILLHNKKLNAYDSITFFKAQAAQLFVREGSVEIGNSIHHLRIYEYFEKLKSGKIKKSYGMIRVFQNDLHKHIHEDLFSCDLPEQSISMRYADTEVTHAVQTGNANYLGYLVPGDEIIVDFSHAKLSGYIGDFVEFLNKIGADCTAYKHWVVVGTDDKTTLILKPSMISSEGIDKLYSNCKRNNFDYTSYEESINKILAGKGWRVSVNVLAKYNVATIRRNALGEVRWVSRSHLPISWRWDTGENRE

SEQ ID NO: 7727 - protein, 1171 aa, synthetic construct
  REGION 1..1171: note = Synthetic
MKNVTYAIGIDVGLNSTGLAAIQLDDNGCPIRILKALSFIHDSGIDPTGRKTSDTRKKVSGVARRARRLNRTRRKRLSKLDSLLESLGYPIVDNSCLESKDSFEPWYIRGELADAYISDDKKRKIMLSVAIRHIARHRGWRNPYQSVRSMMQAKEYSKFYDQFIDTVNRLAPGVANYGCTIGQIVCDYIMSKKGMPSPRIRVRIKKDNKIYNPILPGKFIQSDCMLELRKIFEMQSVDDTDATKLLNCVFESKSPKGSATKLVGKDAITNIGRRASKASLAFQRYRIISSISNLRIRENSIERKLTCEEKQQVYKLLTTTFISTTEKEAFISNEYSWNDVSELLHIKRSDLRGIGKQTGDGESITLQPPRLDSEIAIFSETGNSSRDKFVKEKLKPWWNEHTDDSDEHEAFIDLISNSCDFESKSDTAASAFIEDLADNEFEILDNISLPSGRAAYSIDTLNKLSQQMLNTDDDLFEARKHLFNLNDNWRPSAEPISSPIGNPSVDRVLKIVNRFIVNATNRWGSPMRVSIEHVRSGFKSAKMSKDYTDNINGRTKFRNNLRMELSKELGINALTISDADIRRYEAVQRQNGQCLYCGNPITFKTCEMDHIVPRKGVGSTNTRVNLAAVCVLCNRNKSNIPFAIWCKSQYCVEHNITVNNANKRVKHFIFPSKLYGNKASKLKFEKSVIARLSQTEEDEPFDNRSIESVAWMANELHHRIDWYYNSEYYIGNTYATDAVISNTDSNLGTSVGVYAGSITAMSRKLSGIDGKLQFFDAKHKTRFDRRHHAVDAAVIAMITSNVSQALYIKNNLRETQRILGHPDYGDLDWRDYPSEHDAMYSSYESWHRNMQKLLELLNESMTENRIPVVRQVRMRYENSAVHDDSINKLQSLHVSDAISSDDILRASTPALYCALVNQPDYTLKDGIPSSQSRVLRVNNKTLTANDEITFFNGKSAQIAVRGGSADIGNSIHHARLYRYRKSKKEIAYGIIRIFQADLNKFRDEDLFTCELPYYSVSMRYADGTLLKAIRDNKAEYIGYLLVGDELVIDPSFIKSDTVAGKFIQFLKELGIDSVAYSHWVIDGIPEPTKIKLRPSMLSKEGFDKLITSGYVSDGNYLEDAAKVLGEKGWIVAVNSLASCKPVTIRRNGFGEIRWKSLSGMPVSWKWCNDSK

SEQ ID NO: 7728 - protein, 1120 aa, synthetic construct
  REGION 1..1120: note = Synthetic
MEGNISYAIGIDVGLNSVGLAAIRLDDNGEPIRILKVISVIHDAGIDPNGAKESDTRKAISGVARRVRRLYRQRRRRLQKLDFLLQSLGWPVVENKDLEFSNSFIPWIFRAKLADEYIEDEEQRKQMLSVAIRHIARHRGWRNPYQSIKSMMQETEYSEFYNELLKNIEKFAPGVGCEGSTPAQLVRDYLLSQQGKPSRRLRITTDDKKKNHPNSLDPVLPRKLMQSDSMLEILNIFNVQHIDDKYVREQIINAVFYEKSPRGSAENRVGKDAITGKGKRALKASLAFQKYRIISTISNLSIRENSKERCLTIEEKQNVYKLLTTSTDESSKKKSAEVPLYTWIDVADCLGIERYKLRGVGSQIGDGESVGNRPPMLNSELAIIYANNKSLRQSLLTWWLDANRTQEDKEALIEILSNTVDIEAIHDNPEYQDKYGSAIAFIDSMDETEIAALENISLPNGRAAYSLETLDKLNKQMLETDDDLFKARKKLFNLPNNWRPSEAPIAEPTGNPSVDRVLKIVHRFLISAKNRWGNPVRINIEHVRSGFQSKKMANSYKELLDKRTKGKENLKAMMRNSLHLGMSDSISDADIRRYEAVQRQNGQCLYCGYEITYHTCELDHIVPRKGPGSTNTRENLVATCLSCNAQKCNTPFATWCEQSTYCKNHDISVDSAINRVRAFIFPPKSYDKRGANQFKKEVISRLKQKVGDEAFDNRSIESVAWMANELHRRIDWYYNSQNYQTNNGISDISNKAQTNVGVYAGLLTAIARRMSGIDGKLEFFDGRRKTRFDRRHHAVDASVIAMMTPGMARILAIKCNLRETQLLQGNKVVPGGIDWREYPTANDQGYQQYANWSVRMNALLKLLNEEMRADRIAVVNSIRLRYSNSSVHKDDVHALLKLHVGDEIDSETIRRASTPALYCALTRNPDYDVNNGLPENPDRTILLHNKKLNAYDSITFFKAQAAQLFVREGSVEIGNSIHHLRIYEYFEKLKSGKIKKSYGMIRVFQNDLHKHIHEDLFSCDLPEQSISMRYADTEVTHAVQTGNANYLGYLVPGDEIIVDFSHAKLSGYIGDFVEFLNKIGADCTAYKHWVVVGTDDKTTLILKPSMISSEGIDKLYSNCK

SEQ ID NO: 7729 - protein, 1062 aa, synthetic construct
  REGION 905..1056: note = misc_feature - Xaa can be any naturally occurring amino acid
  REGION 1..1062: note = Synthetic
MILYMEGNISYAIGIDVGLNSVGLAAIRLDDNGEPIRILKVISVIHDAGIDPNGAKESDTRKAISGVARRVRRLYRQRRRRLQKLDFLLQSLGWPVVENKDLEFSNSFIPWIFRAKLADEYIEDEEQRKQMLSVAIRHIARHRGWRNPYQSIKSMMQETEYSEFYNELLKNIEKFAPGVGCEGSTPAQLVRDYLLSQQGKPSRRLRITTDDKKKNHPNSLDPVLPRKLMQSDSMLEILNIFNVQHIDDKYVREQIINAVFYEKSPRGSAENRVGKDAITGKGKRALKASLAFQKYRIISTISNLSIRENSKERCLTIEEKQNVYKLLTTSTDESSKKKSAEVPLYTWIDVADCLGIERYKLRGVGSQIGDGESVGNRPPMLNSELAIIYANNKSLRQSLLTWWLDANRTQEDKEALIEILSNTVDIEAIHDNPEYQDKYGSAIAFIDSMDETEIAALENISLPNGRAAYSLEILDKLNKQMLETDDDLFKARKKLFNLPNNWRPSEAPIAEPTGNPSVDRVLKIVHRFLISAKNRWGNPVRINIEHVRSGFQSKKMANSYKELLDKRTKGKENLKAMMRNSLHLGMSDSISDADIRRYEAVQRQNGQCLYCGYEITYHTCELDHIVPRKGPGSTNTRENLVATCLSCNAQKCNTPFATWCEQSTYCKNHDISVDSAINRVRAFIFPPKSYDKRGANQFKKEVISRLKQKVGDEAFDNRSIESVAWMANELHRRIDWYYNSQNYQTNNGISDISNKAQTNVGVYAGSLTAIARRMSGIDGKLEFFDGRRKTRFDRRHHAVDASVIAMMTPGMARILAIKCNLRETQLLQGNKVVPGGIDWREYPTANDQGYQQYANWSVRMNALLKLLNEEMRADRIAVVNSIRLRYSNSSVHKDDVHALLKLHVXXXXXXXXXXXXXXXXXXXXXXXXXXXXXXXXXXXXXXXXXXXXXXXXXXXXXXXXXXXXXXXXXXXXXXXXXXXXXXXXXXXXXXXXXXXXXXXXXXXXXXXXXXXXXXXXXXXXXXXXXXXXXXXXXXXXXXXXXXXXXXXXXXXXXXXXGILIMM

SEQ ID NO: 7730 - protein, 962 aa, synthetic construct
  REGION 1..962: note = Synthetic
MQSDSMLEILNIFNVQHIDDKYVREQIINAVFYEKSPRGSAENRVGKDAITGKGKRALKASLAFQKYRIISTISNLSIRENSKERCLTIEEKQNVYKLLTTSTDESSKKKSAEVPLYTWIDVADCLGIERYKLRGVGSQIGDGESVGNRPPMLNSELAIIYANNKSLRQSLLTWWLDANRTQEDKEALIEILSNTVDIEAIHDNPEYQDKYGSAIAFIDSMDETEIAALENISLPNGRAAYSLETLDKLNKQMLETDDDLFKARKKLFNLPNNWRPSEAPIAEPTGNPSVDRVLKIVHRFLISAKNRWGNPVRINIEHVRSGFQSKKMANSYKELLDKRTKGKENLKAMMRNSLHLGMSDSISDADIRRYEAVQRQNGQCLYCGYEITYHTCELDHIVPRKGPGSTNTRENLVATCLSCNAQKCNTPFATWCEQSTYCKNHDISVDSAINRVRAFIFPPKSYDKRGANQFKKEVISRLKQKVGDEAFDNRSIESVAWMANELHRRIDWYYNSQNYQTNNGISDISNKAQTNVGVYAGSLTAIARRMSGIDGKLEFFDGRRKTRFDRRHHAVDASVIAMMTPGMARILAIKCNLRETQLLQGNKVVPGGIDWREYPTANDQGYQQYANWSVRMNALLKLLNEEMRADRIAVVNSIRLRYSNSSVHKDDVHALLKLHVGDEIDSETIRRASTPALYCALTRNPDYDVNNGLPENPDRTILLHNKKLNAYDSITFFKAQAAQLFVREGSVEIGNSIHHLRIYEYFEKLKSGKIKKSYGMIRVFQNDLHKHIHEDLFSCDLPEQSISMRYADTEVTHAVQTGNANYLGYLVPGDEIIVDFSHAKLSGYIGDFVEFLNKIGADCTAYKHWVVVGTDDKTTLILKPSMISSEGIDKLYSNCKRNNFDYTSYEESINKILAGKGWRVSVNVLAKYNVATIRRNALGEVRWVSRSHLPISWRWDTGENRE

SEQ ID NO: 7731 - protein, 645 aa, synthetic construct
  REGION 1..645: note = Synthetic
MFVLDSNLKKMANSYKELLDKRTKGKENLKAMMRNSLHLGMSDSISDADIRRYEAVQRQNGQCLYCGYEITYHTCELDHIVPRKGPGSTNTRENLVATCLSCNAQKCNTPFATWCEQSTYCKNHDISVDSAINRVRAFIFPPKSYDKRGANQFKKEVISRLKQKVGDEAFDNRSIESVAWMANELHRRIDWYYNSQNYQTNNGISDISNKAQTNVGVYAGLLTAIARRMSGIDGKLEFFDGRRKTRFDRRHHAVDASVIAMMTPGMARILAIKCNLRETQLLQGNKVVPGGIDWREYPTANDQGYQQYANWSVRMNALLKLLNEEMRADRIAVVNSIRLRYSNSSVHKDDVHALLKLHVGDEIDSETIRRASTPALYCALTRNPDYDVNNGLPENPDRTILLHNKKLNAYDSITFFKAQAAQLFVREGSVEIGNSIHHLRIYEYFEKLKSGKIKKSYGMIRVFQNDLHKHIHEDLFSCDLPEQSISMRYADTEVTHAVQTGNANYLGYLVPGDEIIVDFSHAKLSGYIGDFVEFLNKIGADCTAYKHWVVVGTDDKTTLILKPSMISSEGIDKLYSNCKRNNFDYTSYEESINKILAGKGWRVSVNVLAKYNVATIRRNALGEVRWVSRSHLPISWRWDTGENRE

SEQ ID NO: 7732 - protein, 696 aa, synthetic construct
  REGION 1..696: note = Synthetic
  SITE 691: note = misc_feature - Xaa can be any naturally occurring amino acid
MILYMEGNISYAIGIDVGLNSVGLAAIRLDDNGEPIRILKAISVIHDAGIDPNGAKESDTRKAISGVARRVRRLYRQRRRRLQKLDFLLQSLGWPVVENKDLEFSNSFIPWIFRAKLADEYIEDEEQRKQMLSVAIRHIARHRGWRNPYQSIKSMMQETEYSEFYNELLKNIEKFAPGVGCEGSTPAQLVRDYLLSQQGKPSRRLRITTDDKKKNHPNSLDPVLPRKLMQSDSMLEILNIFNVQHIDDKYVREQIINAVFYEKSPRGSAENRVGKDAITGKGKRALKASLAFQKYRIISTISNLRIRENSKERCLTIEEKQNVYKLLTTSTDESSKKKSAEVPLYTWIDVADCLGIERYKLRGVGSQIGDGESVGNRPPMLNSELAIIYANNKSLRQSLLTWWLDANRTQEDKEALIEILSNTVDIEAIHDNPEYQDKYGSAIAFIDSMDETEIAALENISLPNGRAAYSLEILDKLNKQMLETDDDLFKARKKLFNLPNNWRPSEAPIAEPTGNPSVDRVLKIVHRFLISAKNRWGNPVRINIEHVRSGFQSKKMANSYKELLDKRTKGKENLKAMMRNSLHLGMSDSISDADIRRYEAVQRQNGQCLYCGSEITYHTCELDHIVPRKGPGSTNTRENLVATCSSCNAQKCNTPFATWCEQSTYCKNHDISVDSAINRVRAFIFPPNSYXKLYLA

SEQ ID NO: 7733 - protein, 1028 aa, synthetic construct
  REGION 1..1028: note = Synthetic
VQRLKEYVLGIDIGTTSIGWAVVETHDGQPTDIVRTGVRIFEAGVDGTIEKGKDSSRAAARRTARQQRRQTFRRKCRIRRVARCLENLGLLPTGAGGDGQTRHRVLDDLDCALREVYCPVGHDISQQVWVYTLRATAGMQPLPRFHVGRALLHLAQRRGFRSGSKQMETKADDTEQGEIKEAIEKLSQELSGRTLAEVFCQRNPHQQRIRKNWTAREMYQAEFAKIWATQASSLGLTDDAKQELAKAIFYQRPLRSSKGLIGRCSLETKHRRAPAACLAAQEFRILQTVNHLRLQFADGMTAPLIPEQRDQLISALNEKSKLTTATAKKLLAIPKTVKFSIESHSEKELPGNRTATPIVEILGQRWLKWTESEQDALIDALLSFQKAHALTRHLQKRWGLSVSEAEQLAEIRLETGYCRHSRQALAALLPHMRQGLAYANAVEAVYGSVRRPTKPRRRLPVVSTAIPDMTNPAVHRALSELRKVVNAVLQQFGKPTRIRIELARDLKRSRVERKRLSELNDKNQKQREAALRKLVAECPGARESRDSIEKILLAEECGWECPFTGDGISMQTLFGSTPRFDVAHIYPRRYLDNSFANKTLCRSDVNRNRMYDLLPRQAFASNTEEWNLILTRVKGFKSTSAAEKLRRFQAEAVPDDFVSRQLNDTRYNSVIAAQYLSLLYGGRSDEQGQRIEAVTGGMTAVLRSVWRLHKSRDDHRHHALDAVVIACTDAGTVRLLQSAAAEADRHKTRLTEIAFPAPFSGFAARVEESLGCVAVSFRPDRRVQGAFHDQTLYGRPVSKSGKPEKTRLRKELHKLSRSEIEGEQIVDPVIRRIVQEKWASLGKPDPKRVFADPANHPVLREKSGGVRPIHKVRVWQNVKPAKIATDDRERFVQLNANDHTVIYAELSEDGSDQRWRESVVTRFEALSRVRFGDPPVLRTLQQGLVFRFSLRRNDCIELADPDGMRRLYRIMNVSKGDMQIQQLSDARSSKVLRDNKLRLRITNVDELRRRCCRKVQVSPLGDVFADNT

SEQ ID NO: 7734 - protein, 1021 aa, synthetic construct
  REGION 1..1021: note = Synthetic
METSTLLGLDLGTHSIGWTLIKTDADEMPTNIIATGARIFNQVLDDKTQAPKNQKRREARLRRRQTARRAYRREKLKRLLVKHGLLPAQLLDLHADGARLCNDIGDPYTLRVKALSHSLAPHELGRVLLHLIQRRGFKSNRKTDRGNKDTGIVKEGIAGLRSALAQSGAPTLGAHLATLDEKRRRHTAREMFTDEYEQVRTAQAAHFPAVLAPDCEVEKRIHTLLFHQRPLKLATGTLGDCQFEPHRPRACKARLEAQDFISLQVLANLRIFRRSALDFALPTPEERQAIRAKLADSAKLTWPQLRRLLQLGADERINLEEGGSLEHLPGNGTAAALAKALGKMQWAALDTTRRLSLVEDLLTIGDEAALMRRLREHWQFDEDTTEALLDAKLPGEDDYLRVSLKAVRKILPLLDAGVTKPEGCTYAEAVHQIYGANRGGTNRPVVRELPEPEDLRNPAVRKVLYELRKVIHAIIRKHGVPTKIRIEMARDLKHSKKQRAEIQAGITKNKNENDAARNIITAEFRIGNPSDTDVLRYRLWKELFEANGGFCPYTGREISKTLLFSDQIDIEHILPLSRSMDDSKANKTLCFADYNRQHKRNRTPWEACGGDPAQHAEMLLRVRKLSKAKFRRFMLGRDTAQGEIERLLAEHATRQLQDTRYIARAAADYLAALGAKIETSSGPLTAALRRRWQLDSLLNPDGRGKNREDHRHHAVDAAVIACTTRAMVQRAARVAASEQFLTANDEGRGFFSNRFAVDPPWPDFRRDLGEKIAALLVSHAPTHSVSGALHADTAYGAHPDPETGEMRYHVRHDLSDLTPAMIKRIADAEVARRVCAFFNQHGGDTNARLEEGVFPLHADGKTPIKRVRIASIFSPESLIAITAPDGNVRHYESGSNHHVEIFENLDNGKWTGRFVTAFAAAQRARRRQTVVDHTPEPGWRFIMSLSANDCIEVDTDSGHCIYRVQKMSSRGSALILRVLSTNIVSDTDNRGVLRKTPNTLRELNPRKLDVTPLGEIRRAGG

SEQ ID NO: 7735 - protein, 1036 aa, synthetic construct
  REGION 1..1036: note = Synthetic
MSKRILGLDLGVASVGWALIEESETSETSGNILGGGSRIFPSVLEAKSELPKNAARRLKRAMRRTLNRRQMRRDTLTNVLTRSGLWPESKKDRDQLIVFSPYLFRKTGLDHPLSLFELGRCFLHMNKRRGFLSNRKSKLTGFEDDARILELIQRDEQADAEATPKKAQKNATQEEKDLGAVLGEISQLKAAMQVVGARTLGEYLADLPKKRGTHTERAMYQHEFEQLWTAQQTHHPNTLSEGLKAEVYRALFFQRPLKLQKFLVGPCTLEPQRKRAAKACLEFQEFRTRQELNHLLIFNPDERAYRCLSETEREAIFQHLQTHDQITLGQIRKALSLHAGEHLNFEDKEHKIPGNRTSVKLQKILGTLWQTLGNKQFELITDLLTINDRRDLFKRLESHWKLPLETAYHLTILELESGYSPLSRKAICLLLPHLRTGLPYAQALQQAGYHAGAKPIGEAEVLAPPPRTNNPVVGKALNQTRKIVNALIATWGLPDVIRVELTRDAKQGKKARERIQKQQKVNEKLNNEAKVQLEELGILQITGEALLKYRLWAECKGVCPYTGQTITPAMLFGSEVDIEHILPYSRSLDDSYMNKTLCMSFENRQVKKGLTPFEAYGETDRFPEIRQRLLDLESMPREKKNRFFLKDKPLEDWLAQFTNRQLSDTRYISLEVKNYLQQLGCKIEVTSGSYTAALRRKWSLNNLWRGKKDDIQDAPKSRDDHRHHALDALVTALTDVGLMQRLGKASAKYGHLALDDRQLPLPAPWPDLAEQTEKWLKNIIVSHAPMRKLSGALTEETAYGKGKAWLTKGAKKAKADEPEETELVEVLVHRKSISELKDTEVPKVRDPWLRGLLAARLAEYGGNAKKAFAEPIFHKDGKTPIKKVRLANRFTEGAIFPVSKGHPEGTDYKFYIFGNNHHIEIIEDLATGKRSGGVVTAMEAAKRVRIEKKPMVQTDHGPGKRLVCWLCINDLIRDPKPGYEGIFRVQKMDNQLHVHFRLHTDATLEKNLGAGSFTPGSYRGTKLYIDPLGRIKEARE

SEQ ID NO: 7736 - protein, 1365 aa, synthetic construct
  REGION 1..1365: note = Synthetic
MGSCAIPFMHMESKNELIVGLDVGSNSVGWAVVEMNGERLEKIHGMGSRIIPMGDEKKEFEQGAKITKNNARRQKRSMRRNHQRYKLRRANLVKVLKLMDAWPDGLGEQARPDEPVMTPLQIYGLRALAAMEPVSLKEWGRVLYHMNQRRGYKDIGDLMDEQDGAAPGEAKDDGKRIERVFIESVEVDDDKGKKVKYLVRLGDGREGTCTLEIIKDMVGTEQELEVATKKNKDGERYEFRLAQKTDWRKGMESINAAIDASGLTPGQYFHQQLKDDAFYRIKERIVLRDTFKKEFDTIWTRQRNEHSALTSDVLRDNVVKALIPNNLAEQTKWLKKDLGSFIRDYVIYYQRPLKSQVGNKGQCRFETGVLAKDGKKGIPPKPVMPVSSPIFQLFRIWQQVNNIRLIDKYAREQELAANERIAVVEHLLQRPELKADDLLKVIGRKGEPMENNLRANLPGHQTLAKLRPVLKKTALLKRLEQEATALREPQNTLLFRIWHILYSVPMAQDREDALKAVKEVPAECVAELAKVRFERKHGAVSARAASRILPLMVCGDAWSAEHLQERDKRRIHEVIDKIGTGEEIDRLPNEVRVRLAAYTSLDHYQGMPYWLAASVLYGDHRAATAKPFDKPEEIKTLGRGFMRNPVVEQVVNETLMIMRDIWSTYGRPTNVRVELARELRQNQKERKRTFDNNKDRDKARKAVVETLIKEFHRPKPSRKDIERYELWLQQGMTCIYSNKPINKSQLFDSRDTDIDHIIPQKVYYDDSIQNKVLVLRQENADKGKQLGALYMKSKGPGAYEAYVDRVNKLKAGRQKKKYLLAEEVPENFINRQLQETRYIGTKVTELLQPICTVKSTLGIVTDALKNEWGLDKVFKEMLLPRFERLEGIAKRKLIEEIPLTNGNKHKDWRIEGYDKRIDHRHHALDALVVALTRQGYIQRLSNLNQIEASDAEKEAMKRPTWYPLPHPDLRNMVRTQLDRTIPSIKNRQRLLTKAANATRYLVDPVSGKTDLRRQTEGELRAVRGPLHNEQPMGEVREQRKWLLKDVLARLSETRDALEALKPTQRGDADHGDRFLAHEHERAMLHAHLARYNGSVEAMKKALKKDPLVNARNERVEQLTVLVPKYSITRKFSALFTEKMASKIIDAQLRKRVQDHMKAYGNDPKKAFTAEAMHVFNQGQRIPVTSVRCRMDDTPVGDALGRARLQHKGDPNRKQHVEKGENYALAVFVNEETGAREFEVVAFYDAVQRKLKGLDLVDPRPGYRHFLLRKNDLVYVPRPGEDARSVNWDERDAVTPRLYRVVKFSGDRHYFLPATVSAVVNLPDTENEFFSPNCIEKIKEDVPETHISDVCVSVSVLRTGGIQVHC

SEQ ID NO: 7737 - protein, 1365 aa, synthetic construct
  REGION 1..1365: note = Synthetic
MPLSCRTGSATFRWSARPELFTMMEKSNELIVGLDVGSNSVGWAVVEMNADRLERIHAMGSRIIPMGPELKEYQEGKRITKNATRRQKRSMRRNHQRYKLRRAKLVQALHLIGAWPETLGEQGSEVLPLLTSLQLYGLRAMAVDHPVALPELGRILYHMNQRRGYKDIGDLMDEQDGAAPEADKDDGKSIERVHVAKVEVDDAKGRKVKYLVTLADGREGTATIATMKEMEGSDQELEITTKETKRGTSIEFRLPVKTDWRKGMESLNQAIDASGLTPGQFFLHALKDDPFYRIRERIVLRDTYKNEFDQIWARQVKAHARLADPVLRDRVVLALIPRNEVEQKKWLNRDLGTFIRDHVIYFQRPLKSQRSSKGQCRFEPQKPVMPVSSPIHQLFRILQQVNNIRLIDRYGKEHDLSAAERNTVLKHLLEHKELKPENLLKCIGRKDEPMENNLRAALPGHQTLAALRPRLKASAIWDRLVHEASRAAGLQGTLLFRIWHILYSIPTEEHRRQTLAAIDGIPGDELDALAKVRFDRKHGAVSARAAMRLLPLMGNGDVWRWEDVPVRDQRRIQDVIDKVATGEEIDRLPNEVRVRLTAYTAPHHFQGLPYWLAASVLYGDHRSTGGKPYEKPEEIRTMPRGFLRNPVVEQVINEARMIVRDIWTTHGRPTSIRVELARELRQNQEQRKRSFDNNRKRDKERKEVLERLVHEFNRPKPSRKDIERYELWVQQEHRCIYSGNPIERTQLFDTRDTDVDHIIPRALYFDDSIQNRVLCLREENANKDKQLAALYMKAKGTGAWEAYVDRVNSLRIGRTKKKYLLAEEVPESFINRQLQETRYIGTKLTELLQPVCPVHSTLGIITDTLKNEWGLDKVFKEVLLPRFERLERITGRTLVEPVPGRNGHGDWRIEGYDKRIDHRHHALDALTVALTRQGYIQRLSTMNQLKLSDAEKEAMKRPTWYPLPHPDLRRLVKEQLDRTIPSIKNRQRLLTKAANHTRHLVDPKTGTTALRKQTKGDLRAVRGPLHNEQPLGEVREQRKWPLKDIIAHLSERPDPLGAVSPKGPGEPGYDERFLAHAHEAQWLHAHLAKYEGNVERMKKALRKDPLVNARNERVEALTVLVPKYTITRNLGPTFTEKMVEKIIDKRAQHVVREHLKAHGNDPKKAFTEEALYLLNQGLKVPVRKVRCRMDEALVGEAMGRTRFLRHGDTNRKLHVEKGENHALAVFVNEATGERAFEVVPFFDAVERRLKGLDLVDARPGHRHFLLRKNDLVYVPRPGEDARSIDWKDTEYVGERIMRMTQMSGKQFYFLAASISSPVNLGKEVTEYGSQNASEFEDRDSPRTKVSQVCLPVRLDRLGRVEALSF

SEQ ID NO: 7738 - protein, 1366 aa, synthetic construct
  REGION 1..1366: note = Synthetic
MMQKENELVVGLDVGSNSVGWAVVEMDGEKLERIHGIGSRIIPMGDEKKEFEQGAKITKNAVRRQKRSMRRNHQRYKLRRSNLIQVLKLIGAWPEGLGERIGPDAPVQTSLQLYGLRALAVEDPVSLTELGRILYHMNQRRGYKDIGDLMDEQDGAASTDEKKDDGKTIERVFIENVEVDDDKGKKTKYLVTLADGRVGTTTIAKIMEMKGSEQELEITTKKTKKGTTHEFRLALKTDWRKGMESLNQAIDESQLTPGQFFHQQLKNDPHYRIKERIVLRDTFRAEFDAIWKRQLPDHATLQRTDLRDTVVKALIPNNKKEQARWLAKDLGTFIRDYVIFYQRPLKSQVSSKGQCRFEPQKPVMPVSSPIYQLFRIWQQVNNIRLIDRYGKESELSAAERIAVVQHLLESKELKTDKLLDAIGRKKEELGNNLRANLPGHQTLDPLRARLKKSALWGKLLQEASTPKDIDKSTLFRIWHILYSIPMEEHRQMALKAIDGIPQEEVDALAKIRYDRKTGAVSARAASRITPLMTCGHTWKWENIAPRDQRRIEEVIAKVADGEAIDRLPNEVFARLRAYSTKEHFQGLPYWLAASVLYGDHRAAIAKPFDKPDQIKTLSRGFLRNPVVEQVVNESLMLMRDIWATYGRPTSVRVELARELRQNQAQRKRTFENNNQRDKDRKKVVEILGGEFSRPKPSKKDIERYELWVQQEHRCMYCGGAIQKGQLFDTRDTDVDHVIPRARFYDDSIQNRVIACRPCNADKGKQLAAAYMKSKGPGEWETYVDRVNKLKAGRTKKKYLLAEEVPESFINRQLQETRYIGTKLTELLQPICTVHSTLGIVTDALKNEWGLNEVYKEVLIPRFKRLEGILDRKLIEELHRTNGGNHVQYRIEGYDKRIDHRHHALDALTVALTRQGYIQRLSNVNQLNLTNEEKEALKRPTWYPLPHPDLRRLVRDQLERTIPSIKNRQRLLTKASNRTAYLDPSTGEVRKGDKGRKQTKGNLRAVRGPLHNEQPLGEVREQRKWPLKDVLKRLAEVMDKEGALHVLRPMDKSDPDYRIRFLAHEHERKLLHDHLAKYDGHIEKMKKALKKDPLVNAKNEHVEELTMLVPKYSTIVALASIASGQDMTKEKVLKRIEKIIDVKIKERVRKHFEAYASNPKTAFTDEALHAFNKGQSVPIHNVRCWKDKGGKDLLVGNAKGRTPMRRPHDPNRKLHVEKGENYALAVFVNEQTSERKFEVIPFFDAVERKLNGLDLVEARLGFQHFLLRKGDVVYVPRPDEDVRSINWTSTKVVGDRIMQMTKMTQRGENSGQFYFLPCPLSSPVTFDKKAQEFPTEFEDRDNPRTKISSVCIPVRVDRLGKVTPLFP

SEQ ID NO: 7739 - protein, 1426 aa, synthetic construct
  REGION 1..1426: note = Synthetic
MRILGLDIGTHSLGTFVRDTELGSNIKDQTVYFSVDSFNSGIGNGKKAEYSYAAERSDFRRKRILNERRRYRKWATLKLLIKYKMCPLTTSELEQWTTYDKSRGLYRQYPINAKNFESWIRLDFDKNGKPDYTSPYQLRRDLMSRQFDFSQEHERFKLGRAIYHIAQRRGFKSSKGETIKELEQSDTINENLAPNSNLVLELLKKSESEKSSYLVEYMNSHNLRTVGCAFARLEDERIRIRGSKYQAVRSQYKDEIKEIFAFQTGLANEQELLNHLLSEKKGEGSIFYKCPLKSQKGLVGKCTLEPNKTRCPISHPKFEEFRAWSFINNIKYRAHAHEDWKELSLCEKELIYSEIFTSKVRNDFSFLEIRKWIEKHHNLKLEHNEKNSTVNYDDNCNVSGCPITARFIKLLGTAWESYKLQGTKKRWSHSKNKHTLHTTSYDAYDIWHACYSIEEESDICSFAKIRLGWNDTDIQQLLYIWSKMKDGYAMISLKAINNINYFLRQGYIYSDAVILAKLPDIIGSAKWFAQEKEYLDLISKVYYEIKQTHTAEKTINDISNLLIANYKSLGFSTGIFAYKDYKYTLNNEDKQDILKAVKEHYGHLKWNNMCEEKRNNILRMVEEKYQSFFFDKKRAYISTPKISTLLTDALSDLLGKELDFGKLYHHSNISPYANKQNGDKLGNPNMGSIKNPVALRTLQIIRKKINALIENNIIDPEYTIVVIETAREFNNANMRWALKKHQECKEEERKNIENLLKEFYPTRTISDTDINKARFYFEQQENYIDKFATEQYEKDKDLAKKYQLWKEQACVCFYTGRIIKLTELFGETIQIEHTVPRSISYDDSMTNLTICDAHYNQAIKNNKIPTKLPNYEEDITIDGQTYKAILPQLKRWEKIVKRIKDNITTWEKRSRSAITKDRKDNCIRQIHLWKMELDYWHTKLEYFKQTEITHQFYNRQLVDTRLITAHSAIYLKSLFKKVKVQKGETTATFRKILGIQKNRDVLSHHAIDAMILTIIPTAAKRERMIKLFYQKEESYGLRKECYINDLKNEIKDCLIGNKIDNCISYINDHLLVNHISSDKTFIHAKKKIRKRGKIVLFKQSNGEAHFRVSTGNAIRASLHKESFYGAIKLPITNDNGAPIIENGQFIYSNEDPVIVKRISIQEIKEGDAEKIIIDPRIKYSICKTIQKRKESGLSYKKAIEGDFYMLDKNDNEIKVDKEGRNLCPIRHVRCRVKSGAGYLTYKTALSIRKQINISQKSFVHFNNRNYKQKVYAQNDDNYLLLLYKEETNGKSKSKVNIINYFDVAKQINNKSNKINNIKDLLNIYREIKEENTIYHLTAFIQKGTRLLKWDKSPKEIYTKNIEELSKCLYVTHAINDRIHYKHHLENGDTKAKSCRFGKMSFLIEGKDFEIDILGNIHLFQCNETNE

SEQ ID NO: 7740 - protein, 1453 aa, synthetic construct
  REGION 1..1453: note = Synthetic
MRGHRCFHNGIILIVNSLSIICYKSRDNFVNCQRFKSQTYQTSFFLECIMKHILGLDLGNSSIGWAHVTVDEKDSANNSIIDSGVRIVPLTTEEATSFPKGKAKTLNGDRTLKRGMRRNNFRYKLRRDGLIRALRDGGVIDASTPLAEDGKGTTHETLRLRARAVHGQITLGELARVLLSINKKRGYKSNRKLDGQDEGALVDGLSYSVEMKKRGITPGELALEILAAGKKHIPDCYRSDLEDEFRKIWNKQREFYPDLLTDELSERLMGRSSKATYAILSPLFRVDAQKLSLTKEEKKRRPYELRSKALRERLEPSALIEALQSLNGSLSGANNYLGNISDRSKQLYFEHLTGGEYMYRLLRDNPHASLRNVVFFRRDYLEEFNRIWNTQAAFYPEVLTDTLKKEVRDYLIFYQRKLRSQKHLISFCEFEQKQKDGRTVGLRVAPKSSPIYQETKILQNLNNLQCKLKEGNKISERMPNLFDEGEETPAVRYAPGTFDEETKAFLFEELNMRGDLTEKEVLTLLFPDHKEASAYRLNYKKVEGNRTNYALYNAYLRIIQEEGYDLGLVLNGRASSTVEMPDIKTAKLSASEVKQNLREIFGELGIRVEILDFDATLPNPKYAGQLSFRLWHLLYSYVSDESDSGNETLYKNLSRTFGFKRRHAEILASVSFSDDYGSLSTKALRKIYPYLRVGLGYSEACAEAGYNHSGFITKEENEIRVLKDTIDVLPKNSLRQPVVEKILNQMIHVVNGLMDRNSNPEKRFHFDEIHIELARELKQSAAERETASKSIAEATRLNETLAEVLKKEFGISRPTRNDIIRYKLWLELAPIGYKDIYTGEFIPRDIIFSQKVDVDHIIPQSVVFNDSFSNKVLTFKDFNIRKGAATAFDYISTLGAEKLAEYRERIEILKKEGAISEAKVRNLLKKKEDLSDGFIDRDLRASQYISRKAMELLHEVSRDVLPTSGRITDRLRRDWGLIGVLKELDMPKFRAVGQTETNRLKDGQEIEEIKDWTKRNDNRHHAMDAITIAFTRRNHVQYLNHMNAKPDSEFHPVVIATKRDWMEKDADGNRVFKKPFEGIRSQVKKSLSSLLVSYKANSKVVTPRKNKLRGKKGHIQATLTPRGQLHKETIYGLRYVPKSTPTKLSKKFTHEDALLIVSEPVRKIVLDRIDRYGGEPAKAFDPKAMKKDPVLYHDAPLLEVTLFDKVYTIRKEVTDLTAKDIPNVLDKCIREALSRRLKAFGGKEKEAFSGLEDNPIWVDREARIPVKRVTLISDIKDALPLHSATNHLGDPIYDGDEVRVKDYVQTRNNHHVALFLDEAGKVREVIVTFFDAVNRAMAKEPVIRKHLPDHPDWQFLFSLKSNEYFVFKNESTGFDPFAINLLDPANRRAVSPNLYRVQKLSSKDYVFRHHLESTLTMDISDLTFKRINMLSKMLDAVKVRLDHLGNIVAVGEY

SEQ ID NO: 7741 - protein, 1036 aa, synthetic construct
  REGION 1..1036: note = Synthetic
MTEMNASGYILGLDIGSNSVGWAVLTRDETTGQPNGLAKVGVRVFQDDVNQGFETGREEPPGQKRREARGQRRRLDRRKRRLYRLARVLQEAGLLPPDEMNSPEDRHQFFTDLDEKIARELGEAQGGPVTLPKAAMLPYLLRAQALDKKLPLHLLGRALYHLAHRRGFLSNRRSAPKKDEDPKVVRQAITDLEQKIEEAGARTLGEFFSRLDPEEERIRRNWTSRQMYLDEFEKIWSSQEPHYPDALTGELKAAVQRAIFFQHPLKSSKHLIGKCELEPDRPRAPWGLLAAQRFRLIQRVNDTRLITPEGEIRALSPEERTALIDALESVKKLTFAQAKKGIGVSPRHVFNFEEGGEKDFPGNRTAGELKSVFGDRWPAFGRQEREAMVEDLLSMESEEALARRGMNAWGLSPEQAARFAAIQLEKGYCRHSRQALQKLLPYLEEGMSYMTTVKRVYGEKPLPEAEAALPLVEEAIPELRNSVVSRALTETRKVVNNLIRVYGQPATVRIELARDLKKGRQERKKITRQIRENQQTRLAATDEIVRQVQVATPSRTDVEKYLLAVECDFTCPYTGRSFSMLDLFGPAPQVDVEHIIPFSRCLDNSFGNKTLCFIDENRNVKRNRTPFEAYGGQPDRWAEILGRVRRFQGQARRAKLYRFQMEEAVTDDFASRQLNDTRYAATLAKKYLGLLYGEEALRHVQVGRGEITWLLRNSWRLNRILGGEWKSRDDHRQHIVDAVVVALTDPAAVQALSRAASQAEKGGGRKPYANVPPPWEGFEGQVREAVLGTLVSHRVSRKVSGALHEETYYRQAGGEPVSYRARKKLEKLTAPEVEAIVDDRVRALVQEKLAALGETNPQKAFADPNNLPNLPNRGGRPMPIRKVRLAKTISAFSLGQGMRKRHVVSESNHHLEILETLNRRGQKQWEGALVPLHEAIRRFRAGEPVIRKDHGEGKRFLFTLAPGEIVELDHEGGRALFRVRSVSEGEIAYVSLSEARKKEEIKKSHQWKRGSANVLGKLNCRKVVVTPLGEVRRAHD

SEQ ID NO: 7742 - protein, 1048 aa, synthetic construct
  REGION 1..1048: note = Synthetic
VIRESNSPARSDAVVLGLDIGAKSIGWALIQGPESGKPTIVGLGVRIFEAGVDGDIESGQDSSRAAARRNARQMRRQTFRRVQRKRKLFSLLQSAGFLPGTSDTLAVARDKAIKEIDERLLATLGKTYGSAGSTARKLPYVLRAEALQRALTAEELGRAIYHFGERRGFKANRRTDRQSETTGVVYEGIAEVQRQKGDKTLGQFFADLDPTQDRIRGCYLGRADYEDEFNRIFDAQQPHHAALTPKLRRRLRRCLFWQRPLKSQKSLIGRCSLLTNRRRCPMAHPVAQEFRLLQAVNHLSLFNADGEMRLLTNVERLKLLAALRTDGDITFTQVRKLLGLKKKDSRFNLEEGGEKKLPGNRTGRAMTDAIGAEWANLSPDQQALLVGIVRGSPDAASLRGQVGQSFPTLMPLCDALDKVALEDKPAAHCKRVLVDLVNRMKDGIPYATARVDFEATHNLGMPTEPVDQLPPVRTALPAITNPAVIRAMTELRKVVNEIVRVYGKPDMVRIELARDLKKPRRIRQLLSERMRAREGERSVASQNLKSVGITNPSRADVEKILLAEECGWVCPYTGKSFGMADLVGSHAKVDVEHIFPRRYLDDSFANKTLCFAAENRAVKKDRLPFEAYSGDETRYREILDRVRTFQSGARDEKLRRFMADGVEEGFASRQLIDTAFASREAAKFVGLMYGGIVDIRSDKRVRTSTGKLSALLRGAWKLNSILGTDSSPKGRDVDHRHHAVDAIVIALSSDSIIKSVSDAAGRYAARSSGRWHVDVPDQEGLLEQAACEVKKVVVSHRVDRKLAGRLHEDSIYSPPRADGGGGSFHVIRKPLQRLTPADITGDKIVDPRVRRLVQEQYAKLCHALGKTKPSDLFTDDSRLPRLPNRNGPPVPVRKVRLRVRDKAIRIGDAEHRQRHIMRDADGLHHTVIIATRKRDRETWEEAPTSRLEVQDRKRRGEPVVRTEWGPDCGYVLHLCKGDSIELDTPDGERAVYVVRGVAGTDISVVQAWDASRENRTAETRIRSPNKLKERHPRPVVVTPAGRVFSRGG

SEQ ID NO: 7743 - protein, 1168 aa, synthetic construct
  REGION 1..1168: note = Synthetic
MKYTLGLDIGIGSVGWAVVQNEGEHWIEDFGVRLFDSSENPKDKCNKNQERRAQRAARRVTRRRSHRKMRVKQHLQRMGLLTLDELSRYFEAPHPDPLSLRVKGLDEPLSPCELAACLIHISNHRGYQDYFETDTEDMTKAEKEEAEQELAGISRVNRLMEQGGYRTAAEMFLRDAAFACPTGGEQRAYLNHPYVTDRCLVGRDLLRKEVQMLLQKQGETYPILLAPNPAVKKRAGKEPLASPMTNAEILEEILLNQRDFEDGPGTAGDPMRKYKGFLDTLGNCRYYRDEPCAFRASPLADIYSLVNVLSQYRYTNLETGELTLAPELARALLQKALEQGELKKNDVTKLAKKFDTGVNMPTAKESGKQETLGKCLKFLKPMKKLLDECGIDWLSAVGENYTAPDTLLNRISKIVCENHTPRRRLRALRAVPELNEAAIRKLAGQNFSGTAAVSEKYMKGAIAAFEGGELYGHFQSKLDNAPIMAKGGTHRLLPAFSPDAEFAKNAVVMRSLNETRKIINAVIQAYGAPYAINVEVASEVGNSFEERQNIDNRQKENEKNNQQITETVAALLGIEPTAVTGEMRLRYRLGERQGWHCLYSDKPIDKVTALNPRRQEFEVDHIVPFSLILDDTIHNKALVYTDENRRKGQTVPLMYLDAAACDRLRVRANDMLKHKQISERTYRYLTLPNLDNTELLSEWKSRNLNDTRYITKYLVRYLSETLQFAPGARSTPVFGVKGQLTSSLRRQWLNKQTWGKDEKDATRTETQLHHAVDAVVIAHITPATSMLMENKLRLNRIYHAAGKQKTSEYYQTMEKCINALEDHYHMPRRVSMEILCRKDGCTALHPALGLEVDVRFFDVDAARKEAELFAKQAKKDGEEVPPVPTRAELLERYYNQLRNFYHDEAFVARLSPPLVSYKTSTRCRGAVTSQNALLIKQTPEGAVEMKRRDVLSLKAKELDKLCTDDTDLRESLEAAFALPRKKEDDPLGEILKAQGKTEFVTQKGRTVRKVTLTGNEWRNPYYKETPESGKTALDTRNYWCVELYRNEKGELQMRGIMNADVKREGKKLVLQTPPPADYAAHVMYLFPYEYIVVTKSNGEEKYRGFYKSVFNINQNALCYIAGNAPFDGKKAMSIGKKDTVRKYAVSLLGRLGGEVACGAPLLYKPAKK

SEQ ID NO: 7744 - protein, 1118 aa, synthetic construct
  REGION 1..1118: note = Synthetic
LLAKSRPPLALLQSSLYSIRLLSTRGGVMQRIFGFDIGTTSIGWAVIDHDAARAVGCIVGMGVRIFPEARDPDGTPLNQIRRQKRLIRRQLRRRKLRRRALNELLNEAGLLPPFAKGKRVNGSYVRSSWEEVMQLPPLELRKKALAERLEPYELGRALYHLAHRRHFKGRDVESDTPVESSAEEKAAQSARATTVQILQESGKTLGEMLAERAPTRGEIPRQRTRGIHALREHVIEEFNRIIEAQRRHHPILRDPVFVDQLRNVVFSQKPIFWRTNTLGECPFVPGSPLCPKGSWLSQQRRMLEKLNNLSIVCGNLRPLDSEERAAILEKLQVQASMTWAAVRAALKPVYAKRGEPGAEQALRFNLELGGESKLTGNLVEAKLVSIFGERWKTHPHRQAIRDAIHERLWKADYVEIGTQRVVILPETERRRRRAELAKKFIHEYDISDAEAKALSELQLPAGWEPYSVEALRRFLPLLEQGVRFGALVAGPEWTEWREANFPNRKQPSGGSLDLLPSPANSGEQKRLAAIRNPTVVRVLNELRKVTNNLIRVHGKPDLIRIELAREIGLSKRERAEIREQLRRQEKRRREAEEDLKSKGILQPTRAEIEKWLLWKESQERCPYTGDHISFDALFRNGEYDVEHIWPRSRSLDDSFRNKTLCRRDVNIEKGNRTPFEFYQSRPDEWAAIVTRLRGMTAKGRSAGMPYGKVKRFLAESMPEDFANRQLTDTSYAAREAVTFLKRLGSKSGAGTSVAVQAVAGRVTAQLRRLWQLNNMLADNAEKTRSDHRHHAIDALVVACTDPGMVHRLSRYWQQKDDPRAERPHLPAPWPGIRAEVQQLKDCGEIRISHRVRKKVSGPLHDEMPYGDTGKEIMKNGTILGVFVKRMPVEKLSLETLKIDDVAQISKTAKFVVRDKAIREALRNHLAAAGGDPKKAYPPYPRVTPNGPEIRSVRVLSLQQKSLMAPVAMSWNGERERQPNGFAELGTNHHVAIYRTSSGKAEYEIVSLYEAARRLARGEPIVRRQRDGAKFVMSLAAGEAVEFLDGERKGIWIVQGVWANGQVVLTRDYDARPTSKKESERLGMSGKREEFYPKVSTLISDSVRKISVDPIGRIRVAND

SEQ ID NO: 7745 - protein, 1092 aa, synthetic construct
  REGION 1..1092: note = Synthetic
MALVFGFDIGTTSIGFAVIDHDPGQGTGKIHRLGVRIFPEARDPKALVPLNQDRRGARMRRRHLRRRRQRRQALGALLHQHGFLPRRDSCAWNRVMGSDPYLLRKWAFNLQQANSHESRSQVLAAMQAGQAKLPAWALEGERLSPHAVGRAIYHLAQRRHFKGRDSDEIAGDDGTATQNQSDGDDADEQKAKSVRERNVQALEQKNMTLGAWLADRNAHERKRGEHVTRKVVEDEFDRVWAPCLPNDRIRAKVRGAIFDQRPVFWRVNTLGACRFLPEKKGLDLCPRGSWLSQQRRMLEKLNNLQFVSPEQRCLDEEERQAILAKLQTQASMTWAGVRKALAPLYRERNQSREEKWLKFNLEQGGEKKLLGNMIEKNLADIFGEAWKDHPHRQDIREALHERLREADYGTCGRQRVVIRPAKEREEWREHAAQYFIEKFDISHEQAEEIKKLKLPTGWEPYSTEALQKILPLLEAGVRFGEIINGPDLASRREATFPSHQEQTNQGFDRLPSPKNNKQEREHIASLRNPTVARTRNELRKVVNNLIDMFGKPDLIRVELARDVGLSKREREEKQTGMKSQERRRSEAREKLRKAAEDAGLPTFKPSRKDIEKWMLWEECGHRCPYTGETINFEKLFVTNQFDVEHIWPRSRSLDDSFRNKTLCHKDANIQKGDKTPFECFGNNKEVWQHIKNRVNKMEATKKGSIGMSRGKINRLLSEKSIPEDFTARQLNDTGYAAREAVAYLKQLWPDQGSEGKGKAKVQAVSGRVTAHLRRLWGLNNILGNTDTGKKSRDDHRHHAVDALTVACTHPGMTQKLSRYWQDKDNPRAQEPQLLPPWKTIRKDAEEAVDAIIVSHRVRKKVSGRLHKETVYGDTSEEETTRKVTYQFFVTRKNIEALSRKELTEQIRDDEVARIVRDWVDKHGGDPKKAFQDSSYPTLGDGGPEIHKVRLLVKQQIKLMAPVKSPKGYADLDGNHHVAIYRLSTGEIDYDVVSLLEASRRLSRREPVIQRERSDGAKFIMSLSKNNSLELTQNNETKIVIVKEIRTNGQIAITDHEDATSTKHYPGSTAIINKYCGKKVSVDPIGRVRPAND

SEQ ID NO: 7746 - protein, 1089 aa, synthetic construct
  REGION 1..1089: note = Synthetic
MRRIFGLDIGTTSIGWAVIEHDPATFEGNILGMGVRVFPEARDPEGTPLNQTRRMKRLARRTLRRRRQRRRALNELLADAGLLPPFSKDKASAWAELMKTEPLTLRSKGVAPKDGTADRLTPHELGRALYHLARLRHFKGRELAETEEEPGETPDEKKAGEARQQTIQALKASGQTLGQMLAGRVAPKGEVPRQQTRRIHALRSHVESEFNRLIQSQEAYHPILRDPKFAARLHTTIFAQKPVFWRKNTLGHCRFLPEAPLCPRGSWLSQQRRMLEKLNNLTVVGGNFRPLDKEERAAILARLGSQASMSWSGVRSALKPLYKRRGEPGAEKALRFNLELGGEPKLLGNAVEAKLAAVFGNDWMSLPHRDAIRYEVQERLWRADYDEIGQQRVVIRPESDRRERREEAARDFVRDFGITEAQAKSLSDLQLPAGWEPYSTEALSLFLPKLEEGVRFGALVAGPEWEEWREASFPDRERPTGEILDRLPSPADPEEQKRLGTIRNPTVVRVQNELRKVVNNLLRVYGKPHLIRVELAREVGLSKSQREEMRNALRQQEQRRRTAADDLRSKGIDQPSRAVIEKWMLWKEGLERCPYTGDQIGFDALFRNGEYEIEHIWPRSRSLDDSFRNKTLCRRDVNGQKGNRTPFEYFRSNPDEWDAVVKRLQSMVARKGSPGVPVSKFKRFTAEVIPEDFTNRQLTDTGYAARQAVSFLKRLWPDLGPEAPVNVEAVSGRVTGQLRRFWELNNILSEDGEKTRADHRHHAIDALVVACTDLGTTNRLSRYWQQREDPRAERPRLPPPWPGIRRDAERAVEGILVSHRVRKKVSGPLHAEMPFGDTGEEVEKNGVRQRVFVKKMPVGKLSSTTLEIGSPSEISRTAKFVVRDKAVREALKRHLDHAGGDPKKAYVSYPSVSGAGPEIRKVRTLSLQQSRLMAPVSVKREGSGEGGPTGFADLANNHHLAIRRLSDGSVGFEIVSLFEAARRLAKREPVIRRRFGDGASFVMSLAPGEAVEFLDGPREGVWIVQGAWANGQVVLTRHTDARPTSKGEAESLGMDGVRQEFRPAASTLVSDAVRKVSIDPIGRVRPASD

SEQ ID NO: 7747 - protein, 1037 aa, synthetic construct
  REGION 1..1037: note = Synthetic
MERIFGFDIGTTSIGFSVIDYSSTQSAGNIQRLGVRIFPEARDPDGTPLNQQRRQKRMMRRQLRRRRIRRKALNETLHEAGFLPAYGSADWPVVMADEPYELRRRGLEEGLSAYEFGRAIYHLAQHRHFKGRELEESDTPDPDVDDEKEAANERAATLKALKNEQTTLGAWLARRPPSDRKRGIHAHRNVVAEEFERLWEVQSKFHPALKSEEMRARISDTIFAQRPVFWRKNTLGECRFMPGEPLCPKGSWLSQQRRMLEKLNNLAIAGGNARPLDAEERDAILSKLQQQASMSWPGVRSALKALYKQRGEPGAEKSLKFNLELGGESKLLGNALEAKLADMFGPDWPAHPRKQEIRHAVHERLWAADYGETPDKKRVIILSEKDRKAHREAAANSFVADFGITGEQAAQLQALKLPTGWEPYSIPALNLFLAELEKGERFGALVNGPDWEGWRRTNFPHRNQPTGEILDKLPSPASKEERERISQLRNPTVVRTQNELRKVVNNLIGLYGKPDRIRIEVGRDVGKSKREREEIQSGIRRNEKQRKKATEDLIKNGIANPSRDDVEKWILWKEGQERCPYTGDQIGFNALFREGRYEVEHIWPRSRSFDNSPRNKTLCRKDVNIEKGNRMPFEAFGHDEDRWSAIQIRLQGMVSAKGGTGMSPGKVKRFLAKTMPEDFAARQLNDTRYAAKQILAQLKRLWPDMGPEAPVKVEAVTGQVTAQLRKLWTLNNILADDGEKTRADHRHHAIDALTVACTHPGMTNKLSRYWQLRDDPRAEKPALTPPWDTIRADAEKAVSEIVVSHRVRKKVSGPLHKETTYGDTGTDIKTKSGTYRQFVTRKKIESLSKGELDEIRDPRIKEIVAAHVAGRGGDPKKAFPPYPCVSPGGPEIRKVRLTSKQQLNLMAQTGNGYADLGSNHHIAIYRLPDGKADFEIVSLFDASRRLAQRNPIVQRTRADGASFVMSLAAGEAIMIPEGSKKGIWIVQGVWASGQVVLERDTDADHSTTTRPMPNPILKDDAKKVSIDPIGRVRPSND

SEQ ID NO: 7748 - protein, 1037 aa, synthetic construct
  REGION 1..1037: note = Synthetic
MERIFGFDIGTTSIGFAVVDYSPEQSAGNILRLGARIFPEARDPDGTPLNQQRRQKRMMRRQLRRRRMRRKALNEALRDAGLLPAYGSPDWPIVMGGDPYDLRRRGLEEKLSAYEFGRAIYHLAQHRHFKGRELEDSDTPESDADDEKEAQSERDATLKALRNEQTTLGAWLARRAPSDRKRGVHAHRTVVLEEFERLWTTQSEYHPVLRSEELKAKIGDTIFAQRPVFWRKNTLGDCRFMPGAPLCPKGSWLSQQRRMLEKLNNLAIAGGNARPLDAEERAAILSKLQQQASMSWPGVRGALRPLYKQRGEPGAEKSLKFNLELGGENKLLGNVLEAKLADIFGSDWPSHPHQQAIREAVHERLWAADYGETPDKKRVIILSDKERKAHREDAAKSFVADFGVAEEQAAQLQVLKLPTGWEPYSIFALNLFLPELEKGERFGALVNGPDWENWRREVFPNREQPTGEILDKLPSPASKEERERISQLRNPTVIRTQNELRKVVNNLIALYGKPDRIRVEVGRDVGKSKREREEIQSGIRKAERRRSEATKDLQSKGIPSPSRDDVEKWLLWKEGQERCPYTGDQIGFAALFREGQYEVEHIWPRSRSFDDSPRNKTLCRKDVNIEKGNRMPFEAFGHDEDRWSAIQTRLQGMVSAKGGAGMSPGKVKRFLAKEMPDDFAARQLNDTRYAAKQILAQLKRLWPDMGPEAPVKVEAVTGKVTAQLRKLWTLNNVLADNGEKTRADHRHHAVDALAVACTHPGMTNKLSRYWQLRDDPRAAKPTLSPPWDAIRADAERAVNEIVVSHRVRKKVSGALHKETTYGDTGDDVKTKTGTYRQFVARKKVEALSKGELEEIRDPRIKEIVTAHVADRGGDPKKAFPPYPRVSPDGPEIRKVRLTTKQQLNLMAQTGNGYADLGSNHHIAIYRLPNGKADFEVVSLFEASRRLSKRKPVVQRTRADGATFVMSLSAGDTIEVPDGDRAGHRIVQSIWSSGVVVTLAHIDANGDTIWRPNAGSLLKGRARKVSVDPIGRVGTAND

SEQ ID NO: 7749 - protein, 1033 aa, synthetic construct
  REGION 1..1033: note = Synthetic
MQERVFGFDIGTTSIGFAVIDYDPDQQTGHIQGLGVRIFPEARDPDGTPLNQQRRAKRMMRRQLRRRKQRRRSLNEALLAAGLLPQFDQDKASEWSRVMLADPYDLRSRGLTEPLTAHELGRAFYHLAKRRHFNGRDLEETENEEADEKEARTNRESTLAALKRENVTLGTWLATRPDGVKRRGVHADRQTVVAEFEALWTAQAPHHPVLRDESFKEMITDAVFFQRPVFWRTSTLGHCRFMPDEPLCAKGSWLSQQRRMLEKLNNLAVAGGNLRPLDAEERAAILAKLQTQGGMTWSGVRAALKPLFSMRGEKGAEKGLKFNLELGGDKGLLGNKVEADLARVFGDDWPTHPHKQAIREAAYDLLGGADYGHTTDDKRVVILSKAERRKRRDAAAQIFIDEFGATPEQAAKLRELSFQPGWEPFSIAALRAFLPKLEEGIRMGELLSGPAYDDWRDKTFPHRDRPSGEILDLLPSPKEEEEQRRIANLRNSTVVRVQNELRKVVNNLIRVYGKPGRIRVELARQVGKSKREREEEQKRNRKNEAERKKAEIALRSQGITEPSRDDIEKWRLWQECGSCDPYSGQRIGFDDLFRNDLFQVEHIFPQSKSFDDGFRNKTLCHRDWNLLKNNRTPFEAFGHTDEWADMNDRMWRNVREGRMSKGKAIRFCRDEKLDNDFTSRQLNDTGYAARQAVALLKRLWPDLGPEAPVMVQAVSGRVTAQLRRLWGLNNILSDNGEKTRGDHRHHAVDALAVACAHPGMTQQLSRFWQDADNPSARRPRLLPPWPTIRAEADKAVGEIVVSHRVRKKVSGPLHKETTYGDTGEDIKTKTGVYRQFVTRKKVEALKSGELNDIRDEEVRRIVQEWVASHGGDPKKAFATYPHLGSNGPEIRKVRLTTKQQLKLMAPVSTGYADLGANHHIAIYRKPDGKAGFEVVSLYEATRRLARHEPVVRRDCGEGSAFVMSLAPGEALEFPNGEGFWIVQGVWANGQVVLEHANDACHATTTRPAPSVLLKKAARKVSLDPIGRVRPASD

SEQ ID NO: 7750 - protein, 974 aa, synthetic construct
  REGION 1..974: note = Synthetic
LNMLLSQHGLLPSFSKERNSEWAEIMKSPPLALRAKGLTEALSPFELGRAFYHLAQLRHYKGREIEEDKTRETEESADEKKAKPGRDQTIQTLKKSGLTLGQMLAEDAPADGEMPTARTRGIHALRSHVEDEFDRLVTAQAPHHPILCDIAFMARFRDTIFAQRPVFWRKNTLGQCRFIPGGPLCPKGSWLSQQRRMLEKLNNLALVGGNMRPLDDEERAVILDKLQTQASMSWAGVRAALKPLYKKRGEPGEEKTLRFNLELGGEAKLLGNTVEAKLVGVFGDAWNDHPHKQAIRDAIHERLWKADYGEIGEQRVVILSEDERRERRTAEAKRFVDDFGISQQEASALADLKLPAGWEPYSIDTLKAFLPRLEEGVRFGALTMGPEWADWRKANFPDQQQPTGEILDRLPSPADRDEQKRQATIRNPTVIRVQNELRKVVNNLIGAYGKPDLIRIELARQIGLSKYERKKMKEGIDKQEKRRKEAEDDLQKKGISPPSRADVEKWMLWKESQERCPYTGDQIGFGALFGTREFEVEHIWPRSRSLDNSFRNKTLCRRDVNLAKGNRTPFEFYQGSPDAWSAITGRLQNLVARKGSPGIPLAKVKRFLATSMPDDFASRQLNDTGYAARQAMAFLKRLWRDVGPETPVRVQAVTGRVTAQLRRLWGLNNILSEDGEKTRADHRHHAIDALVVACTDPGITNRLSWYWQQKDDQTAECPHLPPPWPGIRDEAERTVAAIIVSHRVRKKVSGPLHLETTYGDTGKDIVRNRVKYRQFVTRKPIVSLTFKQLEAIRDGHIRKTAKDWVATNGGDPKKAFGSFPKNSPDGPEIRKARIIVEQQPGLMTPVSTGYASTDNNHHLAIYRSEDGKIDWKIISMIEAARRLARQEPIVSKSLPNGSRLVMSIALGDTIRIDQGDKAGYWVAKALSANGQIFFRHVEDAIGATKWGPKANTLLKEGAKKVSVDPIGRVRPAND

SEQ ID NO: 7751 - protein, 1080 aa, synthetic construct
  REGION 1..1080: note = Synthetic
MALVFGFDIGTTSIGFAVIDHDPGQGTGKIHRLGVRIFPEARDPKALVPLNQDRRAARMRRRQLRRRRQRRQELGTLLHQNGFLPRRDSCAWNRVMGTDPYLLRKWAFNLQRTDSHESRNQVFAAMQAEQAKLPEWAFEGERLSPHAVGRAIYHLAQRRHFKGRDIDEIAGDDGTETSSRDADQEETDKQVMSARDDTRKALQQEGKTLGAWLAEREPNKCKRGVHALRQNVEDEFDQVWAPCLPNDQIREEVRRAIFDQRPVFWRRNTLGTCRFLPGEELCPRGSWLSQQRRMLEKLNNLQLVSPEQRCLDPEERQAILAKLQTQASMKWAGVQKALAPLYRERNQDGEQKRLKFNLQQGEEKKLLGNSIEANLAKIFGDGWPEHPHQQAIRDALHKRLWDADYGTCGGQRVVIRPAEERKEHREQAARYFIETFGISHEQAEEIKNLKLPTGWEPYSTEALQKILPLLKTGVQFGEIINGPDLVSWREETFPNHQGQTNQKGCDRLPSPKNNKQEREHLASLRNPTVARTRNELRKVVNNLIDMFGKPDLIRVELARDVGLSKREREEKQTGMKRQERRRNAARENLQERGISEPSRDHIEKWMLWEECGHQCPYTGDHICFEALFQKNEFQVEHIWPCSRSLDDSFRNKTLCRKDMNIKKGNQTPFECFGHNHEAWEAIKDRVNGMEASQEGGVGMSPGKIRRLLSEKPIPDDFTSRQLNDTAYAAKQVVAQLRQLWPDPGPKAPVRVQAVSGRITARLRWLWGLNNILGDTGEKNRADHRHHAVDALTVACTHPGMTQKLSRYWQEKDSPRPAVEKPNLPPPWETIRKDTEEAVSAIVVSHRVRKKVSGQLHKETIYGDTRKEETKGEVTYRFFVTRKNVEALSKKELKEQIRDDEVGRIVRDWVEKHGGDPKTAFKDSYPTLGENGHKIRKVRLLVKQQIETMAQASTGYADLDGNHHIVLYRLPNGKVDCKVVSLLRASRRLARREHVIQRERSDDAQFIMSLSKGDLLNLIQDNENKVVVVEGIWSPNRIVILDHNDAKGSSRTRPTASSLLLKSNARKISVDPIGRVRPAND

SEQ ID NO: 7752 - protein, 1083 aa, synthetic construct
  REGION 1..1083: note = Synthetic
MALVFGFDIGTTSIGFAVIDHDPGQGTGKIHRLGVRIFPEARDPKALVPLNQDRRGARMRRRHLRRRRQRRQALGALLHQHGFLPRRDSCAWNRVMGSDPYLLRKWAFNLQQANSHESRSQVLAAMQAGQAKLPAWALEGERLSPHAVGRAVYHLAQRRHFKGRDIDEIASDDGTETSSRDGDQEETDKQAMSARDDTQKALQQEGKTLGAWLAEQGPKKRKRGVHALRQNVEDEFDQVWAPRLPNDRIREEVRRVIFDQRPVFWRVNTLGTCRFLPEKKGLDLCPRGSWLSQQRRMLEKLNNLQFVSPEQRCLDEEERQAILTKLQTQASMTWAGVRKALAPLYRERNQGGEEKRLKFNLQQGGEKKLLGNMIEKNLADIFGEAWKDHPHRQDIREALHERLWTADYGTCGEQRVVIRPAKKREERREQAARYFIETFGLSDEQAEKIKALKLPTGWEPYSTEALQKILPLLETGVRFGEIINGPDLASWREETFPNHQGQTSQGFDRLPSPKNNKQEQEHIASLRNPTVARARNELRKVVNNLIDMFGKPDLICVELARDVGLSKREREEKQTGMKRQEKCRNAARENLQERGISEPSRDHIEKWMLWEECGHQCPYTGDHISFEALFQNNEFEVEHIWPRSHSLDDSFRNKTLCRRDFNRQKGNQIPFNFLAHNQEQWAAVMGRLDNMKARRRGDVGMSTGKIKRFLAQSIPDGFSERQLNDTGYAAREAVAYLKQLWPDQGSEGKGKAKVQAVSGRLTAHLRRLWGLNNILGDTGEKNRADHRHHAVDALTVACTHPGMTQKLSRYWQDKDNPRAQEPQLSPPWKTIRKDAEEAVDAIIVSHRVRKKVSGRLHKETVYGDTGEEETTSKITYRLFATRKNVEALSRKELKEQIRDDEVGRIVRDWVEKYGGDPKKAFQDSSYPTLGDGGPEIRKVRLLVKQQIKLMAPVKSPKGYADKDGNHHVAIYRLSTGEIVHDVVSLLDVSRRLAKREPIVKKERSDGAKFIMSLSKGESLELKKNNENKIRIVTAIAAKGQVRMVDHNDATSKETEYSPRIRTVAENAKKVSVDPIGRVRPAND

SEQ ID NO: 7753 - protein, 1078 aa, synthetic construct
  REGION 1..1078: note = Synthetic
MQIWGFDIGTTSIGWAVIEHEFATSTGRILGMGVRIFPEARDPKGTPLNQTRRQKRLARRQLRRRRERRKTLNQALADADLLPAFSKDQGSEWARVMALPPLPIRERALRERVELHEFGRALYHLAKRRHFKEPDLNESDISEVEDAAEKAACDARNQTIKELKASGKTLGESLSTRFPVQGDRTRGIKGAVPSSQTRRIHALRSHVVAEFERLWSAQALYHPALTDVLKTHIFDVMFVQKPVFWRKNTLGQCRLMPGEELAPKGSWLSQQRRMLEKLNNLEVASGNRRPLDQEERTAILARLQVQASMSWGGVRKALTPLFTKRGEKGLEQRIRFNLEIGGEPKLLGNPLEAKLAGIFGDGWAMHPHRQAIRDAIHHRLWSADYAEVGQRVVILPAAEREIRRATAAERLKADFDITNAQATELTGLALPTGWEPFSTKALEVILPELERGERFGTLMVSPECARWREATFPNREAPTGEVLDRLPSPARRKLPNGEWDSSEQDRIKAIRNPTVARTQNELRKVVNNLIDAFGKPDLIRIELAREVGLSKREREERQTGIRKNASKRADAKKDLETKGISQPSARDIDKWVLWKESGECCPYTGEMIGFDALFRQGAFEIEHIWPRSRSLDDSQGNKTLCRRDINIAKGNRTPFEFFQSRPDDWNAVKLRLDKMIAGKNSPGLPRGKVRRFLAETMPDDFANRQLTDTGYAARQAVALLKRLWPDVGEPSQAADFGLSEELRRRKVLPVTGRVTAQLRKLWGLNNILSDDGEKTRADHRHHAIDALVVACTDPGMTQRLSHYWQQKDVPHAERPHLPPPWPGIRENAELAVKAIIVSHRVRKKVSGPLHKETVYGDTGQEIERHRITYRQVVTRKPLAELSKTELGAIRDTHIREMVTDWVKKNGGDPKKAFGIFPRNTSKDSKVQKDRPEIHKARIIVEQQPSLMAPVATGRVSLGNNHHLAIYRTTDGKIDWRIVSMMEAAQRLARHQPIVTKALTDGSTLVMSISLGDTVCICHGEKAGYWIANILSANGQIFFRRAEDASGESKWGPNANTLFKENACKLSVDPIGRVRPAND

SEQ ID NO: 7754 - protein, 1102 aa, synthetic construct
  REGION 1..1102: note = Synthetic
LFSNRNQEEAYLGREERIFGFDIGTTSIGWAVVDFDKDAGQGRIVEKDGVPGMGVRIFPEARDPDGTPLNQNRRQKRMMRRQLRRRKARRRALNEKLAAAGLLPPFSKDKDSAWSKVMGLDPYPLRVKGLSEPLSAHEFGRAIYHLSKLRHFKGRDLEDDDDFLDAGPDPAASEAPKRTQRTKKGDAAPDTAKEGGDVEKRLKDEIASTHKLLKARGLTLGQYLAGKHADARKGACPKERRREAHAHRVDVEEEFEKLWTAQAAHHRALDDAALKASVSDAIFSQRPVFWRKATLGKCRFIPDAALCPRGSWLSQQRRMLEKLNNLQIAGGNARPLDDEERAAILKDLQTQGSMTWGGVRKILKPILKRKDQPEAPKFNLELDEGGTLLGNPLEAKLSDIFGDDWEAHPHKQAIRDAVHERLWSADYGEVGSQRVVIRSSSDRRKRRAEAAQSFVNDFGATQEQAAKLRELKLPTGWEPFSTEALKKILVELLRGEPFGALVNAANDSKEMRTRAGVTYGEWRDENFPDREQATGEILDSLPSPAVKEEQDRIKTLRNPTVVRTQNELRKVVNNLIRVYGKPDLIRIELARDVGKSKREREDDLKRIRKNERERKKALAELQSKGIADPSRDDIEKWALWQECNQICPYSGLAIDFDGLFRDNVFQVEHIWPRAASLDNSFANKTLCHRDWNARKGKRTPFAAFGGNTDEWAAMKKRVWEQAEAKTMSKGKAKRFCREVPLPDDFATRQLNDTGYAARQAVAFLKRLWPDLGPTAPVNVQPVSGKVTAQLRKYWKLNNILSDDGEKTRADHRHHAVDALAVACAHPGVTNRLSRYLQQKDEPGAQRPNLPPPWPNIRHDAEAAVAKIIVSHRVRKKVSGPLHKETVYGDTGEEVRAGKITYRRFVTRKKVDALTKGELEEIRDPKVGGTVRDWVSAHGGDPKKAFSSYPKLGGGPEIRKVRLLTKQQIGMMAPVSTGYADLSVNHHMAIYRIAGEKSEFEVVSLFEAMRRMRAREPVVRKAAKGGAVFVMSLSPGDAVEWPEGDKKGIRIVQGVWAAGPIVTLDHKDAKGDSVWRPSPGSLLDANARKVSIDPIGRVRPARD

SEQ ID NO: 7755 - protein, 1048 aa, synthetic construct
  REGION 1..1048: note = Synthetic
MPLIFGLDIGTTSIGFAVIYQRPAQGEWIIHRLGVRIFPEARDPKGTPLNQERRRMRMARRQLRRRRVRRRALNECLHEAGLLPEFGTDQWHEVMAINPVHLRTSGLSERLTPMEFGRALYHLAQHRHFKGRELEEETEQDAVSPDEAKAKTEREATLNRIRRTHETLGQILAEKGPHERQRGIHANRDSVAAEFERLWSSQAAYHPGLAETGLRERVADTIFSQRPVFWRLATLGACRFMPGEELCPKGSWLSQQRRMLEKLNNLAITGGNARPLDEAERAAILEKLHGQASMTWPAVRTALRPIFKARGDEGRERTLRFNLEEGGDKTLLGNAVESKLAHIFGGDWTRHPRRQAIRDTVPQLLWDADYGKIGTQRVVIRSEEERRLRRSEAAVSAIAEFSATKAQADALAALRLPSGWEPYSTAALQLFLPHLEAGTRFGALVNGPDWAKWRAETFPNRDQPTGEILSRLPSPANKDERERVAGIRNPTVVRTQNEVRKVVNNLISVYGKPDLIRVEVARQVGASKREREEIKDGQNRQARRREAAAKELRAKGIEPARADIEKFLLWKEGQDKCPYTGDQISFDALFRTGDYEVEHIWPRSISFDDSFRNKTLCRRDVNLAKGNKTPFQHFEHRINEWNAICNHLNRLVARKGAPGMSPGKVKRFLAQTVPDDFASRQLNDTGYAARQTVEFLKRLWPDTGPTAPVTVQAVTGRVTAQLRRLWELNSILADDGEKTRADHRHHAVDALVVACTHPGITNQLSTYWQARENPMAVRPRLVPPWANIRADAERAVAQITVSHRVRKRVSGPLHEQMPLGYTNEDVAKGGTIYGIYVKRMPVEKLSLDTLKIESVAEMSRSAKFVVRDAPVRQVLLDHLRAADCKPDKAYPPYPSVTPGGPEIRKVRVLTIQQKHLMVPVANGYADPANNHHIAIYRLTGGRVDFDVVTLFEASRRLARREQIVRRERNDGASFIMSLSAGDSLRFPDGEQAGVWVVSGVWASGVVVMERAADASHATTWRPAPGAILANRGQKVSVDPIGRIRPAND

SEQ ID NO: 7756 - protein, 1093 aa, synthetic construct
  REGION 1..1093: note = Synthetic
  REGION 841..852: note = misc_feature - Xaa can be any naturally occurring amino acid
MALIFGFDIGTTSIGFAVIDHDPKQSIGRIRRLGVRIFPEARDPKAVPLNQDRRAARMRRRQLRRRRERRQELGTLLHQQGFLPRRDSSEWNSIMGADPYLLRKWAFNLQRADSDESRSQVLEAIQSGQADLPEWAFEGEGLSPHGVGRAIYHLAQRRHFKGRDLDEIAGDDGTETSSRDGDQEETDQQAQSARANTQQALQQEGKTLGAWLAEREPNKRKRGVHALRQNVEDEFDQVWAPYLPNDQIRAEVRRAIFDQRPVFWRLNTLGTCRFLPEKKLCPRGSWLSQQRRMLEKLNNLQLVSPEQRCLDDEERQAILAKLQTQASMTWAGVRKALKPLYEQRSQRGEEKRLKFNLEQGGEKKLLGNVIEAKLATIFGEGWPGHPHQQAIREALPEHLWGADYEILGQQRVVIRTTKERQECREQAARYFIETFGASHEQAEKIKALTLPTGWEPYSTEALRRILPLLEQGVRFGEIINGPDLASWREETFPSHQEETSHGCDRLPSPKNSEQEREHIASLRNPTVVRIRNELRKVVNNLIDMFGKKPYLIRVELARDVGLSKREREEKQTGMKRQEKRREAARKKLQESGISEPSRDDIEKWMLWEECGHRCPYTGDHICFEALFQNNEFEVEHIWPRSLSLDDSFRNKTLCRKDMNIKKGNQTPFQCFGDDHETWEAIKNRVNDMKASKKGDVGMSRGKISRLLSKEGISKDFTTRQLNDTAYAARQVVAQLQQLWPDSGPNAPVKVQAVSGRITGRLRYLWGLNNILGDTGEKNRADHRHHAVDALIVACTHPGMKEKLYRYWQEKDSPRSIVQKPNLPPPWETIRKDAEEAVQAIXXXXXXXXXXXXHRVRKKISGRLHKETVYGDTGEEEITRKKTYRFFVTRKNVEKLKLKELREQIRDDEVGRILRDWVDEHGGAPKKAFQSSYPTLGDDGPEIRKVRLLVKQQKKLMAPVNSAIKGYADLDGNHHMALYQLPNGTVDYEIEIVSLLTASQRLARREPVIQRERGDGAKFIMSLSKGDSLEITQNNETKIVVVESLWSPDRIVIVDHSDAKGSSKTQPNARSLLLKSNARKISVDPIGRVRPAND

SEQ ID NO: 7757 - protein, 1073 aa, synthetic construct
  REGION 1..1073: note = Synthetic
MERIFGFDIGTTSIGFAVVDFSPEQSAGNILRLGVRIFPEARDPDGTPLNQQRRQKRMMRRQLRRRRMRRKALNDVLHEAGFLPKFDKAFRKNSDTKSAWQLAMERDPYELRRRGLEEGLSAYEFGRAIYHLAQHRHFKGRELEESETPDSDVDDETEAASERDATLKALKNEQTTLGAWLARRSPLDRKRGIHAHRNVVAEEFGMLWDAQSKFHPALKSEQLKARISDTIFAQRPVFWRRNTLGECRFIPGEPLCPKGSWLSQQRRMLEKLNNLAIAGGNARPLDAEERAAILSRLQQQASMSWSGVRSALKALYKQRGELGAERSLKFNLELGGESKLLGNVLEAKLVDIFGSDWASHPHKQEIRNAVHERLWVADYGETPDKKRVIILSERDRKARREDAANSFVSDFGVNGEQAAQLQALKLPTGWEPYSISALNLFLPELEKGEKFGALVNGPDREGWRCANFPNRAQPTGEILDKLPSPSSKEECDRISQLRNPTVVRTQNELRKVVNNLIGLYGKPDRIRIEVGRDVGKSKREREEIQSGIRRNEKQRKKAAEDLIKNGIANPSRDDVEKWILWKEGQERCPYTGDQIGFNALFREGRYEVEHIWPRSRSFDNSPRNKTLCRKDVNIEKGNRMPFEAFGHDEDRWSAIQIRLQDMVSAKGGTGMSPGKVKRFLAKAMPDDFAARQLNDTRYAAKQILAQLKRLWPDVGPEAPVKVEAVTGKVTAQLRKLWALNNILAEDGEKTRADHRHHAVDALTVACTHSGMTNKLSRYWQLRDDLYKEKPTLTPPWNTIRSDAGKAVSDIVVSHRVRKKVSGPLHDEMPLGYAGYDIVKGGAELGVYTKRIPVEKLSLETLKISSPEEISRSAKFVVQDSAVRATLLAHLNSAGVPATKAYPPYPKLGGNGPEIRKARVLTTQQKKLMVPAANGFADPANNHHVAVYRTPQGGVDHDVVSLYCAAKRLSKREPVVVRDRGDGSTFIMSLSPGDAIEIPDGDKKGIWIVQGAWASGQVVLAPQCDARPSTKGEASRMGVDGTREEFYPTIAGLLKRNARKISVDPIGRVRPAKD

SEQ ID NO: 7758 - protein, 1031 aa, synthetic construct
  REGION 1..1031: note = Synthetic
MRILGLDIGTTSVGFALIEQQESNNSGKILRMGVRIFPEARDPDGTPLNQQRRDKRTIRRQLRRRRERRKSLNELLSSVSLLPKFNSLEWAVTMQLDPYQLRDKGLAAALEPFELGRALYHLSKRRHFKERDIAEDDSKNSSVMSKKEVAEDNERESFVSSLNKSGLTIGQSLARRSKDEKKRGVHAIRAAVLDEFKRLYNKQSQYHPKLKDYTFRGAVEEAIFKQRPVFWRKSTLGSCRLMPGEPLCQKGSWLSQQRIMLERVNNLAIVGGNARPLDTEERLAVITALNTQKNMSWAGVRKVLEPIFKSRGESAKTIHFNLEYGDEKGGLKGNIVEVELAKIFGSKWKNHPQKDQLRQFLPSSLWEADYGEIGTQRVVIRPEQDRVLRKQVLAERLVADFGASKEQSEALVNLNFPQGWEPFSTKALEVFLPELEGGERFGVLLSSPDREKWRDQNFPDRERPTGEILDKLPSPKDKEEATRIARIKNPTVVRVQNELRKVVNNLIRVYGKPDLIRIELARDVGKSKREREELSSAMRAQERKRTTARKDLQSKGIADPSRDDVEKWLLWKECKEQCPYTGDMIGFDDLFSLGNFEIEHIWPRSLSLDNSFRNKTLCRKDVNIAKGNRLPFEFFKGRDDEWVAAKDRVWKMVGRDGMSPGKAKRFAAVNMPDDFSARQLNDTSYAAREARAFLQRLWPDIGPTAAVKVQSVTGQITAQLRKRWGLNNILADDGEKTRDDHRHHAIDALVVACADGRYIQKLSRWYKEKDEGRKPHLAEPWPKIREDTDKAVKEIVVSHRVRKKVSGALHKETIYGDTGINEKTKSGTYRIFVTRKKVDALSKTEIENIVDDNVRQIISDWVIEHGGDPKKAFSTYPKIGEEGPEIRKVRVYSKQQLNLMAPVSTGYADLGNNHHAAIYKLPNGKIKSNVVSLFETVSRLSRREPLVARDFGDSSIFLMSLSQGDSLYFPEGKMKGYWTVQSIWSAGPIVLCRSEDAQGATVIRPGAATIVAEGGHKVTIDPIGVVWPASD

SEQ ID NO: 7759 - protein, 1046 aa, synthetic construct
  REGION 1..1046: note = Synthetic
MVCMPLVFGLDIGTTSVGFAVIEHDSELATGNIHRLGVRIFPEARDPKGVPLNQERRQARLRRRQLRRRRERRRLLGDQLSAAGLLPSRNSPDWDRAMKSDPYDLRRRAFEGETLSPHEIGRAIYHLAQRRHFRGRDIDEVSDTADDAAGDADEKKATSAREQSVQALKREGTTLGAWLAARGPHERKRGEHATRDVVEDEFDTVWMPLVPEPFRSSVRDAIFAQRPVFWRLNTLGKCRFVPDAPLCPKGSWLSQQRRMLEKLNNLALAGGNQRPLDPEERQAILSRLQTQASMTWPGVRRALAPVYRARGEPGEERALKFNLQEGGEKKLLGNPVEAKLADIFGGDWPEHPRKQEIRDSLPQQTWQADYEQVGDQRVVILPKAERTTRRAEVVQNFVAEYGLSSTQATKIETLKLPSGWEPYSIEALQAMLPHLEDGVRFGELVMGPDREDWRAETFPGREQPTGEVFDRLPSPAEREERERVASLRNPTVARTRNELRKVVNNLIDLYGKPDLIRVEVARDVGNSKRQREEKASGIRRQERRRKAARETLQQNGIAEPSRADVEKWMLWEECGHRCPYTGDTISFDALFRTGDFDVEHIWPRSRSLDNGFRNKTLCRKDVNLRKGNQTPYEFFRSNEEEWDAFANRLAGMKGPRGGTGMSPGKIRRFLAPSIPDDFASRQLNDTGYAAREAVAYLKKLWPDQGPEAPVKVFAVSGRVTGHLRRLWRLNNVLAEDGEKTRADHRHHAIDALTVACCHPGMTQKLSRHWQEEDDPRAPQPHLPPPWETIRSDAERAVAAIVVSHRVRRKVSGQLHKETIYRDTGEEIAGARGTTYRYFVRRKAVEELKNSESERFNGTRIIDIVDDGVRDIVRGWVDRHGGDPSAAFVDGYPKRGRKGPVIRKVRLRVKQQIELMTKASTGYADLGNNHHIAIYRLADGTVDYDVVSLLEASRRKARHEPVVRRERGDGAQFVMSLSPGDTLQTSENGEAKLRVVTGVWSNGQIVMCDNVDAAKATETRPGAKAIVSSGGRKISVDPIGRIRPAND

SEQ ID NO: 7760 - protein, 1087 aa, synthetic construct
  REGION 1..1087: note = Synthetic
LGCRARAKDRFACGKRPPLVSLQNCIYHFSLSLTRGNRMKRIFGFDIGVTSIGFCVADIVADKDHGAIVHMGVRIFPEARDPEGAPLNQLKRAKRMARRQLRRRRDRRRQLAEALASFGLLPLYNTPEWAAVMASDPYALRKRALSEAAAPWELGRLLYHLAKRRHFKGRDLDDEADKAEEDGADEKAAKTNREATLRALKDGAATLGAWLADIPADQRKRGRHAVRSVVNDEFHKIVSAQAAHHPILRQDGVAATLEDAIFAQRPVFWRKNTLGSCRFIPGAELCPKGSWLSQQRRMLEKLNNLALAGGNGRPLEAEERAAILAALQSQASMSWGGVRKALEPLFKAQGASAKHLKFNLELGGEDKLPGNVTEMKLAQVFGPAWAEHPHKQAIRDSVPERLWRADYSEIGHPRTGVQRVVIKGEAQRRVARQAAADSFIADFAVTPEQAQALAALTFPAGWEPFSNAALQRFLPRLAAGARMGTLLNSPDEEKWRADTFPDREQPTGEVHDRLPSPKPGPQGQAERERIKKLRNPTVVRVRNELRKVVNNLIAVYGKPDLIRIELARDIGLSKREREEMLEGMRQREKQRKAAIKDLQAKGIAEPSPQDIEKWLLWKEARESCPYTGDKIGFADLFADNKYEVEHIWPRSLCFDDGFRNKTLCRKDVNIAKSNQTPFEYFQTRPAKEWEDVKQRLEKLTKKKADRDGLSPGKVKRFLREAPLDGDFTARQLTDTGYAARQAVEFLKLLWPDEGIAAPVRVQTVSGRVTAHCRKYWGLNHILADDGEKTRDDHRHHAVDALVVACVDPGITGRLSRFFQQKDDPAAQRPQLSPPWPSIRADAQKAVEAIIVSHRVRKKVSGPLHKETIYGDAKIVEKTKKEEYRLYVTRKKVEALSKGEVFDAAIRDPEVRRIVKAWVEAHGGDPKKAFADGYPRMSANGPEIRKVRLLVKRQPKLMAAVSTGFAQLDENHHIALYRLPGGKVDFEAVSLLEAARRLAQRQPVVCRDRPGAEFVMSLSKGDVVFFPDGARKGLWIMQGVWASGQVVLWRAEDARGATVFYPQAASILRDGGRKVQVDPIGRIRPAND

SEQ ID NO: 7761 - protein, 1038 aa, synthetic construct
  REGION 1..1038: note = Synthetic
VALIFGLDIGTTSIGSAVVVHEPDRGEGKILHLGVRVFPEARDPKGTPLNQQRRAKRMARRQLRRRKSRRRSVNELLSSVGLLPTFGSDAWHETMRLDPYTLRDKGLDVALAPHELGRAIYHLSKHRHFAAKELDDSKDEAEDEVDEEKEAAGARQSTIEALRREGITLGRWLARKPDGQRKRGAHALRSVVEDEYHRLLDRQRPFHSILSDQDFTAALTAEIFAQRPVFWRKNTLGACPLIPGASLCPRGTWLSQQRRMLEKVNNLAIGGGNARPLDPDERAIIIAKVESQPSATFGALRMALKGLYKSRGEEGREKSLRFNFEDGGETRLLGNSVEARLLAIFGDEWSHHPHKEAIRDAVHQRLWSADYAEIGQRVVIRPAGERMGRRRSAARSFITEFGVTEEQAEALERWKLPAGWEPYSTEALLLLLPELEAGVRFGALTVGPDWETWRERTFPDRMRPTGEFVDRLPSPKAKEESDRLANLRNPTVVRCQNELRKVVNNLIDAFGKPDLMRIELAREVGASKLDREKMTKANREQEKRRKAARADLQSKGIAEPARRDIEKWLLWKECGERDPYTGSQIGFDALFRNNEFDIEHIWPRGRSLDDSFRNKTLCQKDVNLAKGNRTPFEYFAHVGEDWEAIKRRLGSMIGTKSGDGMSPGKAKRFLAEAMPEDFASRQLNDTGYSARQAVASLTRLWPDQGRTGSVRVFAVNGRVTAHIRRLWGLNNILSDDGEKTRADHRHHAIDALVVACTDPGMTNRLSRFWQSKDELLAGVARSLSLDPPWPGIRSDAERAAAAIIVSHRVNKKVSGPLHKETTYGDTGTNILRRGTTYRRFVTTKQLLNITVGDVGNIVDPQVRHIVATWIEERGGNPKKAFPPFPRVSEFGPEIRKVRIHVDQQVRLMAPASTGYADLGNNHHVAVYRTSAGEFETRVVSLFEAARRLAAKRPVIERESEDTRFIMSLAAGESIAFSGAARTGLWIVRSIWANGQVVIEAANDAIGATKTQPQASSILRDGGRKVSVDPIGRIRTAGD

SEQ ID NO: 7762 - protein, 1041 aa, synthetic construct
  REGION 1..1041: note = Synthetic
LDVELVFGFDIGATSIGFAVIEYDASAGHGRILRLGSRIFPEARDPDGQPWNQTRRQKRMMRRQLRRRRQRRRDLNELLNIAGLLPAFGSEAWDAVMQRDPYELRQRGVAEALSAFELGRALYHLAQRRHFRGRELVEQEPTETDAVDAEEKEAANKREADRAELKQSGLSLGAWLHSLPAGERRRHKHLLRNDVRAEFELLVAAQWTHHARLGEPTFQGALSDAIFHQRPVFWRKKTLGQCRFVPEGELCPKGSWLSHQRRMLEKVNNLSLIGGNARPLDDDERAAILAQLQTKPSLSWTAVRKVLAPLFRARGEAGGEKSLRFNLQVGGEPKLLGNPLEAKLAGVFGDEWAGHPHKQAIRDTIHGRLWSADYGEIGTQRVVIRSEAERSARRQAVKAALVQDFALTDAEAQALAELTLPAGWEPYSVEALRAFLPELEAGARFGALVGGPEFEDWRLRTFPNAERPTGELFDELPSPRDPDEARRLAGIRNPTVVRVQNELRKVVNNLIRLYGKPDRIRIEVARDVGLSKREREDKQAGMRRNEKRRDEARKDLVKNGIAEPSRDEINKWLLWKEGRDRCPYSGDYIGFHDLFGEGNYEVEHIWPRSRSFDDGLRNKTLCRRDWNLRKSNKTPFELFAGDADGWQAFKDRLEGLTAKSKGAAGLPPGKVKRMLAPSLDEDFTQRQLVDTGYAARQALAMLKRLWPDVGPTAPVKVEPVTGKVTAHLRRLWGLNNVLADDGEKTRADHRHHAVDALTVACTHPGMTNRLARYFQQKDDPRAQSPALPPPWPGIRADAERAVAEIVVSHRVRKKVSGPLHKETVYGDTGQEEVRRGVTYRTLVTRKPVDSLSKAMLDQIVDPHVREVVKAWVAQRGGEPKKAFPPYPRVSEHGPEIRKVRVHVTQQLALMAPVGNGYADLGDNHHIALFKTRDGKAAAEVVSLFEAARRLGSREPVIRRAGDPDRRFWMSLAPGDAVRFSKGERKGIWIVQGVWANTQVVLVRHDDALGTTTTRPRPAAFLKDEAEKVSIDPIGRIRPGND

SEQ ID NO: 7763 - protein, 1105 aa, synthetic construct
  REGION 1..1105: note = Synthetic
MRKTPVRGTEVRIRRRMTLGRRARTKGRFAAKRKPAASRFATMDTIPPDARDAMENICMTLIFGFDIGTTSIGFAVIEHDQDRATGTIRRMGVRIFPEARDPKGAPLNQERRAARMRRRQLRRRRERRRLLGDLLHQAGLLPARGSPDWDEAMKSDPYDLRKRAFEGDALSPFEVGRAVYHLAQRRHFKGRDIDEISEQGDLVEDKEESTDEKKAKTGREETLQELKEAGGTLGAWLANRGPHERKRGVHATRKIVEKEFERVWKDRLPGNISEAVREAVFRQRPVFWRLNTLGECRFVPGAPLCPKGSWLSQQRRMLEKLNNLEHATGNRRPLDPEERAAILDRLQTRASMTWGSVRSALKPVYKARGEPGAERRLKFNLEEGGEKTLLGNAVEAKLTGIFGDDWQNHPHKQGIRDAAHDYIRQADYGEIGKQRVVILSAEDRRKGRERAAQRFAGDFGISKERAEALAAIKLPTGWEPYSVEALRAMLPRLEEGVRFGALVSGPDWETWRNETFPARDRPTGEIMDRLPSPTRKNREEMERIARLRNPTVARAQNELRKVVNNLIDMFGKPDLIRVELTRDVGLSKREREEKSFGIRRQERRREAARKDLEEKGIVEPSRRDIEKWMLWEECGRRCPYTGDHICFDDLFHTGEFEVEHIWPRSRSLDDSYRNKTLCRKDVNIKKGNRTPFEYFDRDAHDEWETVLNRLDGMKASKGGAGMSPGKIRRFKAESIPEDFAARQLNDTGYAARETVAFLKRLWPDVGPEAPVTVQAVTGRVTGHLRRLWGLNNILSEDGEKTRADHRHHAVDALVVACCHPGMTQRLSRYWQQEDNPEIPDPPSLPKPWEAIRADADRAVAEVVVSHRVRKKVSGPLHKETVYGDTHEEETGKDGTVYRYFVTRKQLEDLSKSDFADKNADAWPDEKIRDIVKNWVDRHGGDPKKAFAEGYPKRGRKGPEIRKVRLRRKQQVKLMARVSTGFADLGNNHHIAIYRMADGSVDYDVVSLMEASQRLANREPVMRRKRGDGSQFVMSLSAGDSLEFTKNGETKVRIVEGAWDNGQVVLVDHDDATGESRFRPGAKAIASSGAKKFSVDPIGRIRPAND

SEQ ID NO: 7764 - protein, 1053 aa, synthetic construct
  REGION 1..1053: note = Synthetic
MKLIFGFDIGTTSIGFAVIEHDPEQSTGKIRRLGVRIFPEARDPKALVPLNQDRREARMRRRQLRRRRSRRQELGALLNQHGFLPRRGDTEAWDTVMGADPYLLRKWAFNLQQPESDLQAEQVNLPEWAFEGEGLSPHAVGRAIYHLAQRRHFKGRDIDEIAGDDGTKPSNRAADQDEEDKQAMSAREATRKTLEQEGKTLGAWLAERKPNERKRDVHALRQNVEEEFDQVWAPHLPNNQIRAKVRKAIFDQRPVFWRQKTLGTCRFLPEKKGRDLCPRGSWLSQQRRMLEKLNNLQLVSPEQCCLDQEERQAILAKLQTQASMTWAGVRKALEPLYQQRGQRGDKRLMKFNLEQGGEKKLLGNPIEAKLANIFDDGWPDHPHQQAIRDALHEHLWNADYEWLGRERVVICSDKEREKRRKQVARYFMETFGVSHEQAEKIKALKLPTGWEPYSTEALRRILPRLEEGKQFGQIINGHDTESVRWRKETFPNHQENTGHGCGRLPSPKNEQECKHIASLRNPTVARTRNELRKVVNNLIDMFGKPDQIRVELARDVGLSKREREEMQTGMNRQEKRRNAARKDLKEKGISEPSRKDIEKWMLWEECDHQCPYTGDHICFEALFRNNEFEVEHIWPRSRSLDDSFRNKTLCRKDFNARKGNKTPFELLSSDEEKWAAIGQRLEKMKAKRKGEKGMSPGKIKRFLAQSIPEDFTNRQLNDTGYAAREAVAYLKQLWSPDETTGTVVQAVSGRVTAHLRRLWGLNNILGDTGEKNRADHRHHAVDALTVACTHPGMTQKLSRYWQDKDNPRPVIQKPGLPHPWETIRNDAEKAVQDIVVSHRVRKKVSGRLHKETVYGDTGEEETTGNVTYRYFVTRKKVEALSKKELKEQICDDRVGRIVRDWVEDHGGDPKKAFNDSSYPMLGDHGPEIRKVRLRIKQQIETMTPASTGCAYLDGNHHIALYQLPNGKIDYEIVSLLRASQRLAGREPIIQREHSGSAKFIMSLSKGDSLKLTEDNKIKIVIVESIWSSGQIVIVDHSDAKGSSKNNQKLDLYY

SEQ ID NO: 7765 - protein, 1108 aa, synthetic construct
  REGION 1..1108: note = Synthetic
LQRQACIKGGLIVTRYVVGIDVGSYSVGMAAIELDEQGFPVQLLNAVSQLHDAGVDPDSQKSADSRLSKSGLARRTRRVIRRRRERLQKLDKFIAAQGWPIMSLEDYENPHHPWIVRAELATTKISDPAELQEKLSVALRHIARHRGWRNPYSSTASLLNVEKNSEPFEQILANIAEKTGKLIPENTTVGQAILIGIDRGYRIRKGAADGDAQTEGLLSAHLQQSDHARELAAIFAKQELSHDLYKDVIEVVFAAKSPKGSAARKVGKDSLPGQTHLPRALKASEAFQLYRIVSVIANLRLIVEGTARPLTKDERVAVYEYLSTAKSRNKASWDEVASILKVDRGQIRGTAAMTDDGERVSARPPIHDTNAIMGSLKLKALANFWKNSDSEIRAAVLRALSNSEARDDSSEADAQLDEFLADLSEKEQEELDKISLPVGRAAYSEDSLTRLTAVMLNEGVDLSTARQLEFGIPKNWQPPAPEIGEPVGNPAVDRVLKIVARWLAGVTKKWGEPERVTIEHVRDAFSSKKKTSEISRKINERAKRNESLRENIRKARGFDGYVSRADLWRYQSITRQNGQCAYCGTHITMSNSQMDHIVPRAGQGSTNTRDNLLAVCSACNSDKTNLPFAIWAAKTSRPNVSLKEAQERIKHWNKDPAMKALDFAYFKRSVLKRLKRKTIDEEIDTRSIESVAWMANELRSRIAHKYSLLEGQQESPKVQVFAGAITSEARKAAGIEKELKYIGGVGKTRLDRRHHAVDAAVVALITPFVAQTFEERMNLRFSEELSNSKSTWKTYTGADYAHRQQWEIWQLKMQKLLQLLQDALDNDQIPVMSNIRLRLGNSRVHEDKVSALEYHPLGEELSSSLIDRASSEALWCALTRDPDYVFKKGLPANPNRTIQVNGTHYGPSEEIGFFAVKAASIPLRGGYAELGKSIHHIRIYRINTGKMPTYAILRVYAVDLQRHRNNDLFNAEIRPQTISMRKAPDTLRKAIAAEAAEYIGWVVTDDELFIDSVLNTELNEAYGDVKRWRIVGSTDDNRFVLRPSQLSSEGLDSKASNNIQKIIKIGLRISVNELLKKHGITVVRRNALGVERIKSSANLPVSWSIKKI

SEQ ID NO: 7766 - protein, 527 aa, synthetic construct
  REGION 1..527: note = Synthetic
MRVLRFSYYLHNLRDGPYCSACGRRLYKYQGQLGCHLSSLQLGKKNIPFAVWAAQTNIPGVSVKEALDRTRHWSEDSGMTSKDFKKFRKNVCDRLKRTVVDEPLDARSMESVAWMANELRGRVAQRFQEENTVVNVYRGELTAEARRAAGISDKLRFIDGTGKSRLDRRHHAVDAAVVAFTQNYVAETLAIRSNKKREAQLLQAAEQWKEFTGSDAEHRAAWNAWLPKMQKLAVLLQKALDEDRIAVTSNLRLRLGNGRAHEDSIGELKTIRVGDAISVTDIDRASSEALWCALTREPDFDENNGLPENPDRRIRIHGTWYDAEDDIEVFPVGAGAIKVRGGYAELSRFHHARIYKIPGKKAPVYCMLRVYNADLIRHRHEDLFSVEIKPQTMSVRQAEPKLRKALAENTAEYLGWLVTDDELVIDTSNFNTGQIAEMQSELGQVRRWRLDGFYSPSTLRLRPLQMSAEGLREDTSIGAKKIIDRPGWLPAINKLFGEGHVTVVRRDALGRARLTSNAHLPISWKAE

SEQ ID NO: 7767 - protein, 1076 aa, synthetic construct
  REGION 1..1076: note = Synthetic
MAAVELDDNGYPIEILNAVSHIHDSGVDPNHQKRAETRLAVSGVARRTRRMFRRRRARLQKLDKFIARQGWPLNSFEEFPNPQYPWLVRAELASKKITDEAELAEKLSVALRHIARHRGWRNPYIKAESLTQLVGDSDAFVAVRESVKEATGLPIPEGATVGQVIALASNGKHRLRGESGLISARLQQTDHARELKVIFETQGLSDELFREVIKVVFDAESPKGSAAGKVGHDALPGQTKLPRAAKASDAFQRYRIVSVIGNLRLLEAGKRRPLATEERTKVFEYLVSVPSKDKASWDEVAELLGVDRGELQGTAAVTDDGERVSARPPIHETNATMRSVKLKSLAKFWKESDEGVRAAILRALSNSEAVDSTSDYDAQVDEFLMTLSDEDQALLDTVHLPAGRAAYSEDSLRRLTKVMLEQGVDLSEAREIEFGVPGDWKPPAPRVGEPVGNPAVDRVLKTVARWLDGVTARWGEPERVTIEHVRDAFTSKSKSMEIDRNINRRAQRNESLREDIRAARGLDGPVSRADMWRFQSVTRQNGQCAYCGTGITMANSEMDHIVPRAGQGSTNTRDNLLAVCHACNSEKGKIPFAVWAEKTSRPGVSVEEAKMRLKFWERDLGMSAKDFGSFKLSVMRRLQRATFDEEMDARSIESVAWMANELRARIAHKYALQAEGDSAHKVQVFAGAVTAEARKASGIEKQLEFIGGTGKTRLDRRHHAVDAAVVSLMSSFVAQTLGERMNIRFAQQLSGEEPTWKQYQGADYAHQEQWRLWIQKMQELVPLLQEVLDADQVPVTRNLRLRLGNSRVHEDSIRPLVKYRVGEELSSEMIDRASSEALWCALTRDPDYDFKKGLPANPERTIRVNGTIFGPEDEVSFFPVNAACVAVRGGCAELGSSFHHARIYRVPSGKKVAYVMLRVYALDLQRHRDKDLFNVELPPQTMSVRKADPKLRKALAEGTAEYLGWIVVDDELLVDTSKHGSADMSVLTEEYGKVSRWTIEGFFDSGRLRLRPAQLSSEGLSENSPNSIWKLLDRPGWLASVNKLFENSDTRLIRRDSLGNERVETLSGLPVSWSLE

SEQ ID NO: 7768 - protein, 637 aa, synthetic construct
  REGION 1..637: note = Synthetic
VSEDWAPPAPDIAEPTGNPAVDRVLKIVNRWLSAAEAEWGAPLSVNIEHGRDAFVSELKSREIDRDIQRRTRRNYDLLKTMQEELGIDSKPSRADLWRYQSVQRQNGQCAYCGSPITYSNCEMDHIVPRAGQGSTNKRENLVATCARCNRSKLNIPFAVWAERSTIPGVSVKEAIDRTKMWLPDSGMRAADFRSFVKQVQDRFRRTTLDEPIDNRSAESVSWMANELRARIAQHFSSGDDPADTKVRVFRGEITARARAASGIQRDLNMIGGKGKQRLDRRHHAVDASVIALMQATVAQVLVERNDLKHEQALRRQAPQWKEYEGADEGTRFQFRQWKRRMHSLLRILNQALDEDRIVVMSNLRLRLGNSQVHEAQIGKLAAKKVGDAFSVVEIDRASSEALWCALTRDPDYDPKEGLPENPERTLRVHGTHLSANDEVHIFPVGAAAIAIRGGYAELGASFHHARIYRINGKKPSYGMVRVFSVDLQKFRQQDLFSVELKPQTVSMRYADPKVRKAIAEGNAEYLGWLVPDDELLLDASSFTGQVADTQAALGPIKRWRLDGLFSPSRLRLRPLQLAAEGLASDSEDYLKKTLDMQGWLPAVNKLLSVGRVTVVRRNALGRPRLESVANLPVTKSF

SEQ ID NO: 7769 - protein, 651 aa, synthetic construct
  REGION 1..651: note = Synthetic
MLSNGVDLYTARRQVFGISEDWAPPVPEIGEPVGNPAVDRVLKVVARWLRAAENTWGVPESINIEHVRAGFMSRSKSLELDRDNERRAKRNLELFTQMQQKFGQDIRPSRADLWRYQSVQRQNGQCCYCGATTTYQNCEMDHIVPRAGRGSTNTRDNLVAVCHDCNLSKGNTPFAVWAEKSTKPGVSVAEAQERLRHWVCDPGLKTPQFRRFVKSVNDRLSRKTIDEELDARSIESVAWMANELRGRIAHKYKDAKVRVFRGQLTAEARKASGISKKIAFIDGPGKSRLDRRHHAVDAAVIAFMSAKVAETLAIRSNLKFDQELRKDAPQWKEFTGSTDAHKIIWSKWRSRMIALADLLQTALDEDRIVVMSNLRLRLGNGAVHEEKIRKLKKLKVGGPISAVDVDRASTEALWCALTRHPDFDPKEGLLADPDRNIRVQGRHLSADDTIEVFPVSAGAVAVRGGYVKLGRSFHHARVYKIADGKKVEYAMLRVYSIDLTKYKNEDLFTVELQPQTMTMRKCKSSLRKALAAGKAEYLGWLVVDDELYLDTAKLNTGQIVNIQEELGKITRWRVDGFKTESKLRLRPLQMSKEGIRKDMSEDVNKILDSEGWQPTVNKLFGVGKVTVIRRDALGRVRLSSNAHLPVTWTAG

SEQ ID NO: 7770 - protein, 1074 aa, synthetic construct
  REGION 1..1074: note = Synthetic
MAKQAYRLGLDLGTNSIGWCILDLKHSTKEPCRIRATGVRIFSDSREAKSKTTLASARRAARAMRRSRDRKINRKNRLLNTLSEIGLMPLNETERKQLQQKNPYELRYRALNERIELYELGRALFHLNQRRGFKSNRKTDKKSNENGKILSAIKELKEKLESEKNRTYGEFLYHKNKKSQLVRLRANAKQEYAFYPDRSIIEEEFNFIWSKQSEFHKELKNEDMKNQIKNIILFQRNLRKPVPGKCLFLPEENRCPKALPSFQLFRLYQNLTNLRIRNKKDNETKLTREEINTIIKSILTNNKESVKFDDLRKYLSDTNKSIRFTIELSGYIKEIDGEEIQNQIGRIEKRLKKSGINNHKIIDTWNNLELNKKDEIISSILDNDNDDELINSISKKLNINIEIAKQIIEIDTPNEYSRLSLKAIEQFLAEWKNSNEEYLPDYSEISKKLFSGHTWNIENGFEKLPYYGEILTRSTVEAPPGMITAKDTECTEWIANPTVHVALNQLRLIINTIIDKYGKPDEIVIELARELKNNKETKDKINKSQRNREADYNESREEIINLGGNPKSRDDLIKWRLWKELPPQDRICIYTGKTIPQHKLFTNEIEVDHIIPFSRSLDDHISNKVLVFTQANRAKANKTPYEAFGNSPTQLGINFNWNEITNNVYSIFARTNTETGERFLIRKGNNILRENWNQEIESKFLARHLVDTQYLSKASMNYLKCICDNVTNTPGILTALIRRNLGLDAILSENNSEKNRLDHRHHAVDAFVIALTTRSYVQKISQANARREAEDPQNFVNENPLTPWNNYWIELKTKIDRLTVSHKSDHGYYGAMMEDTAYGIIDGPNKDGKYTTQIRVRIEDLKNPDLVIDESFKSTLIQLKEQHDNKWDLALKRFMANPPKQFRKLKSIKIKEENVLLLPPIKNKEGKPYKGYVGGNNAKFVIYEKPDGTWVGTTVSVYSAYLEDKKSIAPFETIEFENLEYKKLMELFKNDLVSINTENGVVYQKVLKFSQSDLTLCNPEMVKDREKDENGKLQFFYTAKKPHLWQKFELKPCIQSPLGTPRIKNESRTMCRTV

SEQ ID NO: 7771 - protein, 1170 aa, synthetic construct
  REGION 1..1170: note = Synthetic
MEKYMNTSYLNDKLQLRHLLAGKPYRVGLDLGVGSIGFAVVSLECIDDKTIPTDLILNGSRIFETSIGAAERRGFRGGRNAHHHDRNRKLWLWKVLSEHSMMLPPEYKGIFIDHKNRRRHSDTSKVMFSKSVLSCSPYDLRYKGLTHKLELPELGYALYHLSNHRGSSAMRVNPDATEEEKTAQKSIQETQEFAKKHSTANTFVELLIINNQENNTGFRNKLKRKYALMPTRNLILNELSTLLDTQSKFYPDIFTEEFINQIKYIVNYENEMIVPDSGRCIFFEDEPKLPKCNFLNEERRIWEALNNTRIDGKPLSMEQKQNFYEHLRAGNDLTPAIVKKEVKYDNITLQGRNKDNQKIQGFRFKDLENKDFWSRLDDVQKDRFFADWTNCADDNKLLDILQCEYNLTYDEAYDTLNSISLIGDYAPIGKTAMQIVVEYIKNDSLSYLEAVNKAIEDGKLKSNAENIVYDTLPYYGAVLSESTQGFIGKAWHSSLKDKFKQEPKRYKTPHTNKDEKKYGRIANPVVHQTLNELRKLVNEIVDIFGYKPAEIGIELSRELKVGTKERDKIISDQNANEKQNKRIMDEYCIPNGVDEKYILRFQLAEEQGCICPYCLERFKVKDVVSGDVDIDHIFPQSQSADNSRNNLVMAHKTCNVQLKGNRTPYNAFSGDKNWSEIIHFVKEQLPNKLWRFTKNDEEYREWLNHRGFLARFSTDTSYIAKAAAAYMQCLYVDKSKKNVRTLKGGETATLRKAWGLHGITHELGNRFVDDNNGVYFHPAKKMRLDHRHHALDAVTIAYSTNGYSKLINTLSGKGFELQAIREMIPLPNIAKIYQNQNIDETALGDKETFATYIKDKITNHSYISIKYDHNKNGGLLKQTAYTILFEKAGEIVLSTKKKIDGIKDNLIEVDKQLLPKMYTEEKLLKYSDSERAKLQKLLEHNKLKREDIMNAMPTAEQELTSENESLKAEGKKERTINENSILKRALSTVGSFYYQISNNEKSKKFIVVEPAEDRVGVAYDTDENLRIDLYHDSNGKLCGEVIRKVNAMNKDFIPDYQKSGYTLLESIYQGDTLEIDLVNHKTLTDKSNLLEKAASVKAPNAPAGRTYVRVATFTEVGSGIQIHLQNLLKAQKGNDASFNINSMQKWNVRRVVLSSVGLTRYRSPILKNKQ

SEQ ID NO: 7772 - protein, 1059 aa, synthetic construct
  REGION 1..1059: note = Synthetic
MADSITVLGLDIGSNSIGWALVRDGDPEVIKPLMMGVRVFPEGVDRDQTGGEISKNEARRIARGMRRQVVRRARRKKRLRIALIHAGLFPADPGAQKQLLDTTDPYALRERALHEPLTPHEVGRVLIHLNQRRGFLSNRKSDGGKKETSETLEKISALATQLGDQTLGQFLAGIHQEPHERLRGRHTRRDMFLFEFEQIWQHQRQYHPDLLTDNLKFGHHPDQKYPVEPIGHSKETTLLEEFGIHGLIFFQRPMYWPASVVGRCELEPREKRAPRADRRFQYFRILNEVNNIQIVGPRGDKRVLTEIQRSKLIQMLLTSEECKFDKIRKELSISEDEIINLQRGDRKKLDGHKTDHHLSKKNLFHKDWANLAGPLKNEIVHSLIHDEEEAILQRATSQWGCSPERAQALSRTFLPEGYASFSIMAIERLIPFLEQGLRLMANDATDSALHAAGYIRPDQRVVNPQSTLPEIPESITNPLVRQALREVRKVVHGVIREHGMPGAIHIELAREVHGGEEQRAKTTKTMRENEDRREAARESIKALGYRGTRDDVIRYQIWRDQKELCFYSGKPISTVQLFGGEVDIDHILPYPRSLDDSQSNKVVCFRDENQGKGDRTPYEWLADSNPQKYESILQRTKSLPPHARMAKLDRVTRKQLELTEFINRQLTDTAYITRLVHGYIQQLGIDVVCVKGQHTAELRHLWGINDMLRDDGLNLKNREDHRHHAVDALVIAMTNRRTLQGLSHYWKARSEFARDNQRRTILAPPSENFREAVEALVNQIVVSHKPRRRIAGALHEETLYGPTDKPEKGMPGPRGHAKNWKELPGTFVLRKELIRLTLAEVLKIRDDQVRRLVIERLARHGIDPESKAKILPKAWANIWAEPLHMVGRRGLEGSPHAPVIKSVRILKNDQTIRPIRGGSAWVKPGNTHHICLFEIPGQNGKEPTRDMVAVPMIDAIARAQAGESVISRTHPTNPDARFLFSLTKGEMVQGVLFGVESIFTFSSAHSQTKVMIFYQHLDARRDSHPDLERKKRQFRPSPNTLNVEKILVDPIGRIRRASD

SEQ ID NO: 7773 - protein, 1410 aa, synthetic construct
  REGION 1..1410: note = Synthetic
MKRILGLDIGSNSIGWAVVNLDFDNEQGEILGAGSRIVPMDADLLTNFEQGNSVSKTAARRQARGARRLRHRYKLRRQRLIELLKLLGWLPATFEPGHKLPITEDSIKQMYELFATSKIPEDWIVYFLRHKALTRKIALSELARVLYHINQRRGFKSNRKANNEAIENTGEDSEDSLPKRESKVMIVKVTGIRDTGEITRKKKAIEIEVDQPVSKGITKGIIYRDTLPDWLNQEIELEVRVIRSKKDTRVEFAIPDKTDWQKLREALAKDFDNKNLHPGSYFLHEILKDRNYRIRERIIDRARYEAEFKAIWEKQSEYHPELKAMDKLPEIAQKFYANNKEKQKELLSNDLFYIIVKDIIYYQRPLKSQKSSIGECRYEKKNVVLDKQINGKTIPYTPGYKVAPISSPAFQEFRIWKTLLNLKIFALKKMINERWETDIDETEIYIRPKLEPLFNLFDSKAKVSSQEIFKLIGVSNNTHRLNYPPETEFPGNETKQEFRKLFKKHNYASEGNELLENEKKLQQLWHLIYSVDDENAIKRSLEKRFEFPDTLAAAFSKLPPFRPQYASYSAKAIHKLLSLMRAGKYWSESNIPLAVRERISKLDNGELDTTLDESVRERVEKFRAKHGLSSITDYQALPEWLACYIVYGKHSENNYGEPCSTPEEVKGLEAKTLRNPIVEQVVNETLQLVKDIWRQYGRPEQIRVELARNLKKTAAERKAIYDANRQNREDKERIKAILRELKIGNPDSLADIEKVRILEENGNFKYQNSRERFFRKATEPTQAEVEKYRLWVEQKCISPYTGNPIMLSELFTFKYEVDHVIPRSRHYDDSLANKVIVESWANKEKDNLTAMQYIQQGSIQNRLLPVEKYLLHIEENFRGRKRRNLLSAEVPKGFIERQLNDTRHISRRVNELLHQVTGQVWASSGQITDELKHKWGLGNKMKEILEERFLRLESITGETMVSYTVDENGQRNIHLQGYEKRIDHRHHAMDAIVVACTTQSHIQYINTLEAQNTDKDKGTSFRKKLLQSNKARDFRKPWKTFVEDAKTALESTIISYKNRHRILNKGINRYTKYVRDEKGEWIKALVEQTKGELFSARKPLHKETIGGTVNFREYRKANLEEALKDIDKVADKSVKRQLKALKQEYGNDIKKIKSAIKANPLTDTSGNITDKVLVWHWQVYALNRVALDASFKKDKIDKIAEYDNKKQKGLKYQLHKHLSQYEDDPKAAFTGEGLEALAKTVGKPVTKVSIYEPVGGKFEIRPGQLVEAAKGTNLFFVIYENILTGERSYTTLGLREVLTAKMNKLPVVPPKEGHKHYVLSPNDLVYVPDTEENIKAIDWSNKKAISSKIYKMVSSSGNQCFFVPHHISKPIIETLELGANNKSERSWDGKMIKQCCIKLRHDRLGNIAPA

SEQ ID NO: 7774 - protein, 1397 aa, synthetic construct
  REGION 1..1397: note = Synthetic
MKNILGLDIGTNSIGWSFVQLDPDDNKGKIRGMGSRIIPMDTDLLNNLEQGNSISKTASRRKFRGSRRLRHRYKIRRNRLIQCLKILNWLPENFKPGNRLPYFEKSLSELRSYLNSNDVTEDWTIYYLRKKALYERIEVEELARILLHMNQRRGFKSNRKTDQNKPELEIIDDVNHSKWIEIAKVNSVIETGEKFKNKNQYEIQFCDGRKGYMYRDSLPDWKDKEMEFEFRLRLSKKGETLTLSIPNKTDWVQLKDALSKDIEEKNLHVGEYYLEEIRKNRNYRIRERIVERTRLMKELECIWNHQAQYYPELNSSQFLPIISKTLYLHNEQKQKEIEGNSLLHVLMRNIIFYQRPLKSQKNSIGECTCEKKCYVNSLTNKIEFNGIKVCPISKPIFQEFRIWKTINNLKIIRHELNGEIINDIDETSIFFPEKLDTIFELFDSKEKITGKEILKELGLTPKTHRLNFPDETDFVGNVTKNAIRKVLKKYNYENSNLLDNAQALEYIWHCIYSIEDERAIYKSLKSKLKLPDEICTALSKLPPFENRYGAYSSKAIAKMLPFMRSGKFWSKDQIDVATQTKISKIIDAEFDPNISEKTREQLQHLKEIDHFGGLTEYLAKFIVYGMQNVTNDYGQVDTPDLIKNPIKPNSLNNPIVEQVIHETLQLVKDVWKQFDRPDEIRIELARDYRKTAPERKKIHKQNLKNKEDNERISAILRELGIGNPNSLGDIEKLKIAEENAKFSGFDHQQQAFFSKQSNPSKTEIERYRLWMDQNCISPYSGQIIQLSKLFTSEYEIEHIIPKSKYFDDSLAKKVIVEAWANKEKDNHTALQYINIGTQLNGKQLLSPEQFLHHVNKTFSGKKRKHLLEESIPEGFIERHLNDTRYISKKVKEVLHQICPNVYSTIGSVTHELKNKWGLSSLLKKINVERFKRLEQLTQETLVFNTVGENGERHLQLKGFEKRIDHRHHALDAFVIACTRQNHIQYLNTLESNPSNKTTHFQFQKILKSSKIRDFKEPWNGFHADVENAMDTMIISYKKRARVTNKPRNKYLKYIQNEEGKWVKSMMIQTESSTDNPWISIRQALHKETFSGTVKLREYKDIPLKQALDQIDFICDKTIKKKLKQIANEFNGNSKEILKYISKNPLQESSGKLIDKVTIWYSKTYSKSRVSLDKSFDPKKINKIAEYPTSKPGKGLKNILIEHLAQFENKPDKAFEGEGLEALAKHFGKRITKVTIKEEIGNKFEIRPGNLVEAAKGTNLYFLIYEHIESKEREYDSIRFLDVVERKKNKLPLADPKDGYKFFTLSPNELVYVPEPEEDISLIDWDQDKKRLSKRIYKMVSCTGKQCFFTPHVISKPVIDTKELGANNKSENSWDNLMIKKTCVKLKVDRLGNIRPIL

SEQ ID NO: 7775 - protein, 1402 aa, synthetic construct
  REGION 1..1402: note = Synthetic
MQKTTLGLDIGTNSIGWALVDFEYGNNDSKILGMGCRIIPMDGEMLGNYEAGVSVSQTASRRQARGSRRLKDRYKLRRKRLITTLKILGWLPDNFEAGHILPVLPEQLAEMHSLFGTSQITQDWLVYYLRKKALIEKVELSELARILLHMNQRRGFKSNRKANNESSITTDNDVDEQLPTRENKIEVVSVIAVKDTGDTTRGKKVFEITLGNGIKGTIARETLPDWEGKEMELEIRTIRSKKDPAPRYEFAMPNKSDWQKLKEALQKDIATSGLHIGEYLFNEILKNRNYRIRERVIDRSLFIAELTAIWETQKQFHAELSSPEKNNEIADTLYLHNQEKKKEIKVNDLLHVLLHDIIYYQRPLKSKTSTIGDCRFEKKSIWLKDAKGNAVQPALKVIPASAPLFQEFRIWKTLHALKVIIKEKKVNGEFKTDVDETLLHITPAIKESLFDFFDNREEIEIKDILKFLKLSPETHYLNYPENTRFKGNVTKCQFRKVFNRLKFEAGNTLFQDPEKMNSLWHLVYSIDDSTDIETALKGKKWQFPANLAKAISNLPAYASQYGAYSTKALNKLLPLMRCGSRWSASAIHSDTLIRIEKIITGEYDENIDERTRDLVTHLTATDQFQGLPEHLATYVVYGKHSEKTGEPVDSPDMVKGWEEKGPANPIVKQIVNETIQVVKEIWRQYGRPDEIRIEMARDLKKTNDERKELSAINYKNQEDKRRIKAILRELKIGDPESLSDVDRMRILEENGNYSAQANILKFFKKATEPTLAEAEKYQLWVEQNCISPYTGKPIQLSRLFITRDYDIDHIIPRARYYDDSMGNKVIVETWANREKDDRTAMEYIRRGSSISDLLNPEAYSAHVNRIFRHKKRRHLLSDEIPKGFIERQLNDTRYITKKVAELLSQVVESKKVKTTTGKITDELKHKWGMGDMMKRLLIERFERLEKLTGEKKVEYLTDEDGRRRLHLQGFEKRIDHRHHAIDALIVACTLDEHITYINTLEAQTKDETEKYKYKKLLKSNKTRDFKEPWHYFIPAAEKALQQIIVSFKNRHRILNKGVNKHLKYVEKDGQWVKDLVTQTKGDLWSVRQPLHKETVSGKLQFRRYKTGNISDAIKQPEKIADKKVKAHLRYLIQQLGPDEKKIKKHLKDNPAFDSNGNAIEKVTMWYMKEYYGNRVFLDDSFTAEKIKEKIAEYNTESGKGLKGVLLTHLSKWNNDPKAAFTGEGMEDLAKTAGRPITKVTTYEDSKGKFEIRKGQFVEAAKGTNLFFVIYENMQTGDREYETLRLDEVIVAKANGWPVVKAKEGYRHFTLSPNDLVYVPEEGENIKMIDWQMEKEKTSRRVYKVVSFTGSQCFFVPHNFSKTIIEKVELGSLNKQEKSLDELMIKKCCIKLRVDKLGNVSII

SEQ ID NO: 7776 - protein, 995 aa, synthetic construct
  REGION 1..995: note = Synthetic
MEKNQARILGLDLGPNSIGWALLNVDPAGECRSLEAAGVRIFQEAVDAKTRTPKNLARRTARNARRCLARYRMRRDRLLKLLTAAGLLPSHTEERQRILTDLKNYDPYALRAHGLDRELTLYEFGRALFHLNQRRGFLSNRKQKSDNEEGKIKTAISALRKEIAASNCRTLGEYLYHQTRRRNRAPYFDRYTERSMYCEEFSQLWEKQRQFKPEILSQVLRAKIYRTIFFQRPLRIQKYLVGRCSFEPLRRRIAKGRLEFQRYRYLQDVNHLQVRDPIERTWRPLSVSERAILISNLEEGDLTFDKVRHLLGLHQGEELNLEVAKSTGKLKGNRTAATLKKALGNTWTAMSIEDQLSLVTDLLTIHNEEHLHNRLSNKWKFSDQQTQAVLAVELEPGYGMLSLKAIRRILPHLENGCIYSEAVSKAGYNHSRPNCPVLSAILPLPPSLRNPVVQKALYEVRKVVNAIIRKYGRPGIIRVEMARDLKMGRAALAEYTKEQKKRAKENERIRQLLTTDFGRPTPTNADVEKYRLWKEAECLCPYTGQVISNSMLFSPEVEVEHIVPFSRSLDDSFMNKTIAMASVNRIKGNKTPYEMFEGRRDEYLNVLKRLSSMPRAKRARFEQKEAEIDDFISRQLNDTRYICREVKKYLEQLGSEIQVTKGALTAALRSAWGLNRILSPDGANSKNRVDHRHHAIDALVVALTSPSLLQSVSRLTADHINRAGRIRLTLPPPWNSFFDDAQIMISRIIVSHAASHKLSGALHEETAYGFIPGEGVYVTRKPLDGSISEAQIEAIRDPVVKALVQKRFEECGKDSKKAFGDPMRPLIHGDGRTVIRRVRIQERFSAEGVLSIKDSSGAPYKYYPLGNNHHIEIFRYPARGEYKARVVTTLEAARRARQSKTSIVNRELDDGAEFVMSLCPNDIVEYNDSRLGRNLFRVQKLSLGQRFQIALRLIHVSGTEKGWENGQVLIQSKKNLAGLKKVAVGVLGEVMPGDD

SEQ ID NO: 7777 - protein, 1104 aa, synthetic construct
  REGION 1..1104: note = Synthetic
MTNYALGLDMGTSSIGWATIALADDGEPLGLLDWSARIFPSGREDKTNEPLAAARRMAHGISRRTDRIKMRRRNLLKQMVKYGLMPADVTQQKALEIIEPLKLRNQGVTQSLDIHSFGRALFHLQQRRGFQSNRKDSDEESKGAIASASNDLQGALTAQNITLGQFLYFRQQQGKTTRATKKFAGTKVEYDYYPTRSMVQNEFEKLWDTQKKHHPNILTQEAYDAIYKAIFYQRPLKAQPRGKCLFFNNEDRLPAAMPSAQRFRILKEIQNIRIKGTAHPANGTPLTPQQKQKLFDALCLQKEMKEEKIKSLLNIASQDSINLFAKGVREKLQGDETAAEMRREAGKEKEGSTKKPSKGRYGKDWDNLSLAQQDAIVGLLTDTIEKITEKGTKRLLNDEEIVSILIEEHGLSATQAEDVLNAKLNNNLLKYGATMVSKLLPLLESGMSEYEAITSLGYNHSMKFTGELLDELPYYGAIEDLRAHIVPMPNASDLMVKQYGRVSNPTVHVALNQLRKLINQLVARYGTHPTYINLEMVRELKKGQKEINEINKNININTSERKKITEEIEAHGQEATPHFIAKMKLWSELDAQPQNRTCVYTGRNICIADVLSERTEIEHILPRSRTLDDTAANKTLTFREINAAKGNATPYEFFSATKELFGKTISYDDVWERANSLKASKKWRFSKDAMEVFESKAKKIILGGSLDGNVNTELENVAARHLVDTSYIAKFAKKYVAYSCKKGENGVMATPGTLTGLLRKAWGLNHLIAQTNEKDRSDHRHHAVDALVIALTTRSMVKRVADASKRSEVKGVSLVKEILPPWDNFALPALKARCDEIIISHKPDHGSPAQGFGTTGQLHKDTAYGLTKIAPQKKGYGVFVTRWTADSFKKVKDLEDIRDIRLRETIKSYISRSLGDCPIENVSDKEVARLVAQYMLEKGIKGIRCLEERPLEVMIPIQHQQTKEAYKYFVGGSNHCAEIYMTSTGKLAGKWQIEIISTFNANQKGFVPKWRKEFPDAHLVMRLHGNDMVAYDDGNGKSVICRVRKISADGRVFIVPHATTSPTRIDKETIGRSPSVYQQMNLRKVSVRIDGVVFDPQNPTSKEV

SEQ ID NO: 7778 - protein, 1168 aa, synthetic construct
  REGION 1..1168: note = Synthetic
VARPAFRAPRREHVNGWTPDPHRISKPFFILVSWHLLSRVVIDSSSGCFPGTSRDHTDKFAEWECAVQPYRLSFDLGTNSIGWGLLNLDRQGKPREIRALGSRIFSDGRDPQDKASLAVARRLARQMRRRRDRYLTRRTRLMGALVRFGLMPADPAARKRLEVAVDPYLARERATRERLEPFEIGRALFHLNQRRGYKPVRTATKPDEEAGKVKEAVERLEAAIAAAGAPTLGAWFAWRKTRGETLRARLAGKGKEAAYPFYPARRMLEAEFDTLWAEQARHHPDLLTAEAREILRHRIFHQRPLKPPPVGRCTLYPDDGRAPRALPSAQRLRLFQELASLRVIHLDLSERPLTPAERDRIVAFVQGRPPKAGRKPGKVQKSVPFEKLRGLLELPPGTGFSLESDKRPELLGDETGARIAPAFGPGWTALPLEEQDALVELLLTEAEPERAIAALTARWALDEATAAKLAGATLPDFHGRYGRRAVAELLPVLERETRGDPDGRVRPIRLDEAVKLLRGGKDHSDFSREGALLDALPYYGAVLERHVAFGTGNPADPEEKRVGRVANPTVHIALNQLRHLVNAILARHGRPEEIVIELARDLKRSAEDRRREDKRQADNQKRNEERKRLILSLGERPTPRNLLKLRLWEEQGPVENRRCPYSGETISMRMLLSEQVDIDHILPFSVSLDDSAANKVVCLREANRIKRNRSPWEAFGHDSERWAGILARAEALPKNKRWRFAPDALEKLEGEGGLRARHLNDTRHLSRLAVEYLRCVCPKVRVSPGRLTALLRRRWGIDAILAEADGPPPEVPAETLDPSPAEKNRADHRHHALDAVVIGCIDRSMVQRVQLAAASAEREAAAREDNIRRVLEGFKEEPWDGFRAELERRARTIVVSHRPEHGIGGALHKETAYGPVDPPEEGFNLVVRKPIDGLSKDEINSVRDPRLRRALIDRLAIRRRDANDPATALAKAAEDLAAQPASRGIRRVRVLKKESNPIRVEHGGNPSGPRSGGPFHKLLLAGEVHHVDVALRADGRRWVGHWVTLFEAHGGRGADGAAAPPRLGDGERFLMRLHKGDCLKLEHKGRVRVMQVVKLEPSSNSVVVVEPHQVKTDRSKHVKISCDQLRARGARRVTVDPLGRVRVHAPGARVGIGGDAGRTAMEPAEDIS

SEQ ID NO: 7779 - protein, 1079 aa, synthetic construct
  REGION 1..1079: note = Synthetic
MQPYRLSLDLGTASLGWCVLDLDHDGRPKGIRRMGVRIFTDGRNPQDKTSLAVARRIARQMRRRRDRTLVRRARLMAGLIRFGLMPGDRAARKALERLDPYELRARGLTERLEPQEIGRALFHINQRRGFKAMRGTGDEEEAGKIRSGIDRLDMQMAEAGTPTLGAFFAWLRANGRSVRARLVGRGAKAEYPFYPARQMLEAEFDALWAAQARHHPDLLTEEVRTTLRQRIFHQRPLKPPQVGKCSLIPEDERAPRALPSAQRFRLYTELANLRIIMPDRSERPLTMEERDLILRAARAKPARKAIGFKDIRKVLKLGSDVGFSHESTRRPELATDETSAVLADKKRFGPRWARLTLAEQDEVVERLLSETDDGALIDWLVARWDLEPDAAARVADARLPDFHLRVGRKALAALLPVLESESRPQLSDQRPIRYDEAVPVAFPGAHHSDRRPGERLERLPYYAKALERHVAFGTGNPGDPEEKRLGRLANPTVHIGLNQVRTVVNALIDRYGQPQEIVVELAREVKQTQEKRRQKEKEQAENQRRNEERKALLRSVNAPVNGRNLMKLRLWEEQGAGVNRRCPYTGETIGLEMLLSEKVDIDHILPFSRTLDDSAANKIVCLAAANRDKRNLTPYERWHGDEARWSRILGCVEDLPPNKRWRFAEGAMNRWGEEKEFLARQITDTQYLARLAREYLRHVCHPDRVRVSPGRLTAMLRRRWGVDSILRDHNREGGEAPVDATFAKNRDNHLHHALDAAVIGCIDQGMVQRLAQAASRAEDLGLDRLMDDIDDPWDGFRDELAARARGVTVSHKPEHGTGGRLHEDTAYGPTLEAERALGFNLVYRKPLDGLTEKEVARIRAPDLRKAMQERVAFHRNGPDRLDAKQAVAKAAEDLAATEPWVGIRRVRLLAKEADPIWLAGPDGEPYKGLIAGDVHHIDIVALPDGRWAGRAATLFEARRTALPDGRAAPYVPADGERFVMRLHKGDLVRLDHDGRLRIMRVARLEPANNRLRMVEHVDAGELDKRHADPDDPFRWLIVAFDKLRTRRARRVTVDPLGRVRDPGFPKWAAMPISGEAEPA

SEQ ID NO: 7780 - protein, 1077 aa, synthetic construct
  REGION 1..1077: note = Synthetic
MQPYRLSLDLGTNSLGWCVLELDHDGQPKGIRRMGVRIFPDGRNPQDKSSLAVARRIARQMRRRRDRTLVRRDRLMAALIRFGLMPADRAARKALETLDPLALRARGVTERLEANEIGRALFHINQRRGFKAMRGTGDEEEAGKIRTAIDKLEVQMEEAGAPTLGAFFDWLRANGRSVRARMVGRGAKAEYPFYPARPMLEEEFDKLWAAQAYHHPNLLTEEARTTLRHRIFHQRPLKPPAVGKCSLFPDDPRAPRALPSAQRFRLYTELANLRIIAPDRSERPLTIEERDLILRAAKAKPTRKAITFKDIRKVLKLGSDVEFSHESTRRPELATDETSALLSDKKRFGPRWAKLTLAEQDEVVERLLSETDEGALIDWLAARWELEPEAAARVADTPLPDFHLRIGRKALAALLPVLEREAREGRPIRYDEAVPVAIPGAHHSDRRPGEQLYTLPYYGAVLERHVAFGTGDPKHLDEKRLGRLANPTVHIGLNQVRLVINELIERYGRPQEIVVELARPLKQSHEARRRAEKEQAGNQKKNDDRKALLRSVNAPVNGRNLMKLRLWEEQGSGVNRRCPYTGETIGLELLLSEKVDIDHILPFSRSLDDSAANKVVCLTAANREKSNKTPWEAFAGDEGRWSQILGCVEDLPPNKRWRFAENAMNRWDEEGGFLARQITDTQYLARLAREYLRHVCHPDRVRVSPGRLTALLRRRWGVDSILRDHNREGGDPPMDATFAKNRDDHRHHALDAAVIGCIDQGMVQKVAQAASRAEDTGLDRLMDDLDEPWKGFRDELAARVRGLTVSHKPEHGTGGRLHEDTAYGPTTEKEREKGFNLVYRKPLDGLTEKEIARIRDPDLCRAMQERVAFHRNGPDRLDVKQAVAKAAEDLAATAPWIGIRRARLLAKEADPIWLKGPDGEPYKGLIAGDVHHIDIVALSDGRWTGRAATLFEAHRTALPDGRAAPYVPAEGERFVMRLHKGDLVKLKHDGRLRIMRVARLEPANNRVRMAENFEAGELDKRHADPDDPFRWLIIAFSVLRQREARRVTVDPLGRVCDPGFPKWATTPAAPSDLEAAS

SEQ ID NO: 7781 - protein, 1075 aa, synthetic construct
  REGION 1..1075: note = Synthetic
MQPYRLSLDLGTNSLGWCVLDLDHDGQPRGVRRLGVRIFTDGRNPQDKSSLAVARRLARQMRRRRDRTVVRRTRLMAALIRFGLMPADRAARKALERLDPLALRARGVDERLDPHEIGRALFHINRRRGFKSVRGTGDPEEAGKIRPAIGRLEARMADTGAPTLGAFFAWLRANGHSVRARPVGRGARAEFPFYPARPMLEAEFDALWAAQAPHHPGLLTEEARATLRRRIFHQRPLKPPPVGKCSLIPEDRRAPRALPSAQRFRLLSELANLRIIAPDRSERPLSMEERDAILRAARAKPAKKAISFKDIRKVLKLGSEVEFSHESARRPELATDETAAVLSDKRRFGPRWARLTPAEQDEIVERLLSEPEEGALIDWLIARPGLEPEAAARVADAPLPDFHMSIGRRALAALLPVMETHAVDGRPIRYDEAVPVAFPGLHHSDRRPGGRLNALPYYGAVLDRHVAFGTGDPKDPVEKRLGRLANPTVHIGLNQVRTVVNALIDRYGRPQEIVVELARPLKQTAEARRKADKEQADNQKKNEARKELLRRAGASVNGRNLMKLRLWEEQGSGVARRCPYTGRTIGLELLLSEKVDIDHILPFSQSLDDSAANKVVCLTEANREKRNRTPYDAFHHDPARWAVILGCVEDLPPNKRWRFAADAMQRWDADGGFLARQITDTQYLARLAREYLRHVCHPDRVRVSPGRLTALLRRRWGIDSILRDHNRDGGEAPADGAVIKNRNNHLHHALDAAVIGCIDQGLVQRVAQAAQRAEDQGLDRLMDDLDPPWPGFRDELAARVRAVTVSHKPEHGTGGRLHEDTAYGPTTESERAEGFNLVFRKPLDGLSEREVARIRDPLLRRAMQDRVAFHRAGPERLDVKQAVIRAAEDLAATEPWVGVRHVRLLTKEAAPIWLAGPDGEPYKGLIAGDVHHIDVVALPDGRWAGRAVTLFDARRTALPDGRAAPCVPAPGERFVMRLHKGDLMKLEHDGRERIMRVARLEPANNRLRMAEHSEAGELDKRHADPDDPFRWLIISFDVLRRRRARRVTADPLGRVRDPGFPKWAVEPGPDGEAVA

SEQ ID NO: 7782 - protein, 797 aa, synthetic construct
  REGION 1..797: note = Synthetic
MAADRRAARYHSARRACQADKEGHWLQGHPQGAEARLRRRVLHESTRRPELATDETSAVLADKKRFGLRWARLTLAEQDEVVERLLSETDEGALIDWLVARWDLEPDAAARVADAPLPDFHLRVGRKALAALLPVLETESRDGRPIRYDEAVPVAFPGAHHSDRRPGERFDRLPYYAKALERHVAFGTGEPDDPEEKRLGRLTNPTVHIGLNQVRTVVNALIERYGPPYEIVVELARPLKQSQEARRRNEKEQAENQRKNEERKALLRSVNAPVNGRNLMKLRLWEEQGTGVNRRCPYTGETIGLELLLSDKVDIDHILPFSRTLDDSAANKVVCLTAANRDKRNLTPYERWHGDEVRWSRILGCVEDLPPNKRWRFSEGAMNRWDEEGGFLARQITDTQYLARLAREYLRHVCNPDRVRVSPGRLTALLRRRWGIDSILRDHNREGGDVPVDATFAKNRDNHLHHALDAAVIGCIDQGMVQKVAQAASRAEDLGLDRLMDDIDDPWDGFRDELAVRVRGVTVSHKPEHGTGGRLHEDTAYGPTTEAERAKGFNLVYRKPLDGLTEGEVKAIRAPELRKKVQERLDGCRAAGMDHKQAMLRVAAELSSHEGPWKGIRHVRILKKEASPIWLPDADGRIYKGLIAGDIHHVDIIARDDGRWIGRAVTLFDARRTALPDGRAAPCAPGESERFVMRLHKGDAVALTQDGRRRVMKVHILEPSQNRLRLAEHQEAGSLQKRHDDNDDLFRWLIVTYDGLRERGARRVTVSPMGEVNDPGFPRWATRDAISPRRRNKADAS

SEQ ID NO: 7783 - protein, 1090 aa, synthetic construct
  REGION 1..1090: note = Synthetic
LSIDLGTNSIGWCALNLGHDGPDHAGSPREIRALGSRIFSDGRDPQDKSSLAVARRVARQMRRRRDRYLVRRARLMKALVRFGLMPAAPGERKALEVGTDPYDLRERGLRERLEPFEIGRALFHLNQRRGFKPVRTATRKDEEAGKVKAAVEKLDEAMRAAATPTLGAWFAWRRKRGETIRARLTGKGKDAGYPFYPARRMLEEEFAALWSAQAPHHPALLTDAARQALHDRIFHQRPLKPVPVGKCTLYPEDERAPRALPSVQRLRLLQELANLRITALDLSERPLTMAERDRVVATVLGRTAKPARKPGRILDALSFDKLRALLDQPPGTRFSLESDKRPKLLGDETGARIAAVWGPGWGRLPLAEQDAVVELLLDEPDPTAAIDALTGRWGLDAAAARTLAEDTTLPDYHAAYGRRAVAELLPVMEAESRMDAGGRVRPIRLDEAVKALRGGKDHSDFSSDEALLDRLPYYGRVLERHVAFGTGDPNDPEERRVGRLANPTVHIALNQLRHLVNAVLERYGRPKDIVIELARDLKQSALDRRREEKRQADNQRRNEERKRRIQEVGERPTPRNLLKMRLWEEQVQNGVHFCPYTGQTIGIRLLLSHAVDIDHILPFSVSLDDSAGNKLVCLREANRVKRNQTPWDAFHTDDHVSRGILPWAEILARAESLPRNKRWRFAGDALEKLRQDGGFLARHLNDTRHLSRLAHEYLRRICDDVRVSPGRLTALLRRRWGVDPILDPDRPPPDEGGDAPARKNRQDHRHHALDAVVIGCIDQGMVQRVQTEAARAERDSDAQAEGISRVLKEFADPWPGFRKELKARAATITVSHRPEHGVTGALHKETAYGPVAPAEDGCNLVARKPILGLTKGDVEGVRDVRLRRYLLDRIELRKRDANDFAGQLAKAVEDAAAHPHWAGLRRVRILKKESSPIPIAHGNGRFLKLVLAGDVHHLDIMLRADGRRWVPRWATLFDTHRTRTPDGRAAPPAPAAGERFVMRLHKGDCLKLDHQGRSRIMQVIILEPSTNSVVLIEPHQAKNDRSLHVKVSCDQLRARGARRVTVDLLGRVRVHAHGAPVGIGPASRGREGDP

SEQ ID NO: 7784 - protein, 1418 aa, synthetic construct
  REGION 1..1418: note = Synthetic
MKKFLGLDIGTNSVGWAFIESSPEEKKGKIVAAGSRIIPMQGRDKDFEQGKSVSAAADRRMARMTRRIKHRYKLRRTRLIRVFKKLGWVPENFPENFKKHSAENGPFDINYYTPFEESTIKELNSVFGTGIVPSDWAVYFLRDKGQREQLTIRELTRVIYHFNQRRGFKSSRKDPREAKEDDPEKFPKRKTETLNLKVLSLRQTQSRKESTYELSASSADKGEITGSISLKTMPDWKEKYVTFEVTTQINKDGTQKISFKLPDPTEWQKRKEALQKEINDSGLYPGQFHLQKLLEDRDYRIKDRIIERDLYIKELRALWEKQSEFYPRLKDKEIMAEIALVLYPSNAAKQKEIRHNDLLHAIMNDVIYYQRPLKSQKHLVGECRYEKKNIILPDGRQPGVKCAPKSSPEFQEFRIWQDINSVRIYRNETRLPNGKIIYDTEVTGQLVNKEVKSKLFMIFDSSAAVNQNDILKLLFPGRGNQEKDNHRWNYPEEKEFKGNELKSLLRKAFRRAGFSEEGEKIIADPDKLYLLWHILYSLDDDKAVRNALISNFGIPENTAENLSYTVIPTALQGYASYSSKALKKLLPLLRCGEFWKNSSIHSETLENIGRFLNEGSAPNNRLEAITILKDAGLKSVEDFSGLPPHIAAYTVYGFHSERLNENKYSSPDEIKTLQRGELRNPIVEKIVNESLLVTRDIWKKFGRPDEIHIELARELKKNNKQREEIYKQNQESEKNKDRIRKILSLLKGANPDSPADIDKLRLWEETADYETRTEMPKFSKEPAKNEIEKYMLWGEQNHLSPYTGRPIPLSKLFTSAYQVEHILPKARYFDDSAANKTICEAAVNRFKDKRTAMEMIFESGGGEIKFQGEKFTLLSPEAYGDHIKRIFRGKKQKYLLMDEIPEGFIERQLNDTRYITKKLGELLFPVSREDIVFTGGQITSHLRNEWGLSGVWKEILRPRFERLERMTGRKFIENDPVTRELRFLADYKRVDHRHHALDAIVCAATTRGHIQYLNTLNAMQGDAAKSFRYRYILGGGRKRFALPWDSFTKDTLDACRGIIVSFRNKSRLVSKGFNIYRKWVNDNGTLKNVFVKQNNEKLFSVRVSMFKEPFGISLLREKETVKLHRALQIQLEYIRNGRRPADTRILNREVRERADELLKNCFYDWETAKEHLKKNPFTGKDGSPLEKADIIKFSEKASKRTKLGADTTDKTLSEKFPHSDHSKLAEALRAHLGSFGGDPKTAFSEEGLSVFASSWGSRVNQITVTEEIGKKILLHGKYFETDKGGNLFYALYENTETGERKGETLSILDTIDRLKKGLPPAPQIEGWTLTILSPNDLVILPDGGKSPDNVYRVVKFTKKEIHFKPHYISARLEKSELGSNDCAEKSWDLKGDSVWSQRTIVKTCSKINVDRLGFITES

SEQ ID NO: 7785 - protein, 1012 aa, synthetic construct
  REGION 1..1012: note = Synthetic
MVERILGLDVGIASVGWALIDYDKENLQNNQIIKSGVRIFTIAENPKTGESLALPRRLTRGARRTNKRKKQRIKAIKNLFVDYLNLSRDNLFSEDNIFNTKALIDVWQLRDKALKRKLTNVEFARVLTHISKRRGYKSNRKVEEQANSDGKKVLSAIEENKKLLGKYLTIGQAIYHTTNNDTDKQTRRNKKDNYNHSVSRDILHDEVNIIFEKQLGFDNNFANDEFKKKYKELFVRQRDVASVDHMVGTCTLEGSNEKRAAKRAYSSEEFVTLTKLINTKLINEDEEERYFTKDELEKLINLCKQSEQPSYKKMRESIHLEENYKFKLLDYLKLDEKKQTGEFINPEKEKFKSGFIGFHKLKKVVEKSLSKIHWQNISNDKSLLNDIATIFSYHKSDDSIQQELEKLNFKSFSKEEKEKLINALILNINFDKFLHLSIKAIDKLLPLMRDGKRYDEAVKEIGYKKIAGTKEKFLRALNSDENKELTNPVVKRAIAQTRKVINALIRKYGQFDKVHIELTREIKKSHQDRNKIKKGQDEFQKVKQGIVDKFIEDYGRKPKGNELLKFRLAKEQYYKCSYRCIYSMKPISEKDLLTQGVVEIDHILPFSKSLEDGMYNKVLCLTKENQDKVNRTPYEYFTQTNKNWHKFENFVKSLHLGKAKTTRLLKKNFDKNSVFDKNSVEEFRERNINDTAYMAVYIKDFIENNLELKSNVISINGTLTNMLRHNWGIGNKSRDNHLHHAVDAIIIAFATDSEVQRLSTLSAKINEFQFTKSEKKADKLKFIPPVEKFRDEVQTSIDDIFVSFAPRRGVTGEAHEQTIFSPKDLKANKKQEKPSYLTGGSTIRNVTLNNNSKIAKQSSMPRIDIFKNKNTNKFYVVPIYTVDFINESLPNKAIVSGKNKDGSLKQWLEMDDKYEFLFSVFKNECIEIKTKKEIIIGYFVSAHSGTGALEIKNHNNIENDIFKRDSSNVCIKSTGIQNAIYIKKYQVDPLGNKNEIKKEPRIGTKKQNKKDK

SEQ ID NO: 7786 - protein, 980 aa, synthetic construct
  SITE 840: note = misc_feature - Xaa can be any naturally occurring amino acid
  REGION 1..980: note = Synthetic
MGQRILGLDIGIASVGWAVINYDKVDATQNKIIKSGVRIFTQAEHPKDGSSLAMPRRLARGARRTLKRKRQRMKAIKRLFINTLSLSHKDLFLGEIDETIYSKQGRLDVWELRAESISRVLTAEELARVLTHMAKRRGYRSNRKVDENGDSEGKKVLGAIENNLSLLEKYETIGQAIYETTKETGIRRNKQDDYLHSISREMLLDEVNVVFNKQQAFKNILATDELRNTYIEIAFSQRDFASVDGMVGKCTFEKEELRAAKRTYSAEAFVTLTKLINTKVVLEDGTERGLNKDELEKIILLCKQSEKPSYIKIKDIIGLESTSSFKNIEDYETDKVSGEFLKKTRKFVSAFKGYHELRRVVEKVLSKTHWHNLSQDSKLLDEIGTIFSIHKSDDKIKEALDSLTFSMFTENEINVVKEALIGSISFDQFIYLSLKALDKLLPYMRDGKRYDEAVTLVGYKKESGIQEKFLRALNKEEQSELTNSVVKRAIAQTRKVINALIREYGQFDKVHIELTREIKKSHKDRNEIKKGQEKYQKFKEEVVQDFIKLFDREPKGAELLKFRLWKEQDGYCAYSGYIGEKAYIKPEKLMADVKYAEIDHILPYSRSLDDGLNNKVLCLAKENQDKQNMTPFEYFESIGRDWYTYEVHVKAMKGIKRVKRQRLLKKNFDENSENEFRERNIRDTAYMARYIKGFIEDNLELTSSGKKKVISINGTLTNMLRHNWGVGNKSRDTHLHHAVDAIIIAFATDSEVQRLSTLSAKRAGFVYEKSEDKSKRFRFTPPIDDFRDKVQKSIEEIFVSNAPRRKVTGAAHKETIRSKRLEKVKGTFEVNEGLAENGEXKRVDIFTKENKYHFVYLYVADFEKEELPNITIKNIEVDKSFEFLFSIFKDELIEIKQKGKDAIQGYMKFSLSDGRFAISHHLDSKFNATKNRFSTGSLEYLKKYQVDALGNIQEVKKESRVSTKKILKKEKEKTLKKKKK

SEQ ID NO: 7787 - protein, 960 aa, synthetic construct
  REGION 1..960: note = Synthetic
MSERILGLDIGISSLGWAIIDYDKNNSLNNKIIKSGVRIFTIAENPKTGESLALPRRNARASRRTIKRKKQRIKGIKNLLVKYLDFSKDEIFSPKNIFNEKKQKDVWQLRDKSLKRELTNKEFARVLMQIAKRRGYKSNRKVEENGNSEGKKVLSSIEKNKKLLNNYLTIGQAIYQTTKETRTRRNKKDDYNHSISRDMLVDEINIIFEKQKEFKNPFASDNLKQEYLELFLKQRDFASVDKMVGFCTLEGKPNKRAAKASYSAELFVTLTKLINTKIIDNNHKERSLTKEELEKIILLCHQSEQPTYLKIKEIICLDESSHFKNVSFYEIDKKTGEVSKKTTKFISAFKGFHSLRKVIEKTFSKTHWQNISQDKKLLNDIATIFSHHKSDEKINNELQKLEIKILNESEKQILIKALIENIHFDKFLNLSIKAIDKLLKYMLLGKRYDEAVDLCKYKKVEGTKQKFLRALNKDEQFELTNPVVKRALSQTRKVVNALIRVYGQFDKINIELTREIKKSHSDRKKIEKAQDEYQTLKQGIVKNFIENFGKEPRGNELLKYRLWQEQGERCIYSGKEIDIKRLISEVNYAQIDHILPFSRSLEDGMINKVICLSKENQDKKNRTPYEYFTHENKDWHWFEEFVKSLKNIKKGKRDRLLKKNFDENSEIAFRDRNANDTAFMSRFIKDFIENNLELKSKDKQKVFTRSGTLTNMLRHNWGIGNKSRDNHLHHAVDALIVAFSTQSEVKRLSTLSAKIDGFTYEKSEKKAGQLKFVPPKEHFRDEVQKSIDDIFVSFAPRRGVKGAAHKETIYSKKAEKKKGTFEINNGLAENGEVKRVDIFKKDGKYHFIFLYPSDFLKKELPLLTIKGIEIDDSFEFIFSLFKDEYIEIKQKNKEPHYGYLKFVESDGRFNVLPHSQSQLNKKDNRISTGSVEYIKKYQVDVLGNTFEIKSEKRIGTKKQR

SEQ ID NO: 7788 - protein, 981 aa, synthetic construct
  REGION 1..981: note = Synthetic
MVQRILGLDIGISSIGWAVINYDKEDATQNKIIKSGVRIFTQAENPKDGKSLAEPRRLARAARRTLKRKRQRMKAIKKLLMETLLLPHKDLFIGDIDETIYSKKERTDIWQLRSEVVKRALNAEEFARILTHIAKRRGYKSNRKVDEKGDSEGKKVLGAIENNQNLLTKYETIGQAIYETTKDTGIRRNKKDDYLHSVSREMLLDEVNKIFEKQQLFQNTMATDKLKDDFITIAFSQRDFASVDGMVGKCTFEKNEPRIAKRTYSAEEFVTLTKLINTKVVLEDGSERGFTKEELETIILLCKQSERPSYIKIKEAIGLEKTSVLKNIEDYEIDKETGEFLKNKTTKFVSAFKGFHELRKVVEKTLSKTHWHNISQDTKLLDELGTIFSIHKSDKKISETLDTLNFGMLSDDETIKLKEALIASISFDQFIYLSLKALDKLLPYMREGKRYDEAVSLAGYKKETGTKQKFLRALNKQEQDQLTNPVVKRAIAQTRKVINALIREYGQFDSVHIELTREIKKSHKDRNEIKKGQEKYRLYKEETVEDFIKLFSREPKGAELLKFRLWKDQDGYCAYSGFMGEKAYIKPEKLIDDVKYAEIDHILPYSRSLDDSMNNKVLCLAKENQDKKNMTPFEYFENIGRDWNSYEVYVKNMKNIRKAKRDRLLKKNFDENSEKEFRERNIRDTAYMARYIKNFIEENLELRSIGKKKVVTINGTLTNMLRHNWGVGNKSRDTHLHHAVDAILIAFATDSEVQRLSTLSAKNEGFNYTSSEAKSKKFRFSPPMENFRDEVQKSIDEIFVSNAPRRKVTGAAHKETIRSKKLEKVKGSFEVNGGLAENGEVKRVDVFKKDDKYHFIYLYTADFEKEKLPNTTIKNVDIDDAFTFQFAIFKDELIEIKQKNKDAFRGYFKFSESDGRFNMQFHTDSEYDKKTGRFSTGSLEYIKKYQVDVLGNIQEVKKETRVATKKVLKKNKHNSIKNKTR

SEQ ID NO: 7789 - protein, 1009 aa, synthetic construct
  REGION 1..1009: note = Synthetic
VSYLLGLDLGSNSIGWACIDPAEEKVIAVGSRVFQEGVNRDKGKEVSKNETRRIARQSRRQYFRRADRKQKLKAILQQAGMFPTAPPEVSEFLNNQKIYDPYALRKKGLDEKLSKLEFGRALYHLNQRRGFKSSRKSGDSKEDGVVAQATTQLQDKIDSSGCRTLGEYFSGLDPMSTPIRGHYTLRKMYEQEFDLLWEKQATFHPELNDTLKEEVKDQTIFYQRPLKSVAHLIGKCSLEPQKRRCAKHAFEAQSYRILEQVNRLEFIDDDGVVYKFSRAIDENFTENIQELRDKLIEALQNKKEIKFEGKKGIKALLGFSPTTTCNLEKTDKKLIGDRTSHQLRSFFKKKWDSFSQEEREKIHQVIAQAQDPEWLEAYAVKNWELAGEVAAKLGKANLEPGYFNYSSKAIKKLIPFLQEGFSLADAKEKAGYVENPETRSIEERLQNLRNPIVSHALYELLRLHRIIVKEFGEPEKIQIELARELKLPASRRREIHFKNQELREINDNAREEILKMGHRPTGDALLRYKLWDECGQTCPYTGRKISQSKLFNDNEFQIEHIIPYSRSLDDSYMNKTLCCTKENAKKLNQTPYEFYNGNPEYDKVIKRIKNLPYAKQKKFKQKEIDDDFVARQLNDTSYISREARGLFQQMGYTVLVAKGTATSELRYLWGLNTVLRDTNQNMKNREDHRHHAIDAAVVAMTATAPLRKLSQYNKYRREATRKAFPQPWDSFRSDVELAVGNVLVSHQVHKRARGKLHEESIFSALSKNDDKGIPMFAIRKSLTKLDSFSQIRQIADPAVKNIIVRHLNNQGVDVENGTGRLPSNCFRDAELFLDSSAGKRIPIKKVRLHRPSKHMILLPKHNNKAGVEPGSNHHIILYRCQDSNGNWRQKGKVCTLFEATRRVKAGLPLIDKKLEGGQEFICSLAINEMVLFGAAEVDIDWEIPDHKLLTPNLYRVQKISDSITLRHHLVSVLKNEEGEEVGRVIKTPGSFDGIKCYVDRLGNICRAND

SEQ ID NO: 7790 - protein, 1131 aa, synthetic construct
  REGION 1..1131: note = Synthetic
VKAGRCRHIGICQVPILQVCPVPGLDLAGQKTVCGRCISPCSTAHAKVAPAGWENVMTTTLGIDLGTSSLGWCLIEDEHRILDLGVIIFSAAAGAGRDPQSGAPLAEARREARSARRRRDRFIGRRSALLDKLIALGLLPGDPPAGHGRRRNQALPNAETKALADTDPHVLRRRALSEPLSPHEIGRAIFHLNTRRGFKSNRKADRGRNEPETGKIATAGQALDAALGKRTLGQFLADRIDAGQPARVRMGGENQAYDFYPQRSHLEAEFAAIWEAQEHHHPELLTDTARTAIHRILFFQRPLKTPEVGFCTFAGMSGVPHDERRLPKAHPLFQERRLYEEVNNLKVVAAGAAARDLTLDERDRLILKLRDNKKVTFATLAKKVLKLAEGERFNKESEARKDLAGDEVRAEMADKKRFGNRWTHFPLERQLQIIDRVQNEENPDILLAWLQSDCGLDKAAAVAVARTNLPEGHGRFGETATRRLIAALKAEVVTYDKAALAAGFHHSDHRTGEVYDLLPYYGEVLTREIAPGKAEYGDPLERQYGKVTNPTVHIGLRQLQKLVNAVIARHGRPDRIVIELARELKLNDKQKDEHQRRIRRDTEAAIRRGEKLVEAGIADTGANRALMRQWEELNPSNPLDRRCPYCGEPIGMAQIFNSLADIDHIIPYSRSLDDSPANKVLVHRNCNRQKGNKTPWDRWHEDEAKWEIISAQVARMHPSKQWRFGPDAMERLERDGGFAARQLTDTQYLARIADKYLRGLYPTADEGRVDVIPGRMTAMLRRVWGLNSLLPDHNFVENEHSSAPKNRLDHRHHAIDATVAAVTSLSRMQQIAAAAARSEEKELERLFDDLPHPWDGFREDLGACLARTVATHKPDHGRSAKPSRHRDVTAGKLHNDTAYGLTGLKTTDGKTPIVVHRVLLASLKPTQIADPDCIPDETLRNALWLATRDCSGKAFDQALARFAKEHPVFKGIRRVRIREPLNVIPIHDREGKPYKSYAGASNDRYNVWRMPDASWRHDVVSTFNAHRSDYRDLRPHPAAKKVLSLRQNDMIAVERNGGLREIMRVVKFNQAGRLTLCPPNEGGKLQNRDAAPNDADPFKYTYLSPSSLKNAKARQVRIDPLGRVFDPGPRE

SEQ ID NO: 7791 - protein, 1092 aa, synthetic construct
  REGION 1..1092: note = Synthetic
MDWFGFAGGPIWSLDGRMLAQAPDRQGGNTMATRLGLDIGTNSIGWCLFLLDEHGNPKGIQDIGVRIFSDGRDPKSGASLAVDRRNARAMRRRRDRYVRRRSALLQALVDTGLMPTDAQDAKALVGCDPYALRAAALDEALNPHQLGRALFHLNQRRGFKSNRKAERKAGDDKEGGKIASGAKALDQAMHDAGARTYGEFLAGRDAKRVRIRTDGDGYDFYPERRHLEAEFDAIWAAQATHHPALLTDAVRDRLRRIIFFQRPLKAPKVGNCTFFHEEERLPKAHPLFQERRLYEEVNQLEITKAGAPSRKLSLDQRDKIILKLKSAKTTSFSGLAKLLKLADDESFNKASENRTGLVGDEIFASFSDKKCFGDRWAHLEPGVQWSIVKAVAEEEDPVRLHDWLMSTHGVTVEQAEAIGRVRLPEGHGRLGETASRKILAELKKEVVTFDQAAKLGIDRKHSNFDTGEVLLHLPYYGEILSREIPPGTLNSDDIDEIRWGKITNPTVHIGLGQLRRLLNAIINVHGRPDQIVVELARELKLSEKDKAEHNKRIGANTRAAEARSRKLLESNQRDSGSNRALLKLWEDLNPNNPLDRCCPFCGRHIGQLALFSEETEIEHIIPYSRSFDDSVANKVIAHRSCNREKGNKTPWEAWGHTDQWAIIAEQVARLHKSKQWRFAPDAMKRFDQEGDFIARQLTDTQYLSRMARTYLSSLYPNNAGVYVIPGRMTAMLRRLWGLNELLPDHNYVENPHSGAPKNRLDHRHHAIDAAVVGVTTRGLLNEISKAAGRAEDQNLDKLFVDLPKPWASFREDLRDSLARVVVSHKADHGRKGVPAKSRDATAARLHNDTAYGLTGLTSDSGLPIVVHRVPLLSLKPADLTDPIRIPDAALQRALWEATEGKSGKEFEAALVRFSKSDPVFKGIRHVRVREALKIIPIRDASGNAFKAYKGDANARYDVWRMPDGKWVSSWKDRDGKSHSGIVSMFDAHQSIQPEQRPHPAAKRVLSLRQNDLIAVEPQGQPRKIMRVVKFSGGGQITFAEHQEAGPLKARDATSPATDPFKYFYSSAGGLQKAKARQIRIDELGRIFDPGPR

SEQ ID NO: 7792 - protein, 1091 aa, synthetic construct
  REGION 1..1091: note = Synthetic
LLTAGSRFLSGHNTELPSQSQLPEHPPLATMPAGGRIMRRLGLDIGTNSIGWCLIEDGSRIVDVGARIFSDGRDPKSGASLAVDRRDARAMRRRRDRYLGRRTAFLNALIVHKFMPANADQAKLITERDPYDLRKRALNERLEPYEIGRALFHLNQRRGFKSNRKTDRKGKPGEEGKIASGAKALDQAIAKVGADTLGQFLANREAKRVRLDSENQEYDFYPQRRHIEYEFGRIWEEQAKHHPVLLTDTARAALHRILFFQRPLKEQEVGYCTFAGLSGVPADERRLAKAHPLFQQRRLYEEVNQLRIVSAGAADRPLTRDERDALILKLQDKKKVSFQSLAKVIGLHEDERFNKESENRKDLIGDEVRAELSDRKRFDTRWLHFGLDEQLRVLDRLQNDESPETLLAWLKAEYGLDDAAAETVANADLPEGYGRFGLTATRRLLDALRADVVTYDKAAEAAGFHHSDHRTGEVLDQLPYYGEILTREIAPGKEEYGDPLERRYGKITNPTVHIGLRQLEKLVNAVIAVHGRPDQIVVELARELKLNEKQKDEHKKRIKQETDAAIARGKKLASEGFLDTGANRMLLRLWEDLSPANPLDRRCPYCGQPIGIRQLFSGEADVDHIIPYSRSLDDSAGNKVVAHRSCNRAKGNKTPWERWGHDEDRWDTISAQVARLHKSKQWRFGPDALRRLEREGGFLARQLTDTQYLSRIAGKYLRSLYPTAQDGRVDVIPGRMTAMLRRLWGLNSLLPDHNYVENEHSNAPKNRLDHRHHAIDAAVAAVTTLDLMQEIAHAASRAEDKDLDRLFENLPQPWEGFREELGEKLARVTVSHKPDHGRKSRPSKDRDVTAGRLHNETAYGFTGEFAADRKTPIVVHRVPLMSLKPGDLTDPSRIPDETLRNALRAATHDLSGKDFEQALARFAQEHPVFKGVRRVRVREPLTVIPVRDRTGRAYKAYKGDSNARYDVWRLPNGKWVHDIVSMFDAHQPDAAERRPHPAAKKVLSLRQSDLLAVERHGGAIEILRVVKFSTNGSLALAAANEAGALKARDAAPADTDPFKYVYATGGSLKKMKARQVRIDPLGRVFDSGPRE

SEQ ID NO: 7793 - protein, 1087 aa, synthetic construct
  REGION 1..1087: note = Synthetic
LPTQHKKCKSFKGGWNMRRLGLDIGTNSIGWCLVEFDEEHTIGIRVLDIGVRIFSDGRDPKTGASLAVDRRTARAMRRRRDRYLRRRSVFLDTLIQYGLMPVDADEARLIAARDPYSIRARALTERLEPYAIGRALFHLNQRRGFLSNRKAERRSEDGKIANGAKALDQAMAEAKADTLGQFLAGRAEKRVRLNGESQGYDFYPQRRHIEYEFQRIWEEQTGYHPTLLTEEARAALHRVLFYQRPLKEPEVGVCLFAGRYGIARDERRLPKAHPLFQERRLYEEVNQLEITTPGEAPRKLTLDQRDKLILALRDKRKVSFASLAKTLKLQPGESFNKANETRTDLTGNEVRAVLGDKKRFGGDWHHKTPEAQWEIIERLIDEEDPETLHAYLTVTCGLDEVTADAVAKAPLPEGFGRLGEIATRRILEQLKTREINGAPITYSQAVEACGWHHSDDRTGEVLDRLPYYGELLSRDIPPGTFDPRDLEGGRREKKMERYWGKITNPTVHIGLRQLEKLINAIITVHGRPDQIVVELARELNLSEKDKDEHNRRIRKNTADAQARSRKLIEEGIDDTGTNRARLKLWEELSGNLVDRFCPYCGDSGKLIGFRALFSDEVDIDHIIPYSRSLDDSAANKVVAHRNCNRAKGNKTPYERWGSDPERWDRITAQVAHLRKSKQWRFGPEAMARFEKDGGFLARQLTDTQYLSRLAGKYLRSLYPTKEDGCVYVVPGRMTAMLRRKWGLNSLLPDHNYVENEHSNAPKNRLDHRHHAIDAAVVAVTTRATLQKIARAAGEAEDRDLDRLTVDIEQPWSGFREELGEKLLRVTVSHKADHGRKGRPSRHRDVTAGRLHNDTAYGLTGDVAADGKTPIVVHRVPLASLKPGDLTNPDRIPDRALRDALYEWTRDLTGKSFEAALQRFRDTHPVFGGIRRVRVREPLNVIPIRDASGRAYKAYKGDANARFELWQLPDGGLKTRVVTMFEAHQHKQDDRPHPAAKRLLTLRQNDLLAVERNGEPREILRVVGFNVRGRLTLAAAQEAGNLKERDGLSNDRDPFKYVYLSGRSIVKAKARQVRVDPLGRLFDPGPRT

SEQ ID NO: 7794 - protein, 1087 aa, synthetic construct
  REGION 1..1087: note = Synthetic
MFHYYNIKDRVMPTTLGIDLGTASLGWSLLDDDRRIIDLGVIIFSAAAGAGRDPQSGAPLAEGRREARSARRRRDRYIGRRSALLGKLIALGLLPGAPPPKDRDRRRNAPVVNDETRALAGLDPYDLRRRALSEPLAPHEIGRVIFALNTRRGFKSNRKADRGRNEADSGKIALAGQALNAALDGRTLGQFLAERIDAGQPARVRMGGENQAYDFYPQRDHLEDEFARIWEAQAAFNPALLTEAARAEIHRVLFFQRPLKEPVIGPCTFAGMNGVPQDEKRLARAHPLFQERRLYEEVNQLRVVSAGAAGRELTLDERNALIMALREKKKISFATLGGKVLKLAEGERFNKESETRKELTGDEVRAEMSDKKRFGNRWLHFPLERQLQILDRVQNEENPETLLSWLQAECGLDAAAAQAVAKANLPEGHGRFGETATRALIAALKAEVITYDKAAAVAGFHHSDHRSGEVFGTLPYYGQILTREIAPGKPEYGDDLERQFGKVTNPTVHIGLRQLQKLVNAVIARHGKPDRIVIELARELKLNDKQKKEHQDRIRKDTAAAQRRSEALIEADRPDTGANRALLKQWEELNPANMLDRRCPYCGEPIGMGQVFNGEVDIDHIIPYSISLDDSPSNKVLAHRACNRRKGNMTPWRRWGHIPEDWEKVSTQVARMHRSKQWRFGPDAEERMERDGGFAARQLTDTQYLARIAGKYLRALYPTAEDGRVDVIPGRMTAMLRRVWGLDSLLPDHNFVENKHSNAPKNRLDHRHHAIDAAVAAVTSLSLMQGIATAAARAEAQELDRIFEDLPQPWHGFREDLGERLARTVAMHKPDHGRSATPSRHRDVTAGKLHNDTAYGLTGLTTADGKTPIVVHRVPLTSLKPAQIADPASIPDEALRMALWLATRDCSGKAFDQALAKFAAEHPVFRGIRRVRLREPLNVIPIRAASGRIYKAYKGDANARYDVWRLPDGKWQADVVPMFDAHSRDTTDRRPHPAAKKVLSLKQGDVIAVERDSGAADLLLIKGFNQNGRLTLAAPNEAGTLKARDALANEIDPFKYVYLSPGSLKKARARQVRIDPLGRVFDPGPRE

SEQ ID NO: 7795 - protein, 1076 aa, synthetic construct
  REGION 1..1076: note = Synthetic
MDEGDIMRRLGLDIGTNSIGWCLIEDDARIVDIGARIFSDGRDPKSGASLAVDRRAARAMRRRRDRYIGRRSAFLDKLIHFGLMPADAEEAKLVAERDPYALRARALDEKLEPYDIGRALFHLNQRRGFLSNRKAERRTKDNEDGKIANGAKALDQAMAEAGADTLGQFLAGRHEKRVRLNGESQGYDFYPQRCHIDDEFGRIWEEQAKHNSGLMTGEARAALHRILFYQRPLKTQEVGVCLFAGRYGIARDERRLPKAHPLFQERRLYEEVNQLEITAPGEAPRKLTIDQRNALIAVLRDKKDVSFDKLARTLKLQPDESFNKASETRTSLRGDEVRAVLGDKKRFGKAWPHFSPQQQWIIIEKLMDEEDPYALDDFLIGKCGLDEDRAAQIAKAALPEGHGRLGETATRLILEKLKADVVTYSQAVEQCGWHHSDDRTGEVLDRLPYYGELLSRDIPPGSFDPADADQPEAYWGKITNPTVHIGLRQLEKLINAIIAVHGRPDQIVVELARDLKLNEKDKEEHNRRIRKDTADAQRRSRALLGLDADGNPIGDRIADDTGANRALLKLWEELNPGNPLDRRCPYCAEPISVHQLFTEADVDHVIPYSRSLDDSASNKVVAHRHCNRIKGNRTPFERWGHDEERWDRIAAQVARLHRSKQWRFGPDAMARVEKDGGFLARQLTDTQYLSRLAGKYLRSLYPTKDEGSVYVIPGRMTAMLRRLWGLNSLLPDHNYVENAHSGAPKNRLDHRHHAIDAAVIAVTTRGLLQRIARTAGQAEDRDLDRLFDGLDQPWDGFREELGEKLMRTIVSHKADHGRKGKPLPGRDVTSGQLHDDTAYGLTGAFGVDGKTPIVVKRVNFFSLEPKDIADPVRIRDETLRTALQEGTARLNGVAFQQALVRFANTHPLFRGIRRVRVLGERPGTPTLNVIPIKDRNGRAFKAYKGNANARFIVWQLPDGNWKHATVSVFSAHQRDYVLPRPHPAAKKMLDIRQNDLLAIEKDGAREIVRVVKFSEKGQVTLAAHNEGGALKARDAAANDIDPFKYVAPTAGGLRKLRARQVRIDPLGRVFDPGPRD

SEQ ID NO: 7796 - protein, 1074 aa, synthetic construct
  REGION 1..1074: note = Synthetic
MLRLGLDIGTNSIGWCVVEYDAEHHVGTRIVDIGVRIFGSSPQGAGRDPKSGASLAVDRRAARAMRRRRDRYLGRRSAFLDTLVRFGLMPADANEAKLVAERDPYDLRARALNERLEPWEIGRALFHLNQRRGFLSNRKAERRQKDGEDGKIASGAKALDQAMAAAGADTLGQFLAGQSEKRVRLDGESQDYDFYPQRRHIDYEFQRIWAEQAKYHPALLTEEARAALHRILFFQRPLKEPEVGVCTFVNTERRLPKAHPLFQERRLYEEVNQLEITTPGEVPRKLTLDQRDHLILMLRGKKEVLFSTLAGGKGLRLQPGESFNKASETRTALRGNEVYAALAHKDRFGAAGWANMTPERQWAIIEMLLSEENPDTLHAFLTGECGLTEDQARATAKTPLPEGYGRLGETATRLILEELKKEVITYDAAVRRAGWHHSDDRTGEILDRLPYYGELLTRDIPPGSQLASDPPEKRWGKITNPTVHIGLRQLEKLVNAVIAVHGRPDEIVVELARELNLSEKDKEEHNRRIRKTTAEAQARSRKLQEEGIEDTGANRAKLKLWQELAGNPVDRFCPYCGDAGKLIGFRALFSQEVDIDHIIPYSRSLDDSANNKVVAHRSCNRAKGNKTPYEKWGHSPERWEKISAQVAHLHRAKQWRFGPDAMERVARDGDFLARQLTDTQYLSRLARKYLLSLYAEKGEGSGHVYVIPGRMTAMLRRLWGLNSLLPDHNYVENEHSNAPKNRLDHRHHAIDATVTAVTTRSLLQLIARTAGEAEDKDLDRLFEGLEQPWEGFREQLGEALASVTVSHKPDHGRKGKPSRHRDVTAGRLHNDTAYGLTGEVAADGKTPIVVHRVPLTNLKPGDLTNPERIPDASLRDALYAATRDATGKEFEAALRRFRETHPVFHGIRRVRVREPLNVIPIRDKTGRAYKAYKGDANARYDVWCLPNGKWVTSWKDRGGCERSSIISMFDAHQSAEEPRPHPAARKVLSLRQNDLLAIERDGGAPEIVRVVKFSTNGSIALAPANEGGALKARDAAPDDPFHYIYSSGGGLKKLKARQIRIDPLGRIFDPGPRG

SEQ ID NO: 7797 - protein, 1071 aa, synthetic construct
  REGION 1..1071: note = Synthetic
MARELGIDIGTNSIGWCLIGDGRIVDIGVRIFGDGRDPKSRASLAVDRRVARAMRRRRDRYLGRRAAFLARLIEHGLMPGDLPDPSIRQRRGRQPVPNDAARALADLNPYDLRRRALTERLDPHEIGRALFALGQRRGFRSNRKADRRRKDNEDGKIATGAQALDSALDGRTLGAFLADRIAEGRPARVRMGGENQAYDFYPQRRHVEAEFEAIWQAQAAHHPGLMTEAARTALHRILFFQRPLKAVEVGYCTFAGMAGVPADERRLAKSHPLFQERRLYEEVNHLRIVVPGAGERPLTRSERDKLIMKLQDRKKVSFDSLAKLLKLGDGERFNKQSDTRKDLAGNEVRAELSDRKRFGPRWNGFGLDEQLRIIDRLENEENPDALLAWLKAEYDLDDAAAAAVAAAHLPEGHGRFGETATRRLLEHLREDVVTYDKAAHAAGFHHSDHRTGESFDALPYYGEVLARDIAPGKAEYADPLERRFGKITNPTVHIGMRQLQKLVNAVIAVHGKPDRIVVELARELKLNDEEREEHRRRIRRDTEAAAARGDKLKAEGIADTGANRALLRLWEEANPANPMDRRCPYCGKPIGIRQLFTGEADIDHVIPYSRSLDDSAGNKVVAHRSCNREKGNQTPFERWGGDPERWDTISAQVARMHRSKQWRFGPDAAERVERDGGFIARQLTDTQYLSRLAGKYLRCLYPTAESGRVDVIPGRMTAMLRRIWGLNSLLPDHNFVENEHSNAPKNRLDHRHHAIDAAVAAVTDRGLMQRIAYAAARAEEKELDRLFEDLAQPWDGFREELRGRLGRVRASHKPDHGRKGKPSRNRDVTAGRLHNDTAYGLTGEMAADGKTPIVVHRVPLASLKPGDILDPGRIPDDALRQALFEATRDHAGKAFEQALARFAKEHPVFRGIRRVRVREPLNVIPIRDREGRPYKAYKGDANARFDVWRLPDGKWKADVISQFEAHRPDTGDRRPHPAARKVLSLRQNDVIAIERDGAPVELLRVVGLNQQGNLTLVPPNEAGPLKARDKEANDVDPFKYTYLAASTLKKLKARQVRIDPLGRVFDPGPRE

SEQ ID NO: 7798 - protein, 1070 aa, synthetic construct
  REGION 1..1070: note = Synthetic
MTTRLGLDIGTNSIGWCLYDGDSIRDIGVRIFSDGREPSKLAVSGSGTPLAVKRREARGARRRRDRYIGRRSAMLRELRRHGLLPADPELARALETQDPYALRVRALDEKLEPHQIGRALFHLNQRRGFKSNRKAERTSKAGEDGKIATATRLLDEDMRRLGARTLGEFLVKRDHESNGTMGKRVRMRADSKAYDFYPDRRHVLDEFRAIWDAQKAWYPDLLTPQAWNGIYRVIEYQRPLKPQIVGPCTFAGINGVPTDEKRLPKAHPLFQQRRLYEEVNQLRVVAPGAAGRPLTLDERDALILKLQDKKSVSFDTLGKTLKLKDGERFNKEGENRKALDGDEVRAELSHKKLFGPRWFHFSAEEQWTIIERLLEEEDSDTLLTWLKSEYGLDDETALAVANAKLPEGHGRFGLTATKALLKEYKADVCTYAEAAKRAGFHHSDFRTGEAFDQLPYYGEILSREIAPGKPEYGDANERRFGKITNPTVHIGLNQLARLVSAIIRVHGKPDQIFVELARELKLNEKEKVAYNRQLKENTDAARDRGAKLGTMGVRDTGRNRLILRLWTELNPKDVLNRRCPYCGENIGQAHIRNNDVEIDHIVPYSQSYDDGIGNKVLVHTWCNREKGSQTPWERWGHDPDRWSIIQEQVAHLHRSKQWRFGPDARDRYAAEEGSFLPRQLVDTQYLTRIAAKYLACLYPERGERHVFAVHGGMTAMLRRLWDLNSILPDHNWVDNKESNAPKNRLDHRHHAIDAAVVGIMTPALIAEIAKAAARAEKQNLDRLFEDLPMPWARHPNDRRFRDELREKILAATVSHKADHGRRGKPEPGRDITAGKLHNDTAYGFTGLISDTGLPVVVHRVPLASLTPKDIADPDRIPDTALRDALWQATRDVAGKEFEKALLDFSRTHPHFRGIRRVRVREGLTLIPIRDRTGKPYKGYLGDSNARYNVWQMPDGRWVHQVISTFDLHQPGFIEQRPHPAAKKVLSLRQNDLIAIERDGGPRQIMRVQKYGQNGQIFLIEHNEAGNMTERNKNPDDPFKFYGPGASALKNMKARQVRVDELGRIFDPGPR

SEQ ID NO: 7799 - protein, 1070 aa, synthetic construct
  REGION 1..1070: note = Synthetic
MVWLWGGEMRRLGLDIGTNSIGWCLIEDDKRVVDLGVRIFSDGRDPKSGASLAVDRREARAMRRRRDRYLGRRSAFLETLIQYGLMPEAQDEARLLADKDPYVLRKRALDEVLTPHEIGRALFHLNQRRGFKSNRKADRQQKDGEDGKIATGARALDEAMREADARTLGEFLAGREEKRVRLNGESQAYDFYPQRRHVEDEFNTIWDKQKPHHGTVLTDAAREALHRILFFQRPLKTPEVGFCTFAGWDGIPDDARRLAKAHPLFQQRRLYEEVNNLRIVAPGEADRPLTRHERDTLILKLLDKKKVSFDSLAKTIKLPEGERFNKDSENRKDLIGDEVRAEMSDKKRMGTRWLHLGLADQLRIIEQVQNEENIDILLDWLQREYGLDKETAMGVAGARLPEGYGRFGEVATQRLLEALKSDVLTYDKAAQKAGFHHSDQRTGEYFDRLPYYGELLTREIAPGKQEYGDPLERQYGKITNPTVHIGLRQLEKLVNAIITVHGRPDEIVVELARELNLSEDDKKKHDARIRKDTQAAIARGEKLEAGGFDNTGANRALMKQWEELNPSNPLDRRCPYCAQQIGIKMLFSGEADIDHIIPYSRSLDDSSGNKVVAHRHCNRAKGNNTPYQKWGHDPERWDTISNQITRLHKSKQWRFGPDAMDRIQKDGGFIARQLTDTQYLSRLAYKYLSCLYEADGTRHVFVATGRMTALLRRVWALNSLLPDHNFVDNQHSNAPKNRLDHRHHAIDGAVMAVTSPALLHKIATAAGRAENLELDRMFERLEAPWDTFRDDLRDGLMRVTVSHKADHGRKGKPSRHRDVTAGRLHNDTAYGLTGLTAADGKTPIVVHRVPLLSLKPADLADPDRLPDEALRTALWEATRDQSGKAFETALDNIRRNGIDKRDKNGKRMFKGLRHVRVREPLNVIAVRDKTGKPYKAYKGDSNARWEFWRLPDGALKTTVVTMFDAHQANADTRPHPAAKRLLNLRQNDLIAIERNGGPREILRVIGFNVAGRLTLAPANESGNLKERDGTSNDNDPFKYIYLQGRSILKAKARQIRIDPLGRVFDPGPRE

SEQ ID NO: 7800 - protein, 1067 aa, synthetic construct
  REGION 1..1067: note = Synthetic
MATRLGLDIGTNSIGWCLFNIDGQGKPVGLRDIGVRIFSDGRDPRSGASLAVDRRDARAKRRRRDRYVRRRSALLDALINTGLMPADVQEAKALTGCDPYVLRAQALDRALDAHLLGRVLFHLNQRRGFKSNRKAERKAGGGEEGGKIAEGAKALDLAMHEAGARTYGEFLANRDARRVRLRAEGDGFDFYPERRHLEAEFDAIWAAQAACNPALLTDAVRDRLRRIIFFQRPLKAPKVGGCAFFNEEPRLPKAHPLFQERRVYEEVNQLEITRAGAPSRKLTLDQRDKIILKLKSAKTVTFSGLAKLLQLADGESFDKATENRTGLVGDEIFTAFSDKKCFGDRWAHFDPGAQWSIIDTVAEEEDPVRLRDWLMATHGVTVDQAEAIGRVRLPEGHGRLGETASRLILAQLKSGSKDGHPLTYSEAVEAALGKSRSDLRTGEIQDQLPYYGEILTREIPPGSLDPNDDDEIRWGKITNPTVHIGLNQLRRLMNAIIKAHGRPDEIVVELARELKLNEKKKAERNRRIGANTRATEARSKKLLESGQPDTGANRALLKLWEDLSPNNPLDRCCPFCGHHIEQMALFSGETEIEHIIPFSRCLDDSAANKVVAHRSCKQEKGNKTPWEAWGHTERWAIIAEQVLRLHKSKQWRFALDAMERLGQQGDFIARQLTDTQYLSRMVGTYLSSLYPDTAGVHVIPGHMTAMLRRLWDLNELLPDHNYVENPHSGAPKNRLDHRHHAIDAAVVGVTTRSLLKDISKAAERAERQDLDQLFIDLPTPWETFREDLHESLARVVVSHKAEHGRKGVPAKGKDVTAARLHNDTAYGLTGLASDSGLPIVVHRVPLLSLKPDDLSNPIRIPDAALQRALREATDGKSGKDFQAALAGFSRSDPVFKGIRHVRVREALKVIPIRDASGHAFKAYKGDANARYDVWRMPDGKWISRWKDRDGASRSSIVSMFEAHQTGQPAQRPHPAAKRVLSLRQNDLVAVEPQGQPRKIMRVVKFSSGGEITFAEHQEAGPLKARHTTSPDIDPFKYFYSSAGGLQKASARQIRIDELGRIFDPGPR

SEQ ID NO: 7801 - protein, 1066 aa, synthetic construct
  REGION 1..1066: note = Synthetic
MRTRLGLDIGTNSIGWCLYDGDTIRNIGVRIFPDGRDPKSGASLAVDRRDARAMRRRRDRYLGRRSALVEVLVEHGLLPQDKQEAQALHGEDPYALRARALDEKLTPQQIGRALFHLNQRRGFKSNRKADRVAKVNDDGKIASGTKALDQAMADAGARTLGEFLLLRDPDKGEAKRVRMRPDANGYDFYPDRRHYENEFEAIWAKQAEYHPDFLTIEAKAAIHRVIFFQRPLKAQVVGKCSFAGWYGIPGDEKRLPKAHPLFQQRRLFEEVNQLEVVSAGAPARKLTLDERHKLILKLQDKKKVTFKTLGRLIKLKEGERFNKESENRKDLIGDEVRAEMMHADRFGPDWTTFSTGKQWAIIERLLEEEDTEKLLAWLQSEHGLYRETAEAIANAHLPDGHGRFGLTATTALLEQLKAHVVTYAQAAERAGYHHSDHRTGECHAALPYYGEILAREIAPGKDDYSDELERQWGKITNPTVHIGLNQLRRLVNAILRQYGRPDYIYVELARELKLNEKQKAEHNRRIRQTTDEAAARSKKLAEIGERDSGGNRMLLRIWEQLNPANPLDRRCPYCGEMISIEMLMNGSADIDHIIPYSRCLDDSVGNKVVSHTHCNRQKGNKTPWERWGETDRWPVIQDQVARLHKSKQWRFGPDAMERVERGGGFVARQLTDTQYLSRIAGKYLSSLYTPDEGRRVYAVTGRMTAMLRRLWGLNDILLDHNWVENEHSNAPKNRLDHRHHAIDAAVVGATDAAMIQKIATAAGRAEDQDLDRQFLDLPHPWEGFREDLRDKLYTTTVSFKPDHGRKGRPKKDRDITSGRLHNDTAYGLTGRTNAKGVPIVVTRKPLLSLKPGDLTDPDRMPDRDLQEALYTATRGTSGKEFEKSLRDFATRDGPYNGIRRVRLTEPLNVILIRDKEGRAYKAVKGDANARFDVWRLPDGKWVTKWKDLEGQEHSSIISMFDAHQCDFVEARPHPAAKKVLSLRQNDLIAVEHDGGEREIMRVVKFAARGEITFAKHNETGALKSRHEAGDDPFRYFTSSPSGLKASKARQVRIDELGRIHDPGPRD

SEQ ID NO: 7802 - protein, 1064 aa, synthetic construct
  REGION 1..1064: note = Synthetic
MKRGSIRLGLDIGTNSIGWCLYDGDTIRDIGVRIFSDGRDPKSGASLAVDRRDARAMRRRRDRYLGRRSALVEQLVVRGLLPKEKEAATDLHGEDPYTLRVRALDEKLEPHQIGRALFHLNQRRGFKSNRKADRVSNANEDGKIASGTKALDQAMMDAGARTLGEFLHGRETKRVRMRPEADGYDFYPDRKHYEQEFEAIWSAQAPYYPALLSKEEKAAIHRIIFFQRPLKAQVVGKCSFAGWYGIPDDERRLPKAHPLFQQRRLYEEVNQLEVVSAGAPSRKLTLDERDKLILKLQDKKKVTFKALGKLIKLKEAERFNKESENRKELIGDEIRAELMDKKRFGPRWTTFSADQQWKIIDRLMNEESTERLLAWLKENYGLDQEVAESVANAHLPEGYGRFGITATTALLDQLRANVVTYSQAAEGAGYHHSDFRDGQEHRELPYYGEVLAREIAPGKEDYTDKLERQWGKITNPTVHIGLNQLRKLVNAIVRKYGRPDYIYVELARELKLNEKQKAEHNRRIKQTTDAAAARSEKLKEIGQRDNGGNRMLLRIWEQLNPANPLDRRCPYCGEMISLEMLMNGSADVDHIIPYSRCLDDSVGNKVVSHTHCNRQKGNRTPWEQWGQTERWPIVQDQVARLHKSKQWRFGPDAMERVDRDGGFIARQLTDTQYLSRLAGKYLSSLYTPDEGRRVYAITGRMTAMLRRLWGLNDILPDHNWVENEHSNAPKNRLDHRHHAIDAAVVGITDAAMIQKIATAAGRAEERDLDRQFLDLERPWDGFREDLREKLFATTVSFKPDHGRKGKPEKDHDVTSGRLHNDTAYGLTGRTNAKGVPIVVTRKPLLSLKPKDLIDPERMPDSHLQEALYEATRGTSGKAFENALRQFAKQDGPFKGIRRVRLTEPLNVIPIRDKEGRAYKAVKGDANARFDVWRLPDGKWVTKWKDRDGQEQSSIISMFDAHQRNFKPAKPHPAAKKVLSLRQNDLLAVERDGDKPEIMRVIKFGGNGQIFLAEDNEAGALKNRDADSQDPFKYTSAMAGSLKKMKARQIRIDELGHIHDPGPRD

SEQ ID NO: 7803 - protein, 1062 aa, synthetic construct
  REGION 1..1062: note = Synthetic
MEKRLGLDIGTNSIGWCLYEGDSILDIGVRIFSDGRDPKSGASLAVDRRNARAMRRRRDRYLGRRSALIKALKAHGLFPAEQDAAKALEREDPYSLRVRALDHRLDPHQIGRAIFHLNQRRGFRSNRKADRVLGDQESGLISTATRVLDEAMAKSGARTLGEFLASRDTRRVRMRPDVKGYDFYPNRQHYLEEFEKIWDAQSQYHPDLLSQQAKSAIHRIIFHQRPLKPQAVGTCTFAGLHGIPGDETRLPKAHPLFQQRRLYEEVNQLEIVCASAPARKLTRDERDALILKLQDKKKVTFSTLARTIRLKEGERFNKESENRKDLAGDEVRAEMSDKTRFGRRWFHLSLDEQWSVIDRLLNEESTEDLLAWLEKEWSLPSDVAEAVANAHLPDGHGRFGLTATVRLLEHLKADVVTYAEAARRAGFHHSDFRDGACYDELPYYGEILSREIAPGKDEYGDPLERQWGKITNPTVHIGLNQLRRLINALVRRHGRPDFIFVELARELKLNEKQKADHKRRIKQTTDAARARAEKLREIGQRDSGSNRMLLRIWEELNPSNPLDRRCPYCAEPISIEMLMSGSADIDHIVPYSRCLDDSAANKVVAHNHCNRQKGNRTPWEQWGQTTRWPLIQEQVARMHRSKQWRFGPDAMERVDRDGGFIARQLTDTQYLSRIAAQYLSALYTPDEGRRVYAVTGRLTAMLRRLWGLNDILPDHNWVLNPHSNAPKNRLDHRHHAIDAAVVGATTPAMIQQVARAAARAEEQDLDRLFADLPPPWPGFREELQGRIMAAVVSHKPDHGRKGRPLPGRDSTSGRLHNDTAYGFTGRRNAKGMPIVVTRKPLLALKPEDLTDPERIPDPALQGALFEATRGATGKDFEKALRDFSRRDGPYQGIRRIRLTEALNVIPIRDRTGHAYKGVKGDANARFDVWRLPDGKWITRWKDRDGIEHSGIVSLFDAHQPSQVYHRPHPAAKKVLSLRQNDLVAVEHDGDPGKIMRVVKFSANGSITFAPHNEAGPLKTRDTDPADPFRYVTTVASGLKKMRARQVRIDELGKVHDPGPRED

SEQ ID NO: 7804 - protein, 1060 aa, synthetic construct
  REGION 1..1060: note = Synthetic
MRRLGLDIGTNSIGWCLIEDDARIVDIGVRIFSDGRDPKSGASLAVDRRAARAMRRRRDRYLGRRAAFLKALKRHGLMPADESAAKLLADRDPYELRARALYERLEPYEIGRALFHLNQRRGFKSNRKAERKTKDAEDGKIASGAKALDQAMAEEGAETLGQFLAGRDTKRVRMGSDAQGYDFYPQRRHVGYEFETIWERQKPHHPALLTDEAHKQLHDTLFFQRPLKEQEVGVCTFVHNERRLPKAHPLFQERRLYEEVNQLEITTPGAPNRKLRMGERDALILELRSRRERSFDALAKRLKLEPGQSFNKASESRTDLKGDEVYAVMADKKRFGGRWPHLDRDRQWSIIERIIDEEDPDKLHAFLTGECGLTHDQAVATARAPLPELYGRLGPTATARILDELKKGVVTYDEAVKRAGWHHSDDRTGEILPQLPYYGELLTREIPPGTQDPNDPPEQRWGKITNPTVHIGLRQLEKLVNAIIKVYGRPDQIVVELARELKLNEKDKEEHNRRIRRDTAAAQLRSSKLQSEGIPDTGANRMLLRMWEELNPNEVLDRRCPYCGEQVGMRMLFTGEADIDHIIPYSRSLDDSTGNKVVAHRNCNRVKGNRTPYEKWGHDPGRWEIISTQVARLHKSKQWRFGPDAMARVEKDGGFIARQLTDTQYLSRLAGRYLSSLYPTKDDGSVYVIPGRMTAMLRRLWGLNSLLPDHNFVENQHSNAPKNRLDHRHHAIDAAVVAVTTRGLLQEIAHVAGRAEDKDLDRLFEDLPQPWDGFREELGERLARVTVSHKPDHGRKGVPPKDRDVTAGRLHNDTAYGLTGDVATDGRTPIVVHRVPLMSIKPADISDPDRIPDPTLRAALHRATDGLSGKAYEAALAGFAKTHPQFAGIRRVRVREPLNVIRIHDRNGKPYKAYKGDANARYDVWQMPNGKWMHDIVSMFDAHQRPHELTEEEKAAGKKVQPKRPHPAAKKVLSLRQNDMLAIERNGGAPEIVRVVKFSTIGAIALALHQEGGALKARDAAPSEVDPFKYIYSSGGGLKNLKARQVRIDPLGRIFDPGPR

SEQ ID NO: 7805 - protein, 1059 aa, synthetic construct
  REGION 1..1059: note = Synthetic
MRRLGLDIGSNSIGWCLIDDKEGNIVDIGVRIFPNGRDPQSGTSLAVDRREARSARRRRDRYLGRRSAFFDTLVAHGLMPADTDEARLIAAKDPYDVRARALNEKLTPHEIGRALFHLNQRRGFISNRKAERKSADNEDGKIATGAQALDHAMTEAGADTLGQFLAMRLAQGQSARVRMNSESQSYDFYPQRRHIEYEYERIWGEQAKHHPEILTKEAHDALHRILFFQRPLKEQEVGICTFCPNERRLAKAHPLFQERRLYEEVNHLEITTPGAPDRKLTLDERDHLILKLRGKKNVTFESLAKEIKLQPGQSFNKASETRTSLAGNEIFATLSDKKRFGKAWPNFSLSRQWEIIETLIEEENPDTLHDFLTKDCGLNEEAAILTARTALPEGYGRLGLTATTRILDELRKGVITYDVAVRNCGWHHSDNRTGEILHQLPYYGELLNREIPPGTQNPADPLEKRWGKITNPTVHIGLRQLEKLVNALIQVHGRPDQIVVELARELKLNEKEKEEHNRRIRRDTQAAQARSEKLTEANIPDTGANRMMLRMWEELNPANPLDRRCPYCGEQIGIRALFSGEADIDHIIPYSRSLDDSAANKVVSHRRCNRIKGNKTPYEKWGHDEDAWTIIRVQVARLHRSKQWRFGPDAMERVDKDGGFIARQLTDTQYLSRMAGRYLQSLYADKSDGSVYVIPGRMTAMLRRLWGLNSLLPDHNIVENKHSDAPKNRLDHRHHAIDAAVVAVTSRSLLMRIARTAGLAEDKNLDRLFEDLDQPWDGFREDLYEKLKAITVSHKPNHGRKGKPAPGKDATTGRLHNDTAYGFTGETNEKGVPIVVHRVPLSSLKPATITDPDRIPDPTLREALYRATQGTSGKDFEKALAEFSRSGAGSDKNGRPLFKGLRHVRIREPLNLIPIRDKTGRVYKGYKGDSNARFDVWRMPDGKWVADVLSTFDAHQADGQDRRPHPAAKKVLSLRQNDVIAVERDSETQLLLVTGFNQQGSLTLSPLNEAGPLKARNSTANEIDPFKYTYLSASSLKKSQARQVRIDPLGRVFDPGPRE

SEQ ID NO: 7806 - protein, 1057 aa, synthetic construct
  REGION 1..1057: note = Synthetic
MRRLGLDMGTNSIGWCLTEDDGRIVDIGARIFADGRDPKSGASLAVDRRMARGMRRRRDRYIGRRSAFLAALVEHGLMPADADEARLVGERDPYVLRARALHDRLDPYDIGRALFHLNQRRGFKSNRKAERKQKDQEDGKIAGGARALDQAMAESGADTLGEFLSFRDTKRVRMGGENQEYDFYPQRRHVEYEYGRIWESQAVHHPALLTETARVALHRILFFQRPLKEQPVGLCTFVNQPPNHEYRLPKAHPLFQERRLYEEVNHLEITTPGEAPRKLTPGERDDLILEMRGKREVSFARLGKRLKLEPGQSFNKASEARTHLRGDEVYAALADKRRFGPNWAHLGPDRQWLVIERLLDEEDPDALHAFLTEDFGLDEDRARATAKAPLPEGHGRLGNTATRLILEALKTDVVTYDVAVRSALPHHHSDFRTGEVLPKLPYYGELLTREIPPGTLDPADPPEVRWGKITNPTVHIGLRQLEKLVNAVIAVHGRPDQIVVELARELNLSEDDKKKHNVRIRDNTAAAVKRSEKLVSMGQPDTGANRMLLRMWEELNPHNPLDRRCPYCGEMIGAELLFASGAADVDHILPYSRTLDDGTANKVVAHRACNRAKGNKTPYERWGADETRWEIITAQVARLHKSKQWRFGPDAMERFDKDGGFLARQLTDTQYLSRMARSYLSSLYIGEEKGEGVYVIPGRMTAMLRRLWALNDILGDHNIVENKHSNAPKNRLDHRHHAIDAAVVAVTTRSLLGEIAKAAGRAEDKDLDKQFEGLPQPWPGFRDELRDKLGNVTVSHKPDHGRKGRPAPGHDVTAGQLHNDTAYGLTGETAADGKTPIVVHRVPLTSLKPGDLTDPLRIPDEALRDALYRATEGLSGKPREQALARFAATDKVFKGIRRVRVREPLNVIPIRDKAGRAYKAYKGDANARFDVWRMPDGKWTADIVSMFDAHQPAQADRRPHPAARKMLSLRQNDMIAIERDGASPQVVRVVKFSTIGAIALAPDNEAGALKARDATSNELDPFKYVYSSAGGLKKLRARQVRIDPLGRVFDPGPREPA

SEQ ID NO: 7807 - protein, 1056 aa, synthetic construct
  REGION 1..1056: note = Synthetic
MRRLGLDIGTNSIGWCLIENDARVIDIGARIFSDGRDPKSGASLAVDRRVARAMRRRRDRYLGRRSAFLDTLIRYGLMPADADEARLIAARDPYSLRARALDERLEPYEIGRALFHLNQRRGFLSNRKAERRQKDSEDGKIASGARSLDQAMAEAGADTLGQFLDQRDEKRVRLDGDSQSYDFYPQRRHVDYEFGRIWEEQAKHDPILLTEQARAALHRILFYQRPLKEPEVGVCTFVQSERRLAKAHPLFQERRLYEEVNQLEITAPGEAPRKLTRDQRDALILELRGKKEVAFTTLARRLKLQHGESFNKASETRKALRGDEVYAALSDKKRFGAAWAHKSPEAQWVIVERLLEEENPDRLNAFLAGECGLNEEHARAAARAALPEGHGRLGETATRRILAELKKEVITYAEAVKRAGWHHSDDRTGEILERLPYYGELLAQDIPPGTQLASDPPEKRFGKITNPTVHIGLRQLEKLINAIIAVHGRPDQIVVELARELKLNEKDKEEHNKRIRRDTAAAKARSNKLIEEGFADTGGNRMLLRLWEELNPANPLDRRCPYCAEPIGMRALFSGEADVDHIIPYSRSLDDSASNKVVAHRHCNRIKGNRTPYERWGHDEARWEIIAGQVARLHKSKQWRFGPDAMARVEKDGGFLARQLTDTQYLSRLAGKYLRSLYPDKDDGGVYVIPGRMTAMLRRLWGLNSLLPDHNIVDNEHSNAPKNRLDHRHHAIDAAVVAVTTRSLLQQIARTAGQAEDKHLDRLFEGLPKPWESFREDLGEALARITVSHKPDHGRSGRPSRHRDVTAGRLHNDTAYGLTGAVAADGKTPIVVHRVPLMSLKPGDLTNPERMPDAALRDALYAATRDLSGKPFEAALQRFRETHPVFKGIRRVRVREPLNVIQIRDKAGRAYKAYKGDANARFDVWRLPNGRWVTSWKDREGKEQSGIISMFDAHQPIEPPRPHPAAKKILSLRQNDLIAIERDGGPPEIVRVVKFSTIGSIALAPANEGGALKARDAEPNDPFRYIYSSGGGLKKLKARQIRIDPLGLVLDPGPRD

SEQ ID NO: 7808 - protein, 1055 aa, synthetic construct
  REGION 1..1055: note = Synthetic
MRRLGLDIGANSIGWCLVEFDEEHPIGIRILDIGVRIFSDGRDPKTGASLAVDRRTARAMRRRRDRYLRRRSVFLDSLIRYGLMPADTDEARLVAARDPYSIRARALIERLEPHEIGRALFHLNQRRGFLSNRKAERRSKDNEDGKIASGAKALDQAMAEAGTDTLGQFLAGRAEKRVRLNGENQGYDFYPQRRHVAWEFQRIWEEQAKHHPALLTEEARAALHRVLFFQRPLKEPVVGVCTFVHSERRLPKAHPLFQERRLYEEVNQLEITTPGEAPRKLTLDQRNHLILLLRNKKEVAFTTLIGGKGLKLQQGESFNKASETRTVLRGNEVYAALAHKDRFGDAWAHKSLEQQWTIIERLLDEEDPGKLHTFLTGECGLDEAAAFAVAKAPLPEGHGRLGETATRLILEELKKEVVTYDEAVRRGGWHHSDDRTGEILDRLPYYGELLARDIPPGSQDPSDPPEKRWGKITNPTVHIGLRQLEKLVNAIIAVHGRPDQIVVELARELNLGEDDKKKHEARIRRDTAAAIARGEKLEQEGVPNTGANRALLKLWEELNPANPLDRRCPYCADPIGMRALFSGEADVDHIIPYSRSLDDSAGNKVVAHRRCNRAKGNRTPHERWGHDVDRWDRLAGQVARLHKSKQWRFGPDAMERVEKDGGFLARQLTDTQYLSRLAGKYLRSLYPAKEDGSVYVIPGRMTAMLRRLWGLNSLLPDHNYVENEHSNAPKNRLDHRHHAIDAAVTAVTTRSLLQRIAQTAGRAADKDLDRLFEGLDQPWEGFREDLGEALARVTVSHKADHGRKGRPSRHRDVTAGRLHNDTAYGLTGDVAADGKTPIVVHRVPLASLKPGDLTNPDRIPDPALRDALYEWTRDLTGKPFEAALQRFRDTHPVFRGIRHVRVREPLNVISIRDASGRAYKAYKGDANARFELWRLPDGGLKTRVVTMFEAHQQKQDDRPHPAAKRLLTLRQNDLLAVERNGGPREILRVAGFNVQGRLTLAAANEAGNLKERDGLSNDRDPFKYVYLSGRSIVKAKARQVRVDPLGRLFDPGPRN

SEQ ID NO: 7809 - protein, 1048 aa, synthetic construct
  REGION 1..1048: note = Synthetic
MKRLGLDIGTNSIGWCLIEDDGDGKGRIIDIGARIFSDGRDPKSGASLAVDRRAARAMRRRRDRYLGRRTAFLKALKRFGLMPADESAAKLLADRDPYELRARALDERLEPHEIGRALFHLNQRRGFKSNRKAERKTKDAEDGKIANGAKALDQAMAESGAETLGQFLSSRDTKRVRMGSDAQGYDFYPQRRHVEYEFDTIWSRQQQHHPALLTEEARKKLHDILFFQRPLKEQEVGVCTFVHNECRLPKAHPLFQERRLYEEVNQLEITTPGAPNRKLTMDERDALILELRSRKERSFDSLAKRLKLAPGQSFNKASESRTRLRGDEVYAVMAHKKRFGDRWPHLDRDRQWAIIKRIIEEEDPDKLHAFLTGEWGLTDEQALATARAPLPELYGRLGPTATARILEELKKDVITYDEAVRRAGWHHSDDRTGEILPQLPYYGELLTRDIPPGTQDPNDPPEQRWGKITNPTVHIGLRQLEKLVNAIIKVHGRPDQIVVELARELKLNEKDKEEHNRRIRRDTAAAQLRSAKLQSEGIPDTGANRMLLRIWEELNPGEVLDRRCPYCGEPVGMRMLFAGEADIDHIIPYSRSLDDSAGNKVVAHRSCNRAKGNRTPYEKWVHDPDRWDVISTQVARLHKSKQWRFGPDAMARVEKDGGFIARQLTDTQYLSRLAGRYLSSLYPTKDDGSVYVIPGRMTAMLRRRWGLNSLLPDHNFVDNEHSNAPKNRLDHRHHAIDAAVVAVTTRALMQEIARTAGRAEDKDLDRLFEDLPQPWEGFREELGEKLVRVTVSHKPDHGRKGLPPKNRDVTAGRLHNDTAYGLTGDVAADGKTPIVVHRVPLMSLKPADISDPDRIPDPALRSALHRATDGLSGKAYDAALAGFAKTHPQFAGIRRVRVREPLTVIPIADRDGRPFKAYKGDANSRVDIWRMPDGKWLSDVVTMYEAHRRDHSDRRPHPAAKKLMSLRQNDMIAVERDGAPRQIMVVKQIWPTQINLVEHKETGNLKDRHSNETDPFRFFAPTAGGLKKMKARQVRIDPLGRIFDPGPR

SEQ ID NO: 7810 - protein, 1090 aa, synthetic construct
  REGION 1..1090: note = Synthetic
MTITLGIDLGTSSLGWSLVEHDADKATNGRILDLGAIIFASAAGAGRDPQSGAPLAEGRREARSARRRRDRFIGRRSALLAKLIALGLLPGDPPARTGRRQNEAVPNDDTRVLAAADPYDLRRRALSGPLSAHEIGRAIFHLNTRRGFKSNRKADRGRNEPENGKIASAGQALNEALAGRTLGQFLADRLDAGEPARVRMGGENQAYDFYPQRSHLEAEFDAIWAAQEPHHPDLLTEAARLAIHRILFFQRPLKQPEVGFCTFAGIAGVPGDERRLPKAHPLFQERRLYEEVNQLRVVAAGAAGRELTLDERDHLIRVLQDKKKVSFSTLGKQIKLAEGERFNKESENRKDLAGNEVRAEMSDKKRFGNRWLHFSLEQQLEIIDRLQNEEDPDILLGWLKTDCGLDDDKAVAVAKANLPEGHGRFGETATRRLIEALRAEVVTYDKAAEQAGFHHSDFRTGEAFDLLPYYGQILTREIAPGKADYGDALERQFGKITNPTVHIGLRQLQKLVNAVIARYGKPDRIVIELARELKLNEKEKEREKRRIRDDTASAERRSAALIEAGRPDTGANRAMLKQWEELNPANLIDRRCPYCGQPIGMAQIFNGDTDIDHIIPYSRSLDDGPANKVLAHRNCNRQKGNLTPHEKWGHDPDRWAIISAQVARMHRSKQWRFGPDAAGRIARDGGFAARQLTDTQYLARISGKYLRSLYPTAEHGRVDVIPGRMTAMLRRVWGLNSLRPDHEFVENEHSNAPKNRLDHRHHAIDATIAAVTSLALMQRISRAAGSAEEMELDRIFEKLDPPWRGFGDELGTRLFRTVVAHKPDHGRTGKPSPQRDVTSGRLHNDTAYGLTGLTTPDGKTPIVVHRVPLSSLKPAQIADPDAIPDETLRHALWIATRDTSGKSFDQALARFAREHPVFKGIRRVRLREPLSVIPIRDASGRAYKAYKGDANARYDVWRLPDGKWQADVVPMFDAHSAAGADRRPHPAAKKVLSLRQGDVIAVERNGPEAELMRVVKFSTNGSIIFAPPNEAGPLKARNEASDDQDPFRYYQAAASSLKKAKARQVRIDALGRVFDPGPRDQARPGDGPDR

SEQ ID NO: 7811 - protein, 1092 aa, synthetic construct
  REGION 1..1092: note = Synthetic
LKIPCRLQSSISLVKIGYRLTAGFAMGTRLGLDIGTNSIGWCLFNLDGSGRPIGIRDIGVRIFSDGRDPRSGASLAVERRVARAMRRRRDRYIRRRSALLEALINTGLMPADVQESKALTGCDPYVLRAQALDRALDAHLLGRVLFHLNQRRGFKSNRKAERKAGDDKEGGKIADGAKALDLAMHEAGARTYGEFLAGRDSRRVRLRAEGDGYDFYPERRHLEAEFDAIWDAQAAYNPALLTDVVRDRLRRIIFFQRPLKAPKVGGCTFFNEEPRLPKAHPLFQERRLYEEVNQLEITRAGAPSRKLTLDQRDKIIRKLKSAKTASFSGLARLLKLADGESFSRVTENRTGLAGDDIFTSFSDKRCFGDRWAHFDPGVQWSIIETVTEEEDPVRLRDWLMATHGVTVEQAEAIGRVRLPEGHGRLGETASRLILAQLKSGSKDGHPLTYNEAVEAALGKSHSDFRTGEILEQLPYYGEILSREIPPGSLDPDDDDEIRWGKITNPTVHIGLNQLRRLLNALIKAHGRPDEIVVELARELKLSEKDKAEHNRRIGANTRAAEARSKKLLESGQPDTGANRSLLKLWEDLNPNNPLDRCCPFCGRHIGQMALFSGETEIEHIIPYSRSLDDSAANKVIAHRSCNREKGNRTPWEAWGHTERWAIIAEQVSRLHKSKQWRFAPDAIERFNQEGGFIARQLSDTQYLSRMARTYLSSLYPDTAGVYVIPGRMTAMLRRLWGLNELLPDHNYVENPHSGAPKNRLDHRHHAIDAAVVGVTTRGLLNEISRAAGRAERQDLDRLFIDLPKPWETFREDLHESLARVVGSHKADHGRKGVPAKGKDATAARLHNETAYGLTGLTSESGLPIVVHRVPLLSLKPDDLSNPIRIPDAALQRALREATDGKSGKDFQEALAQFSKSDPVFKGIRHVRVRETLKVIPIRDASGHAFKAYKGDANARYDVWRMPDGKWVSSWRDRDGKAHSGIITMFAAHQAGQPVQRPHPAAKRVLSLRQNDLVAVEPQGQPRKIMRVVKFSSGGQITFAEHQEAGPLKARDATSPDIDPFKYFYSSAGGLQKARARQIRIDELGRIFDPGPR

SEQ ID NO: 7812 - protein, 1071 aa, synthetic construct
  REGION 1..1071: note = Synthetic
LNRGDGGFETGGSRESLSRVGGGESMRRLGLDIGTNSIGWSLIEDDARIIDIGVRIFSDGRDPQSGTSLAVDRREARSARRRRDRYIGRRSAFLDALVVHGLMPADTDEAKLIAALDPYVLRARALDEKLTPHEIGRALLHLNQRRGFKSNRKAERKANDNEDGKIASGARALDQAMAEEGADTLGQFLNRRETKRVRMGGEHQEYDFYPQRRHVEYEFQRIWEEQAKHHPALLTEAARAALHRILFFQRPLKEQEVGLCTFAPDERRLAKAHPLFQQRRLYEEVNQLEVTTPGEANRKLTLDERDRLVRELSHKKAILFTSLATKIKLAPGQSFNKASETRTQLAGDEIRAVLGDKKRFGTAWEHFDRDRQWEIIERLLDEEDPDALHAFLTQECGLDEAQAATTAKTSLPEGYGRLGPTATARILDELQADVITYDEAVRRCGWHHSDHRSGEILPQLPYYGELLSREIPPGTQNPNDPPEKRWGKITNPTVHIGMRQLEKLVNAIIAVHGRPDQIVVELARELKLNEKDKEEHNRRIRRDTAAAVKRSEKLLAEGFPDTGANRMLLRLWEELNPANPLDRRCPYCGDPIGMRMLFSGEADVDHIIPYSRSLDDSAGNKVVAHRSCNRAKGNRTPYEKWGHDEERWEVISAQVARLHKSKQWRFGPDAMARAEKDGGFLARQLTDTQYLSRLAGKYLGSLYATKDEGSVYVIPGRMTAMLRRLWGLNDILFDHNIVENKHSNAPKNRLDHRHHAIDAAVVAVTTRGLLQRIARTAGQAEDKNLDRLFEGLEPPWPGFREQLRERLLAVTVSHKPDHGRKGKPAPGRGMTAGRLHNDTAYGLTGITSAKGLPIVVHRVPLASLKPADIADPERIEDPVLRQALADATAGKMGNDFQAALERFRKNHPQFAGIRRLRVREPLSVIPIKDAQGRVYKAYKGDSNARFDVWRLPDGKWVSDIVSMFDAHQPDQADRRPHPAAKKVLSLRQNDMLAIERDGGLREIVRVVKFSGNGQIALARDNEAGPLKARDASPNELDPFKYVLSSASGLKKIKARQVRVDPLGRILDPGPR

SEQ ID NO: 7813 - protein, 1059 aa, synthetic construct
  REGION 1..1059: note = Synthetic
MRRLGLDIGTNSIGWCLTQGPGDEADGIVDIGVRIFSDGRDPQSGTSLAVDRRDARAARRRRDRYIGRRSAFLDTLVAHGLMPADADEAKLVAALDPYTLRARALEAPLTPHEIGRALFHLNQRRGFKSNRKAERKTNDADDGKIATAAYALDRAMLDGGFDTLGQFLNAQETKRVRMDGEAQGYDFYPQRRHVEYEFDRIWTEQAKHHPALLTETARYALHRILFYQRPLKAQVVGKCTFVHSEDRLAKAHPLFQQRRLYEEVNQLEVTTPGEANRKLTLDERDRLVRELSHKKAIAFTSLAAKIKLEPGQSFNKASETRTQLAGDEVRAVLGDKKRFGPAWEHFDRDRQWTIVERLLEEEDPDALHAFLTQDCGLDDEHAAATAKTSLPEGYGRLGATATARILAELQAEVITYDEAVRRCGWHHSDHRTGEILPQLPYYGELLTRDIPPGTQDPNDPPEKRWGRITNPTVHIGLNQVRQLVNAIVAVHGRPDQIVVELARELKLNEKDKEEHNRRIRRDTAAAIKRSEKLTQEGFPDTGANRMLLRLWEDLNPANPLDRRCPYCGAPIGMRALFAGEADVDHIIPYSRSLDDSAGNKVVAHRSCNRAKGNRTPYEKWSDDPDRWDAITAQVARLHRSKQWRFGPDAMARVEKDGGFLSRQLTDTQYLSRLAGRYLSSLYPTKEEGSVYVIPGRMTAMLRRLWGLNDILSDHNIVENKHSNAPKNRLDHRHHAIDAAVVAVSTRSLMQRIARTAGQAEDRNLDRLFEGLDPPWPGFRDQLRDRLLAVTVSHKADHGRTGTPVPGKDATAGRLHNDTAYGLTGETSAKGLPIVVHRVPLTSLKPADITDPDRIPDPVLRDAIERATAGKMGKDFTDALAKFGRSGAQETDRKGERLFRGTRRVRVREPLGVIPIADASGRVYKAYKGDSNARFDVWRLPDGKWVSDIVSMFDAHRPDQGDRRPHPAAKKVLSLRQNDMIAIERDGAPREIVRVVKFSTIGSVQLAATTEAGPLKARDASPPDVDPFRYINSSAGGLKKIKARQVRIDPLGRIFDPGPR

SEQ ID NO: 7814 - protein, 1057 aa, synthetic construct
  REGION 1..1057: note = Synthetic
MRRLGLDIGTNSIGWCLIEDDKKIVDIGVRIFSDGRDPKSGASLAVDRRDARAMRRRRDRYLGRRSAFLQALVVHGLMPADADEAKLVADRDPYQLRAKALHVALEPFEIGRALFHLNQRRGFKSNRKADRKANAGEDGKIAEGAKALDQAMSEAGVDTLGQFLALKETKRVRLGSDGQAYDFYPQRRHIEYEFDRIWKVQSEYHPALLTEAARAALHRILFFQRPLKAQEVGFCTFAGVNGIAANERRLPKAHPLFQQRRLYEEVNQLRIVSAGAADRPLTLDERDRLILRLQDRKKVSFDTLAKKDLRLADGERFNKESENRKELIGDEVRAEMSDKKRFGTRWVHFGLDEQLRILAKLQDEENPEALLDWLRSEYGLDEAAAESVANARLPEGYGRFGETATRLLLDALKAEVITYDKAALRAFGHHSDFRTGEVLDRLPYYGELLTREIAPGKPEYGDPLERQYGKITNPTVHIGLRQLEKLVNAVIAVHGRPDQIVVELARELKLNEKEKDEHKRRIKRDTDAAIARGRKLASEGFIDNGANRMLMRIWEELNPANPLDRRCPYCAEPIGIRALFSGEADIDHIIPYSRSLDDNVGNKVVAHRSCNRAKGNKTPYEKWGPHIDPERWERISDQVARLHKSKQWRFGPDAMERIDRDGGFLARQLTDTQYLSRVAGKYLRSLYPTAQSGRVDVIPGRMTAMLRRKWGLNSLLPDHNYVENEHSNAPKNRLDHRHHAIDAAVAAVTTLSLMQQIADAAGRAEDKNLDRLFEDIPQPWPGFREELGEALRSTTVSHKADHGRKRRPSRDRDVTAARLHNDTAYGLTGDVAADGKTPIVVHRVPLASLKPADLIDPLRIPDPVLRDALYAATRDRTGKEFEQALTQFARHHPLFKGIRRVRVREPLNVIPIRDAAGRAYKAYKGDANARFDVWRLPNGKWVSDIVSMFDAHCMADKSDRRPHPAAKKVLSLRQNDMVAIERSGVTQIARVVKFSTNGSIALAADNEAGALKARDAAPNDVDPFKYIFSSGGGLKNLKARQVRVDPLGRVFDPGPRE

SEQ ID NO: 7815 - protein, 1061 aa, synthetic construct
  REGION 1..1061: note = Synthetic
MTTRLGLDIGTNSIGWCLFDGDTIRDIGVRIFSDGRDPKSGASLAVDRRDARAMRRRRDRYLGRRSALVEVLVTHGLLPADKSAGQKLHGEDPYALRVRALDEKLTPHQIGRALFHLNQRRGFKSNRKADRVSKDNEDGKIASGTKALDQAIAESGARTLGEYLHRQDVKRVRMRPDADGYDFYPDRRHYEYEFEQIWAAQAPHHPSLLTDEAKAAIHRVIFFQRPLKAQVVGKCSFAGWYGIPEDEKRLPKAHPLFQQRRLYEEVNQLEVVSAGAPSRKLTKDERDKLILKLQDKKKVTFKTLGGIIKLQEGERFNKESENRKDLIGDEVRAEMMHKDRFGPDWTTFSAAKQSEIIDRLLEEENTEKLLSWLQSEHGVNRETAENIANAHLPDGHGRFGLTATTALLEQLKADVITYAQAAERAGYHHSDHRTGECLDELPYYGEILAREIAPGKEDYGDELERQWGKITNPTVHIGLNQLRRLVNAIVRKYGRPEYIYVELARELKLNEKQKAEHTRRIKQTTDAAAERSRKLEEIGQRDSGGNRMLLRIWEQLNPANPLDRKCPYCGEGIGIEALMNGSADIDHIIPYSKCLDDSVGNKIVSHTHCNRQKGDKTPWERWGETDRWPIIQDQVARLHKSKQWRFGPDAMERIERDGGFIARQLTDTQYLSRIAGKYLSSLYTPDEGRRVYAVTGRMTAMLRRLWGLNDILPDHNWVENEHSNAPKNRLDHRHHAIDAAVVGATDAGMIQKIATAAGRAEEQDLDRQFVDLPKPWEGFREDLREKLYATTVSFKPDHGRNGKLRKDRDVTSGRLHNDTAYGLTGRTNAKGVPIVVTRKPLLSLKPGDLTDPERMPDHDLQEALYSATRGTSGKEFEKALREFARRDGPFKDIRRVRLTEPLNVIPISDKGGRAYKAVKGDANARFDVWRLPDGKWVTKWKDREDNEQSSIISMFDAHQRDFAEARPHPAAKKVLSLRQNDLLAVERDGGEREIMRVVKFGGNGQVFLAAHNEAGPLKARDSDGGDPFKYVSAMAGSLKKIKARQIRIDELGHIHDPGPRD

SEQ ID NO: 7816 - protein, 961 aa, synthetic construct
  REGION 1..961: note = Synthetic
MRRLGLDIGTNSIGWCLTEDDSRIVDIGARIFSDGRDPQSGTSLAVDRREARAARRRRDRYLGRRSSFLEALVAHGLMPDDADEAQMVAQRDPYPLRARALDEKLAPIEIGRVLFHLNQRRGFKSNRKAERKSGDNEEGKIASAARGLDEAMAEAGTDTLGQFLAGLETKRVRMNGENQTYDFYPQRRHIEYEFGRIWEEQAKHHPTLLTDAARAELHRILFFQRPLKEQAIGICTFVHNEFRLARAHPLFQERRLYEEVNQLEITTPGAPNRKLKMDERDRLILKLRGVRAANFESLGRLLKLEPGQSFNKASETRTQLAGNEVHATLSDKKRFGNSWEHFDRARQWKIIERLMEEENPDTLHEFLTGECGLDDERADTTAKASLPEGYGRLGINATSRILDELKKEVITYAEAVGRAGWHHTDNRTGEILSQLPYYGELLTRHIPPGTQDPNDPPEKRWGKITNPTVHIGLRQLEKLMNAIITLHGRPNEIVVELARELKLNEKDKEEHNRRIRRDTAAAQARSKKLETEGFVDNGANRALLRIWEELNPANPLDRRCPYCGEPIGMRMLFSGEADIDHILPYSRTLDDSIGNKSEGNVYVIPGRMTAMLRRLWGLNSLLPDHNIVENKHSDAPKNRLDHRHHAIDAAVVAVTTRGLMQRIARTAGLAEDRNLDRLFEGLDQPWAGFREELGERLSAVVVSHKPDHGRKGRPLPGKDMTAGRLHNDTAYGLTGEVNAKGVPVVVHRVPLMSLKSTDLTDPDRIADKALRDALYRATEGSTGKDYEAALVRFAKQDRVFGGIRRIRVREPLNVITIKDQSGRVYKAYKGDANARFDVWQLPGGKWVSDVVPMFDAHQVGQADRRPHPAARKILSLHQNDMLAIERNGGPREIVRVVKFSTNGSLHLAPSTEAGPLKARDATPSDVDPFKYINSSAGGLKRVQARQVRVDPLGRIFDPGPR

SEQ ID NO: 7817 - protein, 1058 aa, synthetic construct
  REGION 1..1058: note = Synthetic
VARRLGLDIGTTSIGWCLIEDNIRIIATGVRIFSDGRDPKTGASLAVDRRNARAMRRRRDRYLGRRSAFLDKLIQYGLMPANADEARLVAERDPYALRAAALTQMLTPYEIGRALFHLNQRRGFLSNRKAERRQKDSEDGKIASGAKALRQAMTDAGSDTLGQFLAGRSEKRVRLNGESQGYDFYPQRRHIDHEFGRIWEEQARHHPHLLTSEARAALHRILFFQRPLKAPVVGLCLFAGRGGVPRDEPRLHKAHPLFQERRLYEEVNQLEITTPGEAPRKLTIEQRDWLILELRSKRKVSFTSLAKRLKLQPGESFNKASETRTDLAGNEVYAVLSDKKRFGDDWAHLSAERQWEIIDHLIEEENPDTLHTFLTGECGLDEERALATAKTPLPEGYGRLGETATRRILDELRKDVVTYAKAVENAGWHHSDDRTGEVLAQLPYYGEILSRDIPPGSFDPADEDQPELYWGKITNPTVHIGLRQLQKLINAIIAIHGRPDEIVVELARELKLNEKDKEEHNRRIRKDTAAAIARGQKLEQEGFIDNGANRALLKLWEELNPGNPLDRRCPYCAEPIGMRALFSGEADIDHIIPYSRSLDDSAGNKIVAHRHCNRTKGNRTPYEKWGHDEESWDKIAEQVARLHRSKQWRFGPDAMQRVEKDGGFLARQLTDTQYLSRLAGKYLRTLYSTEEGSRVYVIPGRMTAMLRRKWGLNSLLPDHNYVENAQSNAPKNRLDHRHHTIDAAVVAVTTRSLLQEIAHAAGRAKDRDLDRLFEDIPQPWVNFREELGEALRTVTTSHKADHGRKSAPSRHHDVTSGRLHNDTAYGLTGDIAPDGKTPIVVHRIPITSLKPGDFTSPDRIPDVTLRDALYRATRDLSGKPFEAALAQFSKTDGPFKGLRRIRIREPLNVIPIRDASGRAYKAYKGDANARWELWRLPNGDIKTRVVTMFEAHRPGQDPRPHPAAKRILNLRQNDLIAVERNGGPREILRVAGFNVAGRLTLAAVNEAGNLKERDGLSQDRDPFKYVYLQGRSVVKAKARQVRIDPLGRLLDPGPRIRD

SEQ ID NO: 7818 - protein, 1074 aa, synthetic construct
  REGION 1..1074: note = Synthetic
MTRTLGIDLGTSSLGWALIDDTQIIDLGVVIFSAAASAGRDPQSGAPLAEGRREARAARRRRDRFIGRRAALLGKLIALGLLPGDPPQGTTERRSKTAVPNEQTRGLEGLDPYDLRRRALNEALTPHEIGRVLFHLNTRRGFKSNRKAERTRKDAQDGKIASGGKALDAALDGRTLGQFLAERLDAGLPARVRMDGENQAYDFYPQRSHLEQEFDAIWAAQAPHHPALLTDAAREALHRILFFQRPLKEQEVGFCTFAGVKDIPADERRLPKAHPLFQERRLYEEVNQLRIVSAGAAGRELTRDERDRLILKLRDKKKVSFASLAKTLKLAEGERFNKESENRKDLTGDEVRAEMSDKKRFGNRWAHFPLEVQLRILDRLQNEEDAETLLSWLRAEFGLDEAAAVAVARANLPEGHGRFGETATRALIAALKAEVITYDKAALAAGFHHSDHRTGEVFDTLPYYGQILAREIAPGKAEYGDPLERQYGKITNPTVHIGLRQLQKLVNAVIARHGRPDRIVIELARDLKLNDKQKAEHLRRIRRDTEAAQQASKDLIEAGRPDTGANRALLKQWKELNPGNALDRRCPYCGEKIGMEQIFNGLADVDHIIPYSRSLDDSAANKVLSHRHCNRQKGNKTPYERWGHDPDRWPIISEQVARMHRSKQWRFGPEAMARIESDGGFAARQLTDTQYLARIAGKYLRALYPSSEEGRVDVIPGRMTAMLRRVWGLNSLLPDHNFVENAHSNAPKNRLDHRHHTIDAAVAAVTSLSLMQKIATAAARAEAQELERMFDDLEQPWPGFREELRERVLRITAMHKPDHGRKKAPSRHRDVTAGKLHNDTAYGLTGAVAADGKTPIVVHRIALSALKPAQIENPDCIADPALRKALRVATSGKTGAAYMQALVRFSKEHPVFKGIRHLRIREPLNVIPIRDRSGKTYKAYKGDANARYDIWRLPDGKWKADVVPMFEAHAHDTGDRRPHPAAKKVLSLRQGDVIAAERTEGAVEFLLIKGFNQNARLTLVPPNEAGKLQERDRTETDEFKYIYLSPGSLKKARARQVRVDPLGRIFDPGPRDAG

SEQ ID NO: 7819 - protein, 1065 aa, synthetic construct
  REGION 1..1065: note = Synthetic
MRHMVTRLGLDIGTNSIGWCLFNLDLEGKPVGIRDMGVRIFSDGRDPKSGASLAVDRRDARAMRRRRDRYVRRRSALLEALIDTGLMPADSQDAKALVGCDPYALRAAALDEALNPYRLGRALFHLNQRRGFKSNRKAERKARDDKEGGKIAGGAKALDMVMHEVGARTYGEFLAGRDEKRVRMRADADGYDFYPERRHLEAEFDAIWAAQAPYYPALLTDAVRDRLRRIIFFQRPLKAPKVGGCTFFNEEERLPKAHPLFQERRLYEEVNQLEITKAGAPSRKLSLDQRDKIILKLKSAKTASFSGLFKLLKLADGENFNKASENRTGLIGDEISASFSDKKCFGDRWAHFEAGVQWSIIEAVAEEEDPVRLHDWLMASHGVSAEQAEAIGRVRLPEGHGRLGETASRKILAELKKDVVTYDKAVEAALGKSHSDFRTGEVVDQLPYYGEILSREIPPGSLDPNDDDEMRWGKITNPTVHIGLNQLRRLLNAIIKAHGRPDEIVVELARELKLGEKDKAEHNRRIGANTRAAEARSKKLLESGQRDSGSNRALLKLWEDLNPNNPLDRCCPFCGRHIGQLALFTDETEIEHIIPYSRSFDDSSANKVIAHRSCNREKGNKTPWEAWGHTERWTIIAEQVSRLHKSKQWRFAPDAMERFDQEGDFIARQLTDTQYLSRMARTYLSSLYPDTGGVYVIPGRMTAMLRRLWGLNELLPDHNYVENPHSGAPKNRLDHRHHAIDAAVVGVTTRSLLNEISKAAGRAEDQNLDKLFIDLPRPWEKFREDLRESLARIVVSHKADHGRKGVPAKGKDATAARLHNDTAYGLTGLTSDSGLPIVVHRVPLLSLKPADITDPIRIPDAALQRALWEATEGKSGKDFEAALVRFSRSDPVFKGIRHVRVREALKVIPIRDASGNAFKAYKGDANARFDVWRMPDGKWVSSWKDRDGKSHSGIISMFEAHQTGQPEQRPHPAAKRVLSLRQNDLVAVEPQGQPRKIMRVVKFSGGGQITFAEHHEAGPLKARDATSPDIDPFKYFYSSAGGLQKARARQIRIDELGRIFDPGPR

SEQ ID NO: 7820 - protein, 1112 aa, synthetic construct
  REGION 1..1112: note = Synthetic
MQKMALRLGLDVGTNSIGWALVEVNERSAFDEATITRGKIVDIGARIFSNGRDPKSGASLAVDRRAARATRRRRDRYLGRRSAFLQALVDHDLMPADADERKLIAEGRIARFRNGGGKYHPALPYELRARALTERLDPYEIGRALFHLNQRRGFLSNRKAERRTKENEQGKIKQGEYALDRAMAEADAETLGVFLHGRQTATDEHGRPDPKSTRVRLDSDSQTYDFYPQRRHVEHEFNRIWEEQVGYHPALLTDTACAALHRILFFQRPLKEAEVGVCTFVNSERRLPKAHPLFQERRLYEEINQLEITTPGEASRKLTLEQRDDLIRELRGARERSFTALGKRLKLQPGESFNKATDTRLKLAGNEIYAALAHKTRFGETAWANKSAEQQWQIVERLLEEEDPDRLHAFLTQDCELNESSARETAKVHPPEGHGRLGETATRLILAELKKDVVTYDKAVLAAFPGGHHSDFRTGEVLEKLPYYGELLSQDIPPGTQLASDPPEKRWGKITNPTVHIGLRQLEKLVNAIMAVHGRPDQIVVELARDLKLNDKDKEDHNKRIRKDTADAQRRSRLLRGVDASEERTGEPVAPDTGANRALLKLWEELNSANVADRRCPYCAEPIGMRQLFTGEADIDHVIPYSRSLDDSASNKVVAHRSCNRVKGNRTPFEKWGSDADRWDRITTQVARLHKSKQWRFGPDAMARVEKDGGFLARQLTDTQYLSRLAGKYLRSLYPEADGGGVYVIPGRMTAMLRRLWGLNSLLPDHNYVENKHSDAPKNRLDHRHHAIDAAVTAATTRGLLQRIARTAGLAEDRDLDRLFDDLEQPWPGFREELREQLLRTTVSFKADHGRQHAPSRHHDSTAGRLHNDTAYGLTGKTASDGRTPIVVHRVPLLGLKPGDISDPERIVDAALREELEKATHGRGGKDFEVGLKQLHRDGGIRKDKTGKPLFKGLRHVRIEEPLNIIPIRDDAGRAYKAYKGDANARFELWRLPSGKLVTKVVTMFDAHRPGNEDQRPHPAAKLMLNLRQNDLLAVERDGAAREILRVAGFNVQGRLTLAAPNEAGNLKERDATKRESDPFKYVYLSGGSILKAKARQVRMDPLGRIFDPGPR

SEQ ID NO: 7821 - protein, 1060 aa, synthetic construct
  REGION 1..1060: note = Synthetic
MATRLGLDIGTNSIGWCLFNLDGQGMPVGIRDIGVRIFSDGRDPKSGASLAVDRRDARAMRRRRDRYVRRRSALLEALIDTGLMPADAQDAKALAGFDPYALRATALDGALNPHLLGRALFHLNQRRGFKSNRKAERKAGDDKEGGKIAGGAKALDLAMHEAGARTYGEFLAGRDTKRVRMRAEGDGYDFYPERRHLEAEFDAIWAAQAPHHPALLTDAVHDRLRRIIFFQRPLKAPKVGGCTFFNEEERLPKAHPLFQERRLYEEVNQLEITKAGAPSRKLTLDQRDKIIRALKVQKTLSFSKMAGGQMLKLADGESFNKASENRTGLVGDEIFASFSHKNCFGGRWAHFDPGVQWSIIEAVAEEEDPVRLHEWLMATHGVTAEQAEAIGRVGLPEGHGRLGETASRLILSELKKDVVTYDKAVEAALGKSHSDFRTGEVLDQLPYYGEILSREIPPGSLDPQDSDEARWGKITNPTVHIGLGQLRRLLNAIIKVHGRPDEIVVELARELKLNEKQKEVHNKRINKDTRAAKARSDELVRLGQPDTGANRMLLRLWEESSPKNPLDHACPYCGRNIGVASLFDGTCDIDHIIPYSISLDDSAANKIVAHRACNREKGNQTPWDKWGETGRWPIIAEQASRLDSSKRWRFAPDAMERFDQEGGFIARQLTDTQYLSRMARTYLSSLYPERPSDRLPGEGVKGVYVIPGRMTAMLRRLWGLNDILRDHNYVENPHNGAPKNRLDHRHHAIDAAVVGVTTRSLLNEISKAAGRAEDQNLDKLFVGLPKPWETFRENLRESLDRVVVSHKADHGRKGVPAKGKDATAARLHNDTAYGLTGLTSDSGLPIVVHRVPLLSLKPADITDPIRIPDAALQRALWEATEGRSGKDFEKALVQFSKTNPVFKGIRHVRVREILSVIPIRDTDGRAFKAYKGSSNARFDVWRLPDGKWKSVTVSTFDAHQKQPKDTRPHPAAKKVLSLKQNDLIAIERDGGPREIMLVKQIWPTQVSLVGHLESGKLDERNKSPNDPFKFFSPAAGGLKKLKARQIRIDELGRIFDPGPR

SEQ ID NO: 7822 - protein, 1061 aa, synthetic construct
  REGION 1..1061: note = Synthetic
MQADGRTDGIGGAGTMRRLGLDIGTNSIGWCLIEDDARIVDTGVRIFSDGRDPQSGTSLAVDRREARSARRRRDRYIGRRSAFMEALVEHGLMPADADEAKLVAALDPYTLRARALDEALTPYEIGRALFHLNQRRGFKSNRKAERKTKDAEDGKIASGARALDMAMAEEGADTLGQFLARRDTKRVRMGGENQDYDFYPQRRHVEYEFERIWAEQAKHHAALLTETARAALHRILFFQRPLKAQEVGLCTFVHSERRLAKAHPLFQQRRLYEEVNQLEVTTPGAANRKLTLDERDRLILKLRNKRMVSFDSLAKELKLDPGQSFNKASETRTQLAGDEVRAVMGDKKRFGTDWEHFDRDRQWTIVERVMEEEDPDALHDFLTQEQGLDDDRAAAVAKVSLPEGHGRLGPTATARILDELRAEVITYDEAVRRCGWHHSDHRTGEILPQLPYYGELLTRDIPPGTQDPADPPEKRWGKITNPTVHIGLRQLEKLVNAIIAVHGRPDEIVVELARELKLNDKDKEEHNRRIRRDTAAAIKRSQKLEAEGFADTGANRMLLRMWEELNPANPLDRRCPYCGEPIGMRALFSGEADIDHIIPYSRSLDDSTGNKVVAHRSCNRAKGNRTPYEKWGHDEARWDAIATQVARLHKSKQWRFGPDAIARVEKDGGFLARQLTDTQYLSRLAGKYLGSLYATKDEGSVYVIPGRMTAMLRRLWGLNEILNDHNIVENKHSNAPKNRLDHRHHAIDAAVVAVTTRGLMQRIARTAGLAEDKKLDRLFPDLEQPWEGFREELRDKLLATVVSHKPDHGRKGKPAPGRDTTAGRLHNDTAYGLTGDTNAKGVPIVVHRVPLASLKPADIADPDRIPDPVLRAALARATESKSGKDYDAALARFAREDRQFAGIRRVRVREPLSVIPVRDKDGRIYKAYKGDSNARFDVWRMPDGKWVSDIVSMFDAHQPDQADRRPHPAAKKVLSLRQNDMLAIERDGGAREIVRVVKFSTTGSIQLAGSTEAGALKARDATPQDLDPFKYINSSAGGLKKIKARQVRIDPLGRIFDPGPR

SEQ ID NO: 7823 - protein, 1061 aa, synthetic construct
  REGION 1..1061: note = Synthetic
VTTALGLDLGTNSIGWCLYNGDSILDIGVRIFSDGRDPKSGASLAVDRRDARSARRRRDRYIGRRAALMKVMRQHGLMPRDKMAAKALEGLDPYALRVKALDEKLTLYELGRALFHLNQRRGFKSNRKADRVSKAGEDGKIASGTKALDEAMRILGARTLGEFLFGRDQKRVRMRPEADGYDFYPDRKHYEAEFDAIWTAQAAHHAVSLTDAARKAIHRVIFYQRPLKEQEIGYCTFAGWNGVPDDERRLPKAHPLFQQRRLYEEVNQLEVVTPGEGSRKLTLAERDALIMKMRDKKRISFTSLAKAIKLPAGSRFNKESENRKDLLGDEVRAALSDRKRFGSRWPAFDLIEQTQILDRLQDEEDPDALLAWLMRNYGVGEDVAIAIANSPLPEGHGRFGETATQMLLEKLQAEVVTYAEAAARAGFHHSDQRTGEGFDSLPYYGEVLTREIAPGKDDYGDALERQFGKITNPTVHIGMNQLRKLVNAIVAVHGRPDQIYVELARELKLNEKQKAEQSRRIKQNTDAARARGEKLIEMGQRDSGGNRMMMRLWEDLNPQNALDRRCPYCGGQISAEMLMNASVDIDHIIPYSRCLDDGAANKTVCHAKCNRQKGQMTPYEKWGNTDNWATIQDQVATMHRSKQWRFSPDAMERIERDGGFIARQLTDTQYLSRIAAKYLSALYTPDEGRRVYAVTGRMTAMLRRLWGLNELLPDHNWVENEHSNAPKNRLDHRHHAIDAAVIGATTPSMIQKISKAAARAAQHDLDKLFDGLPTPWDGFRDELRDKLLATTISHKADHGRKGTPSRHKDVTSGQLHNDTAYGLTGRTTAKGVPIVVSRKPLLSLKPGDLTDPERMTDHSLQDALYAATQDCDGKDFEKALRDFAKSDGPYSGIRRVRLCESLKVIPIHDKDGVAYKAYKGDGNARFDVWRMPDGKWITKWKDLDGREHSSVISMFDAHQHSHIEEKPHPAAKRLLSLRQNDLIAVERDGAAREIVRVVKFGSNGQMFLALANEAGPLKARAADGIDPFKYISTTANGLKKMKARQIRIDEIGRIFDPGPRE

SEQ ID NO: 7824 - protein, 1052 aa, synthetic construct
  REGION 1..1052: note = Synthetic
MRRLGLDIGTNSIGWCLIEDDSKIVALGSRIFSDGRDPQSGTSLAVDRRLARSARRRRDRYIGRRGAFLEALIAHGLMPSDADEARLVAARDPYELRMRALSEPLRPYEIGRALFHLNQRRGFKSNRKAERMAKDQEDGKIAAAAQDLDRAMADVGADTLGQFLHGLDTKRVRMNSESQGYDFYPQRRHYEHEFARIWEAQAAYHPALLTKAAKADLSRILFFQRPLKAPTVGVCTFVTNEERLPKAHPLFQERRLYEEVNQLEITTPGGAPRKLTMDERNTLILKLRNTGKASFDGLARLLKLQDGQSFNKASQTRTHMAGDEVFAVMSDKKRFGKRWGQFDADRQWQIIDRLMEEEDPERLQAFLTGECGLDHEQAAAVARAPLPEGHGRLGESASRRILAALRDGHNEGAPLTYNQAVEACGWHHSDFRTGECLDRLPYYGELLTREIPPGSQQPTDPPEVRWGKITNPTVHIGLRQLEKLVNSVIDVHGRPDQIVVELARELKLNEAEKEEHERRIRRDTAAAIARGQRLTAEGIADTGANRALLRIWEESNPENPLNRRCPYCGQPISPRALFSGEVDIDHILPYSRTLDDGIANKVAAHRSCNRAKGNRTPFERWGSDPARWEVIRAEVARMHRSKQWRFGPDAMERFEREGGFIARQLTDTQYLSRLAGRYLSALYPSMDEGSVYVIPGRMTAMLRRLWGLNSLLPDHNFVENENSAAPKNRLDHRHHAIDAAVVAVTTRGLVQSIAQAAGRAEDKDLDRLFEGLPQPWEGFREDLGANLATITVSHKPDHGRKGRPAANRDMTAGRLHNDTAYGFTGAMTADGKTSIVVHRIPFNSLKPADVANPDRIADQALHERLLAAVGGLTGKDFEAALARFARHDAVFAGIRRVRVREPLNIIPIRDRDGRIYKGHKGDSNARFDVWRLPEGKWVADIVSMFDAHQREERQRPHPAAKKMLSLRQNDIVAIEREAAPRELMRVVKFSSNGSLVLAPPNEGGPLKARDAQPIDQDPFKYTNTSASTLKKWKARQVRVDPLGRVFDPGPRE

SEQ ID NO: 7825 - protein, 1064 aa, synthetic construct
  REGION 1..1064: note = Synthetic
MRRLGLDIGTNSIGWCLVDYDDARESGYGVVDTGVRIFADGRDPKSGASLAVDRRDARAMRRRRDRYLGRRSAFLDALIEHKLMPADADEAKLIAEQDPYPLRARALHEQLEPYEIGRALFHLNQRRGFKSNRKAERKQKDAEDGKIASGAKALDQAMAEEGAETLGQFLAGREIKRVRMGGENQDYDFYPQRRHVEHEFDCIWAAQAQHHPALLTDTARAALHRILFFQRPLKEQQVGVCTFVNSEQRLAKAHPLFQERRLYEEVNQLEVTTPGAPARKLTLDERDALILELREKREVSFGRLGKRLKLDPDQSFNKASETRSHLKGDEVRAIMSDKKRFGDAWLHMDRDRQWLIVETLMEEEDPDRLAEFLKAQGLPEERIADTEKAARMLPEGHGRLGPTATALILEEHRKAVITYDEAVKRAFPHLHHSDFRTGEVLPTLPYYGELLTREIPPGTQLESDPPEKRWGKITNPTVHIGLRQLEKLVNAVIAVHGRPDQIVVEIARELKLNEKDKEEHNKRIRRDTAAAQQRSAKLQQEGIDDSGANRMLLRMWEELNPREVLDRRCPYCAEPIGMRQLFSGEADIDHIIPYSRSLDDSASNKVVAHRGCNRAKGNRTPWEKWGGTERWDVIAQQAGRLHRSKQWRFGPDAMQRVEKDGGFLARQLVDTQYLSRMATTYLSSLYADKKEGSVYVIPGRMTAMLRRLWGLNSLLPDHNYVENEHSNAPKNRLDHRHHAIDAAVTAVTTRSLLMQIARAAGRAEDKDLDRLFEDLPPPWDGFREELGDKLAAVTVSHKPDHGRRGRPAPGKDATAGRLHNDTAYGLTGEFAADGKTPIVVHRVPLLSLKPGDLTDPSRIPDAQLRDALYEATRDRTGKEFEQALLRIRERGIGKVDKNGRPLFKGLRHVRVREPLNVIQVRDKSGKSYKAYKGDANARYDVWRLPNGKWVHDIVSMFDAHQERAADRRPHPAAKKMLSLRQNDMIAIERDDSAVEIVRVVKFSTIGAIALAPANEGGALKARDAAPADTDPFKYIYSSGGGLKKLKARQVRIDPLGRIFDPGPR

SEQ ID NO: 7826 - protein, 1178 aa, synthetic construct
  REGION 1..1178: note = Synthetic
LASNRAKVKTTQNRRPTVTRNHHFSPHGMKRGLIGAPCCGRRGTRYFGFCAADTLLTCPGLGVNPAGQATVCGYSSCRAARLASIVGFQGTKRRGMTTTLGIDLGTSSLGWALLEDNLRIIDLGVIIFSAAAGAGRDPQSGAPLAEGRREARSARRRRDRFIGRRSALLGKLIALGLLPGDPPSGEGRRCNEAVPNAQTKALADIEPYDLRRRALSEPLSPHEIGRAIFHLNQRRGFKSNRKADRGRNEPETGKIAIAGQALTEAMGKRTLGQFLAERIDGGLPARVRMGGENQAYDFYPQRSHLEAEFDAIWQAQERHHPGLLTDTARAAIHRILFFQRPLKTPEVGYCTFAGMGGVPQDDRRLPKAHPLFQERRLYEEVNNLKIVSAGAAPRDLTRDERDMLVMALRDKKQMTFATLGKKVLKLAECERFNKESETRKDLLGDEVRAEMSDKKRFGDRWKHFPLERQLQIIDRLQNEENPYVLLDWLKSDCGLDEAAAVAVAKANLPEGHGRFGETATRRLIEALKAEVITYDKAADKAGFHHSDFRTGEVFDLLPYYGEILTKEIAPGKAEYGDDLERRYGKITNPTVHIGLRQLQKLVNAVIARHGKPDRIVIELARELKLNDKEKEAHQRRIRQDTAAAIRRGEKLVEAGHADSGANRALMRQWEELNPSNPLDRRCPYCGEPIGMAQIFNGLADIDHIIPYSKSLDDSPANKVLVHRACNRQKDNLTPHEKWGHDPDRWDIISTQVARMHRSKQWRFGPDAMERIERDGGFAARQLTDTQYLAKIAGKYLRSLYPTAEDGRVDVIPGRMTAMLRRVWGLDSLLPDHNFVENKHSNAPKNRLDHRHHAIDAVVAAVTSLALMQKISKAAGRAEEKELDRIFENLDQPWPGFHEELGERIRRTVVMHKPDHGRSTKPSRHRDVTAGKLHDDQPYGLTGMTGKDGIMPIVVKRIPLSKLTPAQISDPEGIPDSALRNALWLATRDCDGKEYSRALERFSKDHPVFKGIRRVRFRSALTVIPILDRHGKPYKAVKGNGNDHIDIWRLPNGSWVSDVVSTFDAHSMAAGDRRCLPLAKERGFDHPAAKKILSIRQGDILAIERTPDLVDLFVVRNFNQAGRLTLAGVNDGGNLDARHNSSEDPFRYIYISPGSLKKAKARQVRIDPLGRVFDPGPRE

SEQ ID NO: 7827 - protein, 1084 aa, synthetic construct
  REGION 1..1084: note = Synthetic
LESSHPPSAVGWLRERARAAEVVLAILRGLDMRRLGLDIGTNSIGWCLIEDDAKIVAIGSRIFSDGRDPQSGTSLAVDRREARGARRRRDRFLGRRSAFLATLVEYGLMPNDTDQAKLVAERDPYAMRARALAEKLHPYEIGRALFHLNQRRGFKSNRKAERKAEDTEDGKIAEAAKALVQAMAEEGAETLGQFLAGRETKRVRMDSERQIYDFYPQRSDIQHEFDCIWRAQAAHHPDLLTDTARDALARILFFQRPLKEQEVGVCTFVTEERRLPKAHPLFQERRLYEEVNQLEVTTPGEKSRKLTVQERDALVLELRDKREVSFARLAKRLKLDDGQSFNKASQTRTHLVGDEVRALMGDKKRFGSAWAHLDRVRQWEIVERVMEEENPETLHAFLTRECGLHDEHALATAKAPLPEGYGRLGETASRRIMEALRDGHDNDAPLTYNQAVEACGWHHSDHRTGEILDCLPYYGELLTREIPPGSQLPTDPPEIRWGKITNPTVHIGLRQLEKLVNALIAVHGRPDQIVVELARELKLNEKEKEEHEKRIRKDTAAGISRGQKLTGEGFADNGANRALLRIWEEANPANPLDRRCPYCGQPIGMRALFSGEADVDHILPYRRTLDDSIANKVVAHRHCNRSKRNLTPYEKWGPDKNPAQWDVIAAQVARMHRSKQWRFGPDAMERFERNEGFIARQLTDTQYLSRLAGRYLSALYPSKDDGSVYVIPGRMTAMLRRLWGLNSLLPDHNFVENEHSGAPKNRLDHRHHAIDAAVVAVTTRSLMQQIAHAAGRAEDKDLDRLFEDLPQPWDGFREELGERLSAVTVSHKPDHGRKGRPAKNRDVTAGRLHNDTAYGFTGAFAIDGKTPIVVHRVPFRSLKPADVTDPKRIADRALGDRLRAYTLGLTGKDFESALARFAKHDTVFAGIRRVRVREALNVIPIRDRDGKVYKGHKGDSNARFDVWRLPDGKWVSDIVSMFDAHLPGERARPHPAAKKILSLRQNDMIAIERDGGPPELLRVVKFSRDGQMALAPHNEGGSLKARNSLPVEQDPFKYVFSSAGGLKKLKARQVRIDPLGRVFDPGPR

SEQ ID NO: 7828 - protein, 1155 aa, synthetic construct
  REGION 1..1155: note = Synthetic
MYRLGLDVGIKSVGWCVLECDENGEPIQINALNSRIFDAAEQPKTGASLAEPRRNARGLRRRIRRKSFRLERIRKLFSENGIVLFEAQDDLICLKDEYKNLDVVKLRSDALDKKLTEAEFARVLYSLARHRGFKSNKRVVVTDDDDGEKKGKGKEKDEGKLLSSIRESEEKMRESGMRTRGEQLYKRYLMEGKPVHNKGGDYSMCVSRDILVKEIELLFEKQKEFGNTFATDKNKEKYLDIFLSQRNFDEGPGKGSQYTGSHDVKKCEIYRDEDVAAKGTYTSEWATIYQKINNISIICGGDRRRLSNEERQIAVELAKKADKVTYKAFRKAIKLDDDYRFSALNYSEKKKQGKKKNEGESKSDVVEINDVVDSLACEDKGEFITAKNSNKIIKALNDKLKSDIELIDEIAEICTKYKSENLFRSAIAKSKIIGGRLDEETIEKLSKIDMKGYGHLSLHVLREILPYLEEGMVYSDAMQKAGHNHSEHNFEKQKYLGTKEVYDAIGGVTSPVVKRALSQTVKVIDAVIRQYGSPYAINIELARDMSMTKDERDKLKKENDARAVKNEAIRENIAKLNAMPNATNVLKYKLYEEQDHKCAYSMETLDINHLFEDGYYEIDHIIPYSRSFDDSFNNKVLVLKRENQNKRNSTPVEYFERIGRDYDEVLAFWKAVYQKRNRKKLEFLQKKEINESEWKNRALNDTRYASRMLANLIKDYLLFDEKSKDQYGRVETVKGAITSYLRRFWGVPKIREDGDKHHAVDAAIIACVTPKTKNKIERYNQIKESRKMRNGQYVLEDGEICDSDYYDKNSHLVLPYPYKEFINELDARVMDEPVLMQNKLRLLGFNENYLMKAKPFVVSRMTSRKAKGCINEATVFSSKYADNKYPTVCDGNNVIVKRTALANLKLDKNGEINGYFQPEGDAALYNALKQRLVEFDGDAKKAFATPIRKPCNSGQGNIVRTVKTYETYTGGGMLLEKNKGIVKNDGMIRVDLYSKDGKYFGVPVYVADLYRGELPKRAATNGKPQNEWRVIDDSYTFEMSIYQDDLLRIENKKGIEFKKNKDVENSAKAASKTITDDFVYFIGFDRSTVSIKVEDTTGCYFARGVGIQNIGKITKCEIDVLGNVQEIKKRPKQPQPLKMLTDKEKAEKRKTNQNK

SEQ ID NO: 7829 - protein, 1131 aa, synthetic construct
  REGION 1..1131: note = Synthetic
MYRIGLDVGIKSVGWCVMECDANGEPLHIKALNTRIFDAAEQPKTGESLALPRRTARGQRRRTRRKSSRLKSIRDLFSANGIAIFDETADGCVLPKKEYVNIDVLKKRAEALDKPVTKEEFARILYSLARHRGFKSNKKPGAKTAEDGKLLAAINENERKMQEKGLRTVGELLYREFEEKGLAVHNKGGDYSRCISRDSLIKEIKLLFEKQKEYGNGFATEENLEKYLGYFSKQRTFDEGPGPGSKYSGGHEVKKCQFYKNEHCAAKGTYSCELSTACQKLNNLTLVIGGDRRLLTDEERKTVLLLAEKKDALTYKDVRKALGYVGNEDMRFGSLNYASAAKKKKDGAITDDSDIFKCESAKFISLKNSNAIRKTLPDELKNDIELIDEIAEICTKYTNETLFRNAVKESGIINGRLKDDTVDELLSLDMKGYGHLSLKALREILPYLKAGDVYSVACEKAGHNHSVSEHERAKYLGKNPEVREILDDITSPVVRRAMSQTIKVIDALIREYGSPCAVNIELARDMSLNFSDRKKEERDNAERAKVNEEIRKSIAAAGAVPNATNVLKRKLYDEQDCKCAYSGKTLDINRLYEDGYYEIDHIIPYSRSFNDSFNNKVLVLKSENQNKRNNTPYEYFLRTGRDWEDFSARVKAIYQKRNNKKMELLLKTTVNEDEWKSRAINDTRYASRLLANVIKDYLLFDENAKGKKRVLTVKGGITSYLRKFWGIQKVRSDGDKHHAVDAAVIACYTDKIGHSIERYNQIKESNKIGNGAYMLKDGEIVSSEYYDKNNNLILPYPYNNFKDELIARTEDSPVIMENALRRIGMPEDYIHNAAPFIVSRMTHRKAKGAIHEATVWSSKYVVNENPKIHDGEKIIVKRTPVENLSLDDKGEIKGYFNPDGDRLLYEAIKTRLKEHGGKGKDAFAVPLRKPCYSGEGNIVRTVKTYEKYFGGGVVLEKNKGIAANGSMIRMDLYSKDGKYYGVPVYTADLYKGELPKRAATTGKSKNEWRVMDDTYTFEASIYPSDLLRIDSKKDIRMTKKRKDQKSQKEEKYSFQGGYFYYIAFNISTGAIDIEDTTGCYKTTIGIQNLGKIVKCEIDVLGNVTEIKKRPKAPEPLKLLTESERKEKKKFK

SEQ ID NO: 7830 - protein, 786 aa, synthetic construct
  REGION 1..786: note = Synthetic
MFSIIACAKKMKKDGTEETPNPFKCEEAKFISLANSNKIKNCLREELKNNIEVVDAIAEICTKYTSENLFRKAIIDSNLLNGILTEEEIVKLLDIDMTGYGHLSLRALREILPYLQEGYVYSEACKKAGHNHSQFDTSKSKYLGKNDDVRAQIDEVTSPVVKRALSQTIKVVDAIIRKYGSPFAVNIELARDMSQTRQERDKADKENRDRAADNERIKAKLEGEFNVRISSTNLLKYKLYEEQNGKCAYSGETIDLNKLFADDKYCEIDHIIPYSRSFDDSFNNKVLVLSKENQNKRDSIPYEYFTRIGRNWEEFEGFVKTTFKYNRRKAELLLKKKADEEGWKTRALNDTRYASRMLTNLVKDHLLFDEKSKNRPVLSVNGKITSYLRRFWGIQKIREDGDKHHAVDATIIACVSSGIIQKLTNYNYVKESRNMKNGEYVLEDGELVSSEYYDKHSNLVLPYPYPKFRDELIARVADNAVEMEIKLRDIGMDDEYVSAAKPIVVSRMPHRKVKGTMHEATVWSSKYIDNDNTKIHDGESILVKRTPIENLKLKNGEIENYFNPESDKLLYDAIKQRLKDFDNDGKKAFAEPLYKPCASGQGNIVRTVKTFEKYYGGGMQIDKNKGVVANGSMVRVDLYSKDGKYYGVPVYTADVYKGVLPNRASTAGKARKDWRVIDDTYTFEMSIYPNDLLHIESKKEITLNKDLKNEFSPKSDEYCFTKGLVYYNMFDISGARFTIEDTTGCYKGRTAIQGLAKITKCEIDVLGNVVEIKNKPKAPQPLCMKK

SEQ ID NO: 7831 - protein, 948 aa, synthetic construct
  REGION 935..940: note = misc_feature - Xaa can be any naturally occurring amino acid
  REGION 1..948: note = Synthetic
MYRLGLDVGIKSVGWCVLECDENGEPIQINALNSRIFDAAEQPKTGASLAEPRRNARGLRRRIRRKSFRLERIRKLFSENGIVLFEAQDDLICLKDEYKNLDVVKLRSDALDKKLTEAEFARVLYSLARHRGFKSNKRVVVTDDDDGEKKGKGKEKDEGKLLSSIRESEEKMRESGMRTRGEQLYKRYLMEGKPVHNKGGDYSMCVSRDILVKEIELLFEKQKEFGNTFATDKNKEKYLDIFLSQRNFDEGPGKGSQYTGSHDVKKCEIYRDEDVAAKGTYTSEWATIYQKINNISIICGGDRRRLSNEERQIAVELAKKADKVTYKAFRKAIKLDDDYRFSALNYSEKKKQGKKKNEGESKSDVVEINDVVDSLACEDKGEFITAKNSNKIIKALNDKLKSDIELIDEIAEICTKYKSENLFRSAIAKSKIIGGRLDEETIEKLSKIDMKGYGHLSLHVLREILPYLEEGMVYSDAMQKAGHNHSEHNFEKQKYLGTKEVYDAIGGVTSPVVKRALSQTVKVIDAVIRQYGSPYAINIELARDMSMTKDERDKLKKENDARAVKNEAIRENIAKLNAMPNATNVLKYKLYEEQDHKCAYSMETLDINHLFEDGYYEIDHIIPYSRSFDDSFNNKVLVLKRENQNKRNSTPVEYFERIGRDYDEVLAFWKAVYQKRNRKKLEFLQKKEINESEWKNRALNDTRYASRMLANLIKDYLLFDEKSKDQYGRVETVKGAITSYLRRFWGVPKIREDGDKHHAVDAAIIACVTPKTKNKIERYNQIKESRKMRNGQYVLEDGEICDSDYYDKNSHLVLPYPYKEFINELDARVMDEPVLMQNKLRLLGFNENYLMKAKPFVVSRMTSRKAKGCINEATVFSSKYADNKYPTVCDGNNVIVKRTALANLKLDKNGEINGYFQPEGDAALYNALKQRLVEXXXXXXLKAEACRI

SEQ ID NO: 7832 - protein, 1131 aa, synthetic construct
  REGION 1..1131: note = Synthetic
MYKLGLDIGIKSVGWSVLDCSENGEPTKIIALGSRIFDAAEQPKTGDSLAEPRRMARGNRRRLRRRAARLIYIRRLFADNGIDIFDKNDDTQIKEKLRNIDVLSKRVEALDKCISEEEFARVLYSIARHRGFKSNKKKGARKEEDGKLLEAINANNAEMKKLNLRTVGEYLYKEYGEKGKAVHNKGGQYNMCVARDDLEREVELLFAKQKEFGNKFATDDNLEKYLTYFTKQRTFDEGPGEGSQYSGSHAVRKCTFYKDEDCAAKGTYSNELSTAYQKINNLKILVDGDRFNLNEEQKAVIINKAHEKETLTYKDVRKLLGYDKNELVTFSVLNYSVRPKKKKDGTIEEVDPFKCEDAKFISLANSNKIRKALPNELKDDNALIDEIAEICTKYTNENLFKEAIANSKIINNRLSNEVIDNLLEIDMKGYGHLSLKALREILPYLKDGDVYSDACDKAGHNHSQFNNEKGKYLGKNQEVREAIDKLTSPVVKRALSQTIKVVDAIIREYGSPYAVNIELAREMAKSRKERDEITKNNNERAADNERIKAQLKEMGLTANSTNVLKKKLYEEQGQKCMYSGKDIVFERLMKDDKYCEIDHIIPYSRSFDDSFNNKVLVFASENQNKKNDIPFEYFERIGRDWTEFESRVKTIYQKRNAKKLELLLKKKFDEEGWKNRALNDTRYITKMLSNLVRDYLIFDEKAKKKCVLTVNGKITAYLRRFWGIQKIREDGDKHHAVDAAVIACVSDKIIQKVTDYNYVKESRMMNDGKYVLEDGEIASAEWYDKKNNFILPYPYSVFRDELAARTLDSVTDMKNRLREIGMSEEYIESAKPFIVSRMSHRKAKGVIHEATVWSSKYVDNKNAKIHNGESIIVKRTPIENLKLDSNGEIKNYFKPNGDIALYNVLKTRLIEFNGDGKKAFATPIYKPCNKDKKPNAIRTVKTYEKYFGGGMKIEKNSGIVANGSMIRVDLYSKDGKYYGVPVYVADLYKGVLPKSAATAGKPRSEWRLIDDTYTFEMSIYPNDLLRIESNKEIKMTKEYTDEFSPKVNEITFMDNIVYYVKFGISTASITIEDVAGCYLAPSVGIQNLKKITKCEIDVLGNVVEIKNKPKSPQPLKLITEQKRREKRKQNK

SEQ ID NO: 7833 - protein, 1048 aa, synthetic construct
  REGION 1..1048: note = Synthetic
MGKRFAFDIGTNSLGWAVLALDDRQQPSDLIDLGVRVFDDGREPQKKTSLNEGRRLARGARRRRDRLLRRKADFMAALIDSSLMPADETARKALESLDPYALRRKGLDQALTAHELGRALFHLSQRRGFRSNRKANPGEDEDQGRIRTAIDATRQAMEAEGARTLGELLDWRHERREWVRARLRGEGARAGYVFYASRDLVAEEFDALWQAQGDQLNLDETTRLTLRDILLRQRDLRPPIVGFCTLEHGDPRAPWALPLTQRFRILKELATLEVGVPGQPRRRLTVDERDRLLERLRRSKTVTFDSMRRTLGLDADHRFNLESEKRTGLSGDETAARLAHKTAFGKAWHSLSLTDQTAVVERLLAEADEPTLVAWLIAHHGLDQAAAVRVARTALPAGHSRFGRIVLSDLVPVMQAEAEAIVDAEGHGCAAPLHESTALARLGRHHSDLSDHSARPFLPYYGEVLSRHLAGSGDARARKEDRWGRVPNPTVHIGLNQLRTVVNALIKAYGRPDQIIVELARELKQSRRDRDLETRRQGENQARNDRHRRELAELGLEDTGENRLRLRLWEELSRDPTRRCCVYSGRPISRALLFSPEVEVEHILPFRRTLDNGAANKTVSLREWNRLKGNRSPWEAFHGHPDWSAILARAQDLPGNKRWRFEPDAMDRFEGEQDFLARQLTDTQYLARRTAEYLGCLYAKDEGVRVWVTPGRLTAMLRGKWGLDGLLSDHNRKTRTDHRHHAIDAFVVGCTDRGLLNRVARAADETRPRLIEDMPAPWPAFRESLQARLSTVVASHKPDHGTQGRLHEDTAYGHVRDPASEGGCNLVFRKPVASLTTSEVGRIRDRAIRAKVLAWLEEAKALGLSHMQAMARFPEESVTRYGEANPVRRVRLLKTEAAVHSILDKSGHPYKALIPDKNHRIEIYERAGRWHGEGVTVLAANQAEPAPWRSRHPDARPVMVLHKGDLLETEVEGRRAIVRVVRLEVSARRVRVVGHTEAGDFGARDRDPEDDFGWRGWRLLTFARMQQTATRRVRVDPIGRIRPVPPPL

SEQ ID NO: 7834 - protein, 1021 aa, synthetic construct
  REGION 1..1021: note = Synthetic
MEKWEEIMEKIPNYTLGIDMGTNSIGWAVVGHDDNLKPTGLIACGTRIFQEAVDPKSRIPKNQARRAARAARRLVVRRKMRLSSVLNILLKTGLLPNNVDEREKLFADNKSFDPYQLRKKALYNKLTPYEFGRVLYHLAHRRGFQSNRKVSSKDDGEVKISINSLHQEIKNADCRSLGEYLASQPTKRNRYTDRSMYQEEFELVWQEQQKHYPDLLNQTLKVSIHKAIFFQRPLKVQKYLVGKCTLEPLKKRASRALLEVQRFRILQDLNNLTIKNPVTREYRIPTNNERGKLLELLERQKTLSWNKARTALRLHKGEIFNLEEGKKKELIGSRTAFALRSILKKHWDEMKLAKQNDLITDMLTIDNERGFLNRMKSEWGFDSETAEELAKTELEPGYARLSLKAIRKIIPHLEQGMPYDKACNAAGYNHSMLNKQAAGEKLGAPPYLRNPVVQKALYETRKVVNAIIHRYGKPTVIRIEMARDMKLTRRQKEEWQKKQKENEKINDKARDILQNEFEIQNPTRADIQKYNMWIECSMTCPYTGAIINREKLFSPEVDVEHILPYSRSLDDSYMNKTLCMAYENRATKHNRTPYEAYHTDAQKYPAILQRIKTLPWPKRRRFEQKEIDTDKFVERQLNDTRYICVEVKKYLQQIGVRIEISKGEATAALRHRWNLSRILSEDGSLEKNRADHRHHAIDAIIIALTSTSLFQKLSSLSAQSGVALSESGFHLEKPWSSFYEDVDKKVRHIIVSHAPSHKISGALHEGTAYGFSEHEECFVYRKPLGVDITLAQILKIRDKYVKELVIARLEKFEPEIRKAIDEAIPKKSRYKITDKQAKDLIKKAFGNSEYPLLHKNGKTPIKSVRIVDNTLKSNMLAVKNESGQAYKYYPFGNNHHIEIIKHTKTGKRDGIVVTTAEAARRARNNKIPIVQKLPPWEKEGTIFDECWEFVMSLAINDMLMLDKDNIRQYFRVQKISSNTQIFYLSHAAATLDESTSKMPNAFEYRKVIVDVLGNIIACKND

SEQ ID NO: 7835 - protein, 979 aa, synthetic construct
  REGION 1..979: note = Synthetic
MSKYTLGLDMGANSLGWAIIGNSKDEQPTEIVDCGTRIFQEALDAKTKVSKNQARRTARAMRRQVARHKMRRNAALRYLTNNNLLPADQVELKKILTDNKRFDPYQLRKKALDEKLQLCEIGRIIYHLAQRRGFQSNRKVSSPDDGIIIKSISELKKEIENSNSRTLGEYLANQQKKRGLYTDRDMYKEEFEKIWENQQNYYPDVLTPAYKVILHKLIFFQRPLKLQKYLIGKCSFEPSRKRVSKALLEYQRFRILQDINNLKIKDTKTRDYRSLDSDEYKKLIDVLERQKTISWNKARTILGLHGGEIFNLEEGGKRELIGNRTAYAVRSKIGDKWDGLPEKEQKELITDILTINDENGLLNRMKQHWGFDEKTAEAIAKIELESGYASLSLKAINKILPYLGKSMRYDEACIKAGYNHSNIDNAKKIVDELKEPPYLRNPLVQKALYEVRKVVNAIIRKHGKPSRITIEMARKMKLSKKQKEKLSLNMRDREKKNNSIKAILQNDFGIQNPYKEDIQKYQLWEECGAVCPYTGDSISREMLFSQEVDIEHILPYSKSLDDSYWNKTLCIAKENRQIKHNKSPYEAYSADSKKYEEILKRVEKLPWNKRKKFEQKNIDTDKFIERQLNDTRYISTEVKKYLFQLGTPVNVTKGEATSVLRHRWKLNMILSVDGNKKNREDHRHHTIDAIVIALTSRSLFQKLSKLSAESGKSLSEHGFNIDAPWHSFYKDVDEKIQNIIVSHSPTRKITGAFHEETAYGYNEKEDYFVYRKPLSGITKAQVEKIIDKKVRQLVEERINNFNGDFKKALSNSSDPLFHVDGKTNIRSVRIASNFNRNSVYGIRDNAEGEYKFYKYGNNHHVEIIEDMQTKKRKGIFVTAMEAARRARIDKTSIVNRNHGDKYKFIASLAINDLVEIDMQDEKRYYRVQMLDGSNQRITLRLHTAATLDDKKTMLVGSANRLLFKKIMVDTLGCITYCND

SEQ ID NO: 7836 - protein, 996 aa, synthetic construct
  REGION 1..996: note = Synthetic
MMGNFTLGLDLGTNSIGWALIDFDDNQQPQNLIACGSRIFQEAVEAKTGTPKNHARRAARAARKLVARRKQRRTKLLNLLVCHDLLPQDEAERNALLLDNQANNPYQLRKRGLDEKLEPFAFGRALYHLAHRRGFQSNRKAASDEDGKVKTAISALRAEMQGHTLGAFLADQPTQRRRYTDRAMYAEEFEQLWSKQTIFAPEQLTQALKVEIKNSIFFQRPLKSQKHLVGKCTFEPTRKRAAKAILLAQHFRILQDVNHLAVKNPITREFRPLTQDERNKLAEALDKQKGMNWSAVRKVIGWNKKDSLHEGETFNLEEGKKDKLIGNRTACDLRGALGDRWDAFTAPQQDDLVTDLLTIDNPDGFLKRMKTHWGFDDATAEALATTELEPGYARLSSKAMRAILPHLEQGMIYSDACKAAGYDHSNPNQRTITDKLGLPSNVRNPVVQKALFETRKVVNAIVRKYGKPAVIRVEMARDMKLSKRQKEELQKEQNKQKKANELAEGILRKEFGIQQPARTDIQKYNLWLECKEVCPYTGTVISREMLYSPEVDVEHILPYSRSLDDSYMNKTLCMATYNRQTKLNNTPYEIGQGDPVAYAEIFQRIKTLPFPKRRRFEQKEIETDKFIERQLNDTRYICVEVRDFLQQLGAPVEVSKGEATAKLRGRWKLNTLLSPGGGNEKNRADHRHHAIDAVVIALTNRSLFHKLSRLSAQSISFDKSRFDVPPPWDDFYDDVYEKIDKVIVSHAPTRKISGALHEATAYGHFKEEIADPKTGKFSIEDRFVYRKPLTTLTANEVGKIRDAKVRELVEARLAQFGNNSKAAFGDPNEPLLHADGKTPIRTIRLTTNFNKTTTHAIQKGQDRDYKFFKYGNNHHVEIIEHVETGKRKGIFVTAMEAARRARGVANTEKSNIVQRNHGDGWKFVMSLAVNDMVRTEDTQAIYRVQKLDGSNNRFTLRSHNAATLDDKQTGVDKTPNLFKGTKIIVDPLGNLTQCND

SEQ ID NO: 7837 - protein, 990 aa, synthetic construct
  REGION 1..990: note = Synthetic
MAQTLGLDLGTNSIGWALIDHDAEDRPVRVEACGVRIFQEAVDAVRGKPKNQARRAARMARRLVSRRRRRREKLLRLLLSNGLLPPDWLDRTSAESHYNALGNPYELRRKGLDQPLIPYEFGRVLIHLCHRRGFESNRKSKPKEEGEIKQAISQLQQAIQNAGCRTLGEFLAGQQKKRERHTGREMYRQEFELLWESQSRFHPTILTRDFKVVVHNIIFHQRPLKVKSGSVGRCTFEPRRFRASRAWPDAQRFRLLQDLNHLQIKSPTTREYRHLSSGERDKLLRLLEQQKTVSWKKARRTLGLHEGELFNLEEGKKEELLGDQTSYALRKVLGEKWNELSKEQRDLLVCDLLTIENEAGLLNRLHTWWGLEKELAENLAQIELEDGYFRLSLKAIRKVLPHLEQGLTYDKACAAAGYVHTGSGGGTGAAKLGNPPQLRNPVVQKALYEARKVVNTVIRQYGKPSVIRVEMARDMKLSKAQKIALAKQAKQNESLNKQAEEALRARGIQQPSRDDKVKYRLWKEAGGVCLYTGQPIGEAMLFSQDVDIEHILPYSRTLDDSYMNKTLCLARENRTIKHNRSPYEAYSSSPEKYADILQRIRALPCFPWSKRRRFEQKEIDTEGFITRQLNDTRYICREVKDYLATLGVTVEVSKGEATAWLRHTWGLNRILAGDGAIEKNRNDHRHHAVDAVVIALTSRRLFQHLSKLSAQQHGPASLRRLPIGEPWPDFYPTVNDKIQSIVVSHAPVHKIRDAFHEDTAYGYNAATRSFVYRVPLDSGFKETAIPQIRDAAVRELVTARLDETGGDIKRAFGDPTNPLRHVDGVTPIRSVRIKARVSRETVAPVRDRNGAEYKFFKYGNNHHVEIIEHQATGKRQGIFVTTMEAARRARIAKLPIVQRQPPWADGGKTYGEGWSFVMSLYINDLAKIENPGGVKLMRVQKLDGSNGRVYFRDHADARTERDSEYQKSVLSLRCSKIQVNALGDVSPAHD

SEQ ID NO: 7838 - protein, 997 aa, synthetic construct
  REGION 1..997: note = Synthetic
MGNFTLGLDLGTNSIGWASIDFDDNQQPQNLISCGSRIFQEAVEAKTGTPKNHARRAARAARKLVARRKQRRTKLLNLLIRHGLFPQDEVERNALLLDNQANNPYQLRKRGLDQKLEPFAFGRALYHLAHRRGFQSNRKAASDEDGKIKTAISTLRAEMQGRTLGAFLADQPTQRRRYTDRAMYVEEFEQLWRTQASFAQEKLTQALKVAIHNSIFFQRPLRSQKHLVGKCTFESTRKRAAKAILLTQRFRILQDVNHLAVKDPITRDFRPLTQDERSKLAETLDKQKSMTWGAVRKVLGWNKKDSLHEGETFNLEEGKKDKLHGNRTACDLRSVLDDRWDALTAQQRDDLIIDLLTIDNEQGFLNRMMNHWGFDDATAESLAKIELEPGYAHLSAKAMRAILPHLEQGMIYSDACKAAGYDHSNPNQRTITDKLGLPSNVRNPVVQKALFETRKVVNAIVRKYGKPAIIRVEMARDMKLSKRQKEELQKEQNKQKKTNDLAAEILRKEFGIQQPTRADIQKYNLWLECKEVCLYTGTTISREMLFSPEVDVEHILPYKRSLDDSYMNKTLCIATFNRQVKIDNTPYEIGQGDPVAYAEIFQRIKTLPFPKRRRFEQKEIETDKFIERQLNDTRYICVEVRNFLQQLGAPVEVSKGEATAKLRGRWKLNTLLSPDGSNEKNRADHRHHAIDAVVIALTNRSLFHKLSRLSAQSISLDKSRFDIPPPWDGFYDDIYEKIDNIIVSHAPARKISGALHEDTAYGHFKEELVDPKTGKISIEDRFVYRKPLATLTANEISKIRDAKVRELVEARLAQFGGNSKTAFGDPNNLLLHADGKTPIRTVRLVTNFKKNTTHAIRKGQGLDYKFLKYGNNHHVEIIEHMETRKRKGIFVTAMEAARRARGAGNTEKSDIVQRDHGEDWRFVMSLSINDLVSIQNADQARIMRVQLFDASNGNIIFRDQRSATLDDKLFRYQTKAHLLECQKIAADPLGNLTPCND

SEQ ID NO: 7839 - protein, 1118 aa, synthetic construct
  REGION 1..1118: note = Synthetic
MAQKSSYSPKRYSLGLDIGTSSVGWAVLDLDKERIHDLGVRIFERPEVPKTGKSLAEPRRIARSARHRLRRRRQRLNYLKRFFIDNNLISESRISDILSPTHPKKWRPIYDPYTLRIKGLNEKLSPEELFVALYHIAKRRGYKSNRISIEEQDVEGSQVLSAISENKLLLEKYKTKSVAKVLTLDEKFKNNKRNKTSTYKNSFVRKNFEDEVMLLLESQKKFGLKLPYEKIQTLLYGNVKNGNYNGIFSQRPFMTRELIEKMRGNCEFEPEKPRAPKASYSFELFRLAQNLSHLRIVVDQETRQLSEDEIAKIIEKAKNVKVLKYEHIRDILGYKGDQSFSFAQGMIRGKIKNDDKKNGEGNKFDSMIFYHTVKKAFEQHPKDWSILAANNFELLDRTGLILTVNKDDSSLRRELSKLNISTNAIESLLPINVSSFVHLSFESLHKITPWLLKGLNYNESVERAGYSFSQNLSGNKKELPPLSEKQAAQITNPVVKRAVSQTIKVVNAIIRKYGIPYSVKIEAANELAKNAQERDKIKKIQDENAAYNEKIKQKLINEFNIPTPTGLQITKFKLREQQNGVSIYSGKEIRLENLFADEHYGEIDHIIPFSRCGNDGLNNKVLVFADENQEKGNLTPYETWGGDNQKWIQFEARVRATAGLPAAKRDRLLSKSKPVEDWNVRALNDTRYISRFLRQYIRDNLDFPKIEGKTGTQRVFSPSGPITSYLRRVWRVGNKNRDDNNLHHATDACIIAATDPGIIQKVSSLNKYYELFKYSDKNEVIDKLTGEVLNRNQFEQHIADLEPWDDFGKEVRKRSELYNTPSELHNELTGLKNYDEEFRLSTLPIFVSRMPKRSGKGSTNSETFRSPKIVEGYLDEKGRPAIARKQRVPLRSVDLKKLYDSPIRETDPKLYKILEQRLKDFNDNPVKAFAENIYKPTKDSKCGNIVRSIKIYNTRDSKSGFLVNEQRAFVNNGKTIRLDVYKRKNYKGIYEYYFTPVYTHLINTQKIEVLPTPTGRSKKEKADFDTIRTDDGEIYATLKNGFIKQFSIYPNDYVRIYFGNEIVEGYYVKYNTNDGSLKLIKHSETSKNDNDLISKSAKTATLIERYDISVLGDNYRWL

SEQ ID NO: 7840 - protein, 1115 aa, synthetic construct
  REGION 1..1115: note = Synthetic
MKYSLGLDIGTTSIGWAVIDLDNERIHDVGVRIFEKPEDPQSGKSLAEPRRTARSTRRRLKRRRQRLNTLKAFFVEHRLLTREKIEELLAPNHQYDPYEIRTRAVVEKVSNEELFLALYHIAKRRGYKSNRKSLEEKDTEGSRVLSALSDNAQILASYPSVGTALRHDAKFTDHRRNKRDDYTNSFGRANFLDETKKIIETQQANGLELSNDAIKELLFADEHSGDFSGIFSQRPFMTSELIQKMRGTCELEPSQPRAPRASYSFELFRLAQNLSHLRIVISGETRALTPDEIAQIVEKAKNIKTLKYTHIREVLGYKNNPDFSFARGMIRGKVKPEDKTNGEANKFDELTFYHAVKSALKDSPADWSRGESNPELLDTIGEILTINKDDINLQKALAEIELSPESIANLLRLNFSGFGHLSLRALHNITPHLLDGKNYDEAVVAAGYRFSQTLSGDKTKLPPLNEQQSQQLTNPIVKRAVSQTIKVVNAIIRKYGMPTRIGIEAAGDLSKNFQERGKIKKSQDENAATNEKIIDRLKNEFGVATPTGLQITKFKLYNQQNGECMYSGKQLNLNQLFADERYGEIDHIIPFSRCGNDGLVNKVLVLTEENQNKGNLTPYEAWGHDEAKWAEYEARVKATFLPFGKKDRLLTKSPPAEEWNERALNDTRYISKFLRRYFRENLKPTREEDDKGKQWVITPSGPITSYLRKRWQVGSKSRKENNLHHATDACIVACVNQGAIQKISSLNKYYELFPKGGVETDEVVDKLTGQYVHRGDLEQHIVDTLPWEDFGKEVRLRTGTERNKPYATPTELHEALIGLGNYDDGFRLSVKPIFVSRMPKRGGKGSTNQETIRSPKVVEGYENDKGGNVIARKQRVALSSLKLKDLEDSPLKDEYNRTKSKDSSGMKSLYEILKQRLEDNGDDPKKAFAEPVYKPTKTGEQGNIVRSVKVYDTLKSKTGFYINDGKAFVNNGSTIRLDVYKRKNFKGEHEYYFAPVYTHLIHADKVEILPTPTGRSNDDKSDLNTIREADGKIYATVENGFEKQFSIYPNDYVRIYMGNKIVEGYYSKYDIVNAVFSLVAHSSSDKSTFIKASPRTAVDIQRLDISVLGDNYKWI

SEQ ID NO: 7841 - protein, 1157 aa, synthetic construct
  REGION 1..1157: note = Synthetic
MKYSLGLDIGTTSIGWAVVDLDKERIHDVGVRIFEKPEDPQSGKSLAEPRRTARSARRRLKRRRQRLSTLKSFFLSNDLLSEEDIQNILNPSKSNDYKKTNDPYRLREKGLSEKLTNAELFIALYHIAKRRGYKSNSKSQDEDILKRIAEQRERAKQKQEAGKESSKSDDRLKVLSAIYDNRDLLVEHKTVAGALNNAEKFRAHKRNKADKYQGSFMRDDFEFEASEILRKQRELGLQLSDEKINELLYGGDSIIRNDGIVIATSPGIFYQRPFTNEKLINGMRGKDSYNYEDRAPKATLTFELFRLSEDISHIKNARDPDWEISREQVDAIIAKAKVTKTMTYGAVRIAMGLKDKYNEFDFGYIRGKNPDVKKIKGYENMSPDEKMIAETREREKATFAKMDFYQAISSSLKEFPEKFAELDGSLGLFDKLGEILTINKDDDSRAKELSDIGFSNSEIKPLLLLDFSTFGNLSLTTMRKAIPLMLDGKTYDKALEEIYPGKFAVQLSGDKTKLPPLNEQESQQITNPVVKRAVSQTIKVVNAIIRKYGLPSRIGIEAAGDLAKNFKERGDIKRLQEENASRNERIKDKLIELGVTTPTGLQITKFKLYQQQNGKCMYSGKSLELERLFSDEHYGEIDHIIPFSRCGNDSLNNKVLVLNSENQNKGNLTPYEAWGSDENKWKDYEARVKATFLPFAKKDRLLAKTPPNEEWNTRALNDTRYISKFLRQYLRKNLKFDNDKGSQRVITPTGPITSYLRRIWQVGSKVREEDNLHHATDACIIASVNQGTIQRVSSLNKYYELFYGNDKNEITDKLTGEIVRRGDVEQHIADVQPWEEFGKEVRLRTAEYGTPSELRNELRGLANYDEDFRESLNPIFVSRMPKRGGKGSTNQETIRSPKIVEDYENNNGEKTIARKQRVALSGLKLKDLYDSPIRETDPKLYELLRQRLEDNGDDPKKAFAEPVYKPTKTGERGNIVRSVKVYDTLKSKTGFYINDGKAFVNNGSTIRLDVYKRKNFKDNYEHYFVPVYTNMLKTEKKDGKWIEVISDPEILPTPNGRSTDEKSNIDAIREADGKIYATAGNGFEKQFSIYPNDYVRIYMSNKIIEGYYVKYGIGNGNLSLLPHSQASKDIFLNSAPKSASSIERFDISVLGDNYKWI

SEQ ID NO: 7842 - protein, 904 aa, synthetic construct
  REGION 1..904: note = Synthetic
MAQKSSYSPKKYSLGLDIGTSSIGWAVLDLDKERIHDLGVRIFERPEVPKTGKSLAEPRRIARSARHRLRRRRQRLNYFKRFFIDNSLIPESRISDMLSPTHPKKWRPAYDPYDLRIKGLREKLSLEELFVALYHIAKRRGYKSNRISVEKQDVEGSQVLSAISENKLLLEKYKTKSVAKVLTLDEKFKNNKRNKTSTYKNSFVRKNFEDEVILLLESQKKFGLKLPYEKMQTLLYGDVKNGNYNGIFSQRPFMTKELIEKMRGNCEFEPEKPRAPKASYSFELFRLAQNLSHLRIVVDQETRQLSEDEIAKIIEKAKNVKVLKYEHIRDILGYKGDQSFSFAQGMIRGKIKNDDKKNGEGNKFDSMIFYHTVKKNLEQYPKDWNILAADNFELLDNAGLILTVNKDDSSLRAELSKLDISTDAIEALLPINVSGFVHLSFNSLHRITPWLLRGLNYSEAVEKAGYSFFQSLSGNKKKLPPLSKKQANQITNPVVKRAVSQTIKVVNAVIGKYGLPCSVKVEAASELAKNAQERDKIKKIQDENAEYNEKIKQKLINEFNIPTPTGLQITKFKLREQQNGVSLYSGTEINLENLFTDEHYGEIDHIIPFSRCGNDGLNNKVLVFTDENQEKGNLTPYEAWGGDDKKWTQFEARVRATAGLPAAKRDRLLSKSKPVEDWNVRALNDTRYISRFLRQYIRDNLDFPKIEGKTGAQRVFSPSGPITSYLRRVWRVGNKNRDDNNLHHAADACIIAVTDPGIIQKVSSLNKYYELFRYSDKNEVIDKLTGEVLNRNQFEQHIADLEPWHDFGKEVRKRSKLYDTPSELHNELTGLKNYDEEFRLSTLPIFVSRMPKRSGKGSTNSETFRSPKIVEGYLDEKGKPAIARKQRVPLHSVDLKKIIRFANS

SEQ ID NO: 7843 - protein, 1102 aa, synthetic construct
  REGION 1..1102: note = Synthetic
MKNSLKYSLGLDIGTTSIGWAVIDEDKKRIYDVGVRIFEKPEDPKSGKSLAEPRRTARSTRRRLKRRRQRLNALKEFFISHQLLDRRTLEQLLLPENKHNPYEIRERAMSDKVSNEELFVALYNIAKRRGYKSNRKSLEEKDSEGSRVLSAISENKAILADYSSVAGALNNNDKFIKHKRNKRDSYVNSFARQDFLEEAKSIITKQRSFGLELGDNAVHELLYADEHSGDFSGIFSQRPFMTSELIKKMRGNCELETIEFRAPRASYSFEIFRLAQNLSHLRVTIDRATRPLTPEEIADCIEKAKSIKTLKYSHIRDVLGYKNNKSFEFMRGMIRGKIKDNDKTNGESNKFDEMTFYHAIKTACKNFPSEWTRIEADNNLLDQIGEVLTINKDDINLRKGLEELNIPEEIIVWLLKLNFSGFGHLSLRALRKITPFLLEGQTYDKAVVSAGYQFTQNLSGNKYKLPPLSEQHSQQITNPVAKRAISQSIKVINAVILKYGAPNKIKIEAAGDLAKTFADRQKIKKSQDENADYNEKLKERLINEFGIATPTGLQITKFKLYNQQNSKCMYSGKSLDLNRLFSDERYGEIDHIIPFSRCGNDGLNNKVLVLTEENQQKRNLTPYEAWGSDDIKWKDFEARVTATFLPFAKKNRLLTKSLPDEDWNERAINDTRYISKFLRSYIRDNLKFADFPEEKGVQRVITPSGSITSYLRRVWRVGSKNRDENNLHHAADACIVAAIDQGTIQKVSRLNKYYELFRGNADNEVTDRTTGEIIKRGDLEHHSVEVEPWEDFGKEVRKRTALYDAPSELHNELEGLDNYDEEFRRSVRPIFVSRMPKRSGKGATNKETIRSPKIVEEYENNKGEKVIARKQRVPLTSVKLKDLYDSPVRQDAKLYEVLKQRLEEFNDDPQKAFVSDKPIYKPTKDGSQGNIVRSIKVYDTQNSKTGFYINNGKAFVNNGSTIRLDVFKRKNFKGIDEYYFAPVYTHLIHAKKVEILPTPNGRSADEKADFDKIREADGKIYATEENGFKRQFSIYPNDYVRIFMKNKIIEGYYVKFAISTGQLSLVEHSSAGKDNLIITVAKTASEIQRYDITILGDNYKWV

SEQ ID NO: 7844 - protein, 1265 aa, synthetic construct
  REGION 1..1265: note = Synthetic
MKTLGLDIGTNSIGWGIVDESAQKIEKCGVYIFPECANKDTKGNISSKAAERTGFRSARRLKFRRKLRKYETLKVLIKNGMCPLTLEELEKWHKEKIYPTSKDFINWYRTDERKNWEPYFLRKKCVEQKCEPYEIGRALYHIAQRRGFLSNRKEAAKETDGKVSEGISELSKAKGDKTLGQYFYELKQAGEKVRGKYTSRKEHYEEEFNKICTAQEISTSLKEDLYKAIFFQRKLKSQKFLVGKCTLEVGKPRCPVSHFEFEEFRMLSFINSIRIKRESCDSNTLNLFEEMNENFPKDGKLTDEEIELIKPLFFRTSKSNFDFKDIAKKLRKNHDEWTFNYRDDTNVAACPVSAALKSIFGEDWKNTKIDNYDIYDIWHVLFDFDDDEKLHEFALNKLHLDSEMADKFCSIHFQQGYANLSLKAIRKILPFLRKGYVYAHAVFLANIPNMIGEDVYNKHADEIEKSVENIITSLKDKNNRITLANRCIEAIFKDEKHDFHSEEWDKAIVDAQIVDLFGKRKFAEKSLAEQKEIREDVIAKVEATLKIAVSKNPNDWKIPALRTDDLILEYLEKQGFKIKKNTKIYHPSDSEYNLERPIESDNGKTYLASPRTPSVKNPVVMRALFQLRKLVNYLIKTGEIDSETRVHVELANEVNDKNWRKAIEDFQRDNEKKNADARKRLCEEFGDNFNITDDVLRKFRLWKEQNEICPYTGKKINICDLFGPHPKFDFEHTIPRSLSYDDSLENLTLCDSDFNRNVKKQHIPSELPNFEEIVRRFERMYEDKIDECLSAIERNKSRGGYIDPEIKNRKIVARHKAQLELDYYKGKLRRFSAKEVTSGFKHSQLNDTRIITKFALQYLKSVFEHTFPVKGSMTDTFKRQWGLLDSAESKDRSNYRHHAVDALTIACIDRTKFNLLSEAVRASADGAHLKFAKPWDSFDTDVLSAVQYIVPKHFVDDNSLRQTKKVLRDPRTGKPKLGKNGNKIYIQGNTARGSLHKDTFYGCIMTPPEKDSEPQKIFVQRVSVDTLTKDSADKIVDKGIRNTFINNLESGKQTLAEIQERGILLPYQMNGKNVYVKRIRVKAKPTSPLVLKKHNNVIERNPKDYKQNYYVVNDENYLIALYRGKDAKGKEKSVSRTLNLLDAIKVKQGGKSLYEAKLEGLDLYKVLKIGKIVILQNSYKENIFDLSTEQIWKRIYRIAGLSKSAGLSYVKLSHILSAKPWSYIPGNFALDEGIEFRRYQVNNFIGLVEGKDFTISPTGEIIPKK

SEQ ID NO: 7845 - protein, 1261 aa, synthetic construct
  REGION 1..1261: note = Synthetic
MKTLGLDIGTNSIGWGIVDETASKIEDCGVYIFPEGVKKEKGNESSKAAERTSFRLARRLKFRRKLRKYETLKVLIKNKMCPLSMEELEKWRKQKIYPTSRDFLNWYRTDEVKNWEPYFLRKKCVEQKAEPNEIGRALYHIAQRRGFLSNRKETTKASEGTVSKSIDELSSLMGDRTLGQYFYELKQSGEKVRGKYTSRKEHYEKEFNKICEVQAISPELKDDLYKAIFFQRKLKSQKFRVGKCTFEKSKPRAPISHFEFEEFRMLSFINSIKLAKNSGEDENCDFDFLTEEEKEIIKPLFFRISKPSFQFADIEKKLKGKNEFWKFNYRKDTNVAGCPVSAGLKNIFGDDSSYESWKDKKIGQYDMCDIWHVLFDFDDEEKLLEFAKEKLFLNDETANKFCAIRIQQGYANLSLKAIRKITPFLRKGYIYSTAVFLANIPTMIGQNTFLQNEKEIEDSVKNIIGTLKDKNNIIVLANRCLESAFKDKDNDFRFEEWDKSIVENSAQDLFGKKKWNEYDEEKRKDIILQVSEKVEDNLKIAVGKNPNDYKYQLLRTDDLILDYLNQKGFTINGKLYHPSDTDYNFETPVPAEDGKIYLASPRSPSVKNPVVMRALHQLRKLMNYLIKTGKIDSSTRINVELANEVNDKNQRKAIEEFVRANEKNNADAKKKIEELCVEAGFKIVPTDSDVKKFRLWKEQNETCPYTGKHISFTDLFGPLPKFDFEHTIPRSLSYDDSLENLTLCESDFNRNVKKQKLPSELPNFEEINKRFQKFYEDKIDNYLRIIELNTKRGGSYEDPAAKDARIVKKHKAEYELDYYKGKLKRFSATEVTSGFKHSQLNDTRIITKFSLSYLKGVFGYVQPVKGSMTDTFKRQWGLMERDEVKDRSNHIHHTVDALTIACINRGKFNLLSEAIKNSSDGKHLKFPKPWETFGTDVLSAVQYIIPKIFSEENSLRQSKKIMRNRDGKPVLKNGKPVFVQGATARGSLHKDTFYGCIKTVPEKGGKSETIYVQRIPVSTLDEKSAEKIIDKGIRETFKKNLSDGIQTLQDIQTSGILLPFKSDGRDVFVKRVRIKAQPTSPITLKKHHNVISKNPKDYKQNYYVVNDENYLLAIYRGKDEKGKDVSDYKICNLLDAVKSRQNKTELYPDFKEKKGINLKLYKVLKIGKTVILQNDVQEDVFALPKEKFWKRLYRIAGLATSGNDIHIKLVHIISAEPWEYMKGEKDLNAGIECLLYLQSNFKGLIEGQDFTVSPIGEIIRK

SEQ ID NO: 7846 - protein, 1264 aa, synthetic construct
  REGION 1..1264: note = Synthetic
MKTLGLDIGTNSIGWGIVDEAAGKIEDCGVYIFPEGVKKEKGNESSKAAERTGFRLARRLKFRRKLRKYETLKVLIKNKMCPLSTEELEEWRKQKIYPVSQDFLNWYRTDELKNWEPYFLRKKCAEQKAEPYEIGRALYHLAQRRGFLSNRKETTKASEGEVSKSIDELSSLLDGKTLGQYFYELKLSGEKVRGRYTSRKEHYEKEFNKICEVQGFSQELKDDFYKAIFFQRKLKSQKFLVGKCTFERNKPRAPISHFEFEEFRMLSFINSIKIAKNSNEDENCNFEFLTQEEKELIKPLFFRISKPTFKFEDIEKKLKGKNEFWKFNYRKDTAVSGCPVSAGLKNIFGDETSAENWKDKKIGQYDMCDIWHVLFDFDDEEKLLEFAKEKLLLDDEKAKKFCEIRIQHGYANLSLKAIRKITPFLRKGYIYSTAVFLANIPYMIGRDIFLQNEEEIETSVKNIIGTLKDKNNIIVLANRCIEYVFKDKNNDFRFEEWDKSAVEASAQDLFGKKKWNEYDEEKRKNIISQVSEKVEDNLKIAVGKNPNDYKYQLLRTDDLIREYLEQKGFTVKGELYHPSDTDYNFETPVTAEDGKTYLASPRSQSVKNPVVMRALHQLRKLVNYLIKTGKIDSSTKINVELANEVNDKNKRKAIAEFAKDNEKKNADYRKKIEELCSEAGFKINPTESDIKKFRLWQEQNETCPYTGKHINFSDLFGPVPKFDFEHTVPRSLSYDDSLENLTLCDSEFNRNIKKQRLPSELPNFEEIDRRFQKFYEDKIDNCLRIIELNSKSSGSYEAPAIKDLRIVKKLKAKYELNYYTEKLRRFSATEIPEGFKHSQLNDTRIITKFALSYLRGVFGYVQPVKGSMTDTFKRQWGLMERNEIKDRSNHTHHTIDALTVACINRGKFNLLSEAIKNSADGKHLKFAKPWETFDTDVLSAVQYIIPKYFTGENPLRQSKKILRNKDGKPVLKNGKIIFEQGETARGSLHKDTFYGCIKTVPEKGGKSEMIFVQRIPVSTLDEKRAEKIMDKGIRTTFENNLSNGIQTLSEIQTKGILLPFKKDGRDVFVKRVRIKAQPTSPITLKEHHNVISKNPKDYKQNYYAVNEENYLLAIYRGKDEKGKDVSDHKICNLLDAVKRRKNKDELYPDFKEKKGMNLQLYKILKIGKIVILQNDIDEDVFSLPTEKLWKRMYRVAGLGKSGDNIYIELVHIISSNPWKYMKGERDLNAGIECLRYTQSNFKGLVEGQDFSVSPTGEIIQKTEV

SEQ ID NO: 7847 - protein, 1263 aa, synthetic construct
  REGION 1..1263: note = Synthetic
VKKLGLDLGTNSIGWGIIDTNNTEKPIQKCGVYIFPEGVNKDSYGNDSSKAAERTGYRSARRLKFRRKLRKYETLKVLIEYEMCPLTIEELEKWRKEKIYPTSQEFINWYRTDELNNWEPYFLRKKCVEDIAEKYEIGRALYHIAQRRGFLSNRKESTKGNEDGAVQGGINEITDQKGDKTLGQYFYELKQNGEKVRARYTSRKQHYEEEFNKICAVQNISADLKEKLYNAIFFQRKLKSQKFLVGKCTFERNKPRCPISHFEFEEFRMLQFINSIRVKRNEDETDDQKFIELFDYERNELKELFFRKSKSTFTFKDIKSKLCGKKHEDWEFNYIDEANIAGCPVSTSLKEIFGENWKDVKIGNYDINDIWHVLYDFDDDDKLKEFAKEKLHLSEDDAKKFCKITLQQGYSNLSLKAIRKILPFLREGLLYSYAAFLANVPKMIGEEVFAENKKTIIDNVKNISSSIGIINLPLRLANDCLDKISKDENFDFRTEDWNKEFIDICIKESYGQKKWGKDFSQPEQEKIKSEIENNVNEALKIMPTGTHLSINNFKYPMKHIDELIEEYLRENFEIKKNIDLYHPSYTDSKYDIKPAEIINGKKYLNTPKTSSIKNPVVMRALHQLRKLINYLLKTGEIDENTHIHIELAKEVNDKNWRKAIADFQKDNETKNKEYKEKIEEMAKEAGFSIVVTEKEIKKYRLWKEQKEECPYTGKTIRFTALFGDNPQFDFEHTIPRSLSYDDSLENLTLCDVDFNRNVKKQQIPHQLANYKEIAQRFERYYEEKIDDCLTRIEKSRTHGRYIDPSIKDAMIVKRHKAELELRYYTGKLKRFNSEDVTKGFKHSQLNDTRTITKFAKDYLKTVFDYVMPINGTITNTFKHQWELLEKDEKKDRSTNLHHAVDALVVASVDKWKYDLLCKCIHESSDGRTINLPKPWENFREDVVNATDQIIPKIVSSDNALKQTKKIIRDRYGKPKLNKNGQIQYVQGDTARGSLHKDTFYGCIMTPPEKDKPSEKIYVQTISCDKLDKSKAEKIIDKGIKRTFFDNLDKKIQTLPDIQRDGIKLPYQINNRDVYAKKVRIAAHISNPIELKKQKDVSKKEYKQSYYVQNEENYILAVYRGVNSKGKQESSFRVLNLLDATKSRQNKEILYPKYDESKGIKLNLYKTFKVGQIVILKETDDEDVFALPIEKLRNRIYSVIGMANTSGSFYLKLTHVTISKPWKYITNTHFENISEFRYYSISQICCLIENTDFKISPTGEILKL

SEQ ID NO: 7848 - protein, 1273 aa, synthetic construct
  REGION 1..1273: note = Synthetic
MKTLGLDIGTNSIGWGIVDESAQKIQKCGVYIFPECANKDTSGNISSKAAERTGFRSARRLKFRRKLRKYETLKVLIKNGMCPLTLGELEEWHKEKIYPTSKDFINWYRTDEEKNWEPYFLRKKCVEQKCKPYEIGRALYHIAQRRGFLSNRKEASKEADGKVSEGISEVTQAKGDKTLGQYFYELKQAGEKVRGKYTARKEHYEEEFNKICKMQEISVSLKEDLHKAIFFQRKLKSQKFLVGKCTLELGKPRCPVSHFEFEEFRMLSFINSIRINRQISESETLSLFEEANESFPKDGKLTNEEVELIKPLFFRISKSNFDFKDIAKKLRKNHEEWTFNYRDDTNVAACPVSATLKSIFGEDWKNTKIDNYDIYDIWHVLFDFDDDEKLHEFALNKLHLDSEMADKFCSIHFQQGYANLSLKAIRKILPFLRKGYVYAHAVFLANIPNMIGEDVYNKHADEIEKAVENIITNLKDKNNRVTLANRCIEAIFKDEKHDFHSEEWDKAIVDAQIVDLFGKRKFAEKSLAEQKEIREDVIAKVEATLKIAVSKNPNDWKISALRTDDLILEYLEKQGFKIKKNTKIYHPSDSEYNLERPIESDDGKTYLASPRTPSVKNPVVMRALFQLRKLVNYLIKTGEIDSETRVHVELANEVNDKNWRKAIEDFQREKEKKNAEYKARMIGLCKECGFEIEPTDSDVKKFRLWKEQNETCPYTGKKIGICDLFGPHPKFDFEHTIPRSLSYDDSLENLTLCDSDFNRNVKKQHIPFELPNFEEISRRFERMYEAKIDECLSAIERNKTRGGYIDPEIKNWKIVARHKAQLELDYYKGKLRRFTAKEVTSGFKHSQLNDTRIITKFALQYLKSVFEHTFPVKGSMTDIFKRQWGLLDRAESKDRTNYRHHAVDALTIACVNRTKFNLLSEAVRASADGTHLKFAKPWDSFDKDVLSAVQYIVPKYYVDDNSLRQTKKVLRDPRTGKPKLDKNGNKIYIQGNTARGSLHKDTFYGCIMTPSEKGENLQDKKPIFVQRVSVDTLTKDSADKIVDKGIRNTFINNLESGKQTLAEIQEKGILLPYQMNGKNVYVKRIRVKAKPTSPLVLKKHNNVIDHNPKDYKQNYYVVNDENYLIALYRGKDEKGKFQSDYIVLNLLDAVHKKQNGEQLYPAVMEKKGTKLKLYKALKNGQIIILQNFLDEDVFNLPAKDLFSRVYRISTLESDGRVNLSHIVIAEAKNKNNKNECIDEGIDKYKRLSNSGLYCLVEGTDFTISPIGEIIPRN

SEQ ID NO: 7849 - protein, 1264 aa, synthetic construct
  REGION 1..1264: note = Synthetic
MKTLGLDIGTNSIGWGIVDEAAGKIEDCGVYIFPEGVKKEKGNESSKAAERTSFRLARRLKFRRKLRKYETLKVLIKNKMCPLTIEELEKWRRQKIYPTSKDFLNWYRTDELKNWEPYFLRKKCVEQKAEPYEIGRSLYHIAQRRGFLSNRKETTKASEGEVSKSIDELSSLMGDKTLGQYFYELKQSGEKVRGKYTSRKEHYEKEFNKICEVQGFSSELKSDLYRAIFFQRKLKSQKFLVGKCTFEPNKSRSPISHFEFEEFRMLSFINSIKLAKNSREDENSDFEFLTDEEKEMIKPLFFRISKPTFQFADIEKKLKGKNEFWKFNYRKETNVSGCPVCAGLKNIFGDGSSDESWKDKKIGQYDMNDIWHVLFDFDDEEKLLEFAKEKLFLSDETARRFCTIRIQQGYANLSLKAIRKINPFLRKGYIYSTAVFLANIPTMIGQDAFLQNEKEIEDSVKNIIGTLRDKNNIIVLANRCIESVFKDKSNDFRFEEWDKSVVENSAQDLFGKKKWNEYDEEKRKNIISQVSEKVEDNLKIAVGKNPNDYKYPLLRTDDLILDYLNQKGFTVKGKLYHPSDTDYNFESPVQADDGKIYLASPRSQSVKNPVVMRALHQLRKLVNYLIKTGKIDSLTKINVELANDVNDKNRRKALADFVKDNERNNADARKKIEELCNEAGFKVVPTESDVKKFRLWKEQNETCPYTGKHISFTDLFGPLPKFDFEHTIPRSLSYDDSLENLTLCDSEFNRNIKKQKLPSELPNFEEINKRFKKFYEDKIDNCLKIIERSTKLGGSYEEPTAKDSRIVKKHKAEYELDYYKGKLRRFSATEVTSGFKHSQLNDTRIITKFSLSYLKSIFSYVQPVKGSMTDTFKRQWGLMERNEVKDRSNHMHHTVDALTIACVNRGKFNLLSEAIKNSPDGKHLKFPKPWATFDADVLNAVQYIIPKYFSDENSLRQSKRIMRNRDGKPVLKNGKPVFVQGATARGSLHKDTFYGRIKTVPEKGGKSEMIFVQRVLVSTLDEKSAEKIIDKGIRETFEKNLLNGIQTLQEIQTNGILLPFKKDGRNVFVKRIRIKAQPTSPITLKKHQNVIEKNPKDYKQNYYVVNDENYLLAIYRGKDEKGKDVSDYKICNLLDAVKSRQNKTELYPDFKEKKGINLKLYKILKPGKIVILQNDIQEDVFALSKEKLWKRLYRIAGLATSGNNIQIKLVHIISARPWKYMKGENDKKDLNAGTECLMYLTSNFKGLVEGQDFAVSPIGEIIRK

SEQ ID NO: 7850 - protein, 1291 aa, synthetic construct
  REGION 1..1291: note = Synthetic
MKTLGLDIGTNSIGWGLVDEHAQKIEKCGVYIFPEGVKKEKGNESSKAAERTSFRSARRLKFRRKLRKYETLKVLVKNEMCPLSMEELEKWHCKKEYPTSKAFIDWYRTDETNNWEPYFLRKKCVEEKCEKFEIGRALYHIAQRRGFLTNRKDYSEESENAETKGIKGQINELTALKGDKTLGQYFYELKQSGEKVRGRYTSRKEHYEEEFNKICEVQGIADSFKTDLHNAIFFQRKLKSQKFLVGKCTLETDKPRCPISHFEFEEFRMLSLINSIRINRKSNNDNEPSLFSDLDFGEHYPDDGKLTKEEIESIVPLFFRSSKLNFDFKDISKKLKKDDEWTFNYRDDTNVAGCPVSTALKNIFGDDWKNIKIPNDDSSSNKKYYDIYDIWHVLFDFDDDQKLHEFALNKLHLDSEKTEKFCKIHFQQGYANLSLKAIRKILPFLRKGYVYSHAAFLANIPTMIGQSVYDAHAKEIENAVENVLSSLKDKNNVITLANRCIEAVFKDENHDFHSEEWDKTIFDSQVADLFGKRKWSEKPLSEQKQIRDEVISKVEDTLKIVTTKTPNDYKYKALRTDDLIMEYLSAQGFEIKKNAKLYHPSEMGKPDPQQGEDGKLYLGSPRTPSVKNPVAMRALHQLRKLINYLIKIGEVDSDTRVHVELANEVNDKNWRKAIEEFQKDNEKKNAEYKARIIELCKECGFDIVPTDDDIKKYRLWKEQNEMCPYTGKKINITDLFGPNPKFDFEHTIPRSLSYDDSLENLTLCDSDFNRNVKKQHIPSELANYEEISKRFGKFYETKIDECLSAIERNITRGGYIDPSVKDMRIVKRHKAQLELDYYKGKLRRFTAKEVTSGFKHSQLNDTRIITKFALNYLRSVFQYTYPVKGSMTDTFKRQWGLLDRAESKDRSNYRHHAVDALTIACVDRRKFNLLSEAIRASTDGTHLKFAKPWESFDKDVLNAVQYIIPKHFVDDNSLRQSKKVLRDRDGKPRLDKNGNKIYIKGDTVRGSLHKDTFYGRIMTPPEKGVEPQKIFVQRVETKSLVIENNKLCKNISTIIEKNSDKIIDKGIQKTFIENLKSGKQTPEDIFEKGILLPYKLNGKDSYVKRVRVMARTTSPIILKQHHNVIDKNPKDYKQNYYVVNDENYLIALYRGKDAKGKDTACSLTLNLLDAIKAKNSGNELYPDNKNGMDLYKVLKIGRIVILQDNYDEDIWSLSYEQVWKRMFRVAGLGKSGNRVFICLAHITQSGAWQYIPGKFDLNTFIESRRYQDNQFIGLVEGEDFSISPAGEIIKK

SEQ ID NO: 7851 - protein, 1271 aa, synthetic construct
  REGION 1..1271: note = Synthetic
MKVLGLDIGTNSIGWGIVDERNQKIEKCGVYIFPEGVKKEKRNESSKAAERTSFRSSRRIKFRRKLRKYETLKVLIQNSMCPLSFEELEKWHKEKIYPVSKEFVKWYRTDESSNWEPYFLRKKCVEEKCEKFEIGRALYHIAQRRGFLSNRKESTEAVDGKVNEGISELSQAKGGKTLGQYFYELKQSGEKVRGRYTSRKEHYEEEFNKICEVQEISDSLKTDLYNAIFFQRKLKSQKFLVGKCTLETDKPRCPISHFEFEEFRMLSFINSIRINRKSDNDNEPSLFSDFDFGEHYPEDGKLTKEEIESIVPLFFRSSKPNFDFKDISKKLKKDDEWIFNYRDDTNVAGCPVSTALKNIFGDEWKNTKIDNYDIYDIWHVLFDFDDDQKLHEFALNKLHLDSEETGKFCKIHFQQGYANLSLKAIRKILPFLRKGYVYSHAVFLANIPTMIGQSVYDAHAKEIESAVENVLSSLKDKNNVITLANRCIEAVFKDENHDFHSEEWDRTIFDSQAADLFGKRKWSEKPLSEQKQIRDEVISKVEDTLKIATTKNPNDYKYKAHRTDDLIMEYLLAQGFEIKKNAKLYHPSEMGKPDPQQGDDGKLYLGSPRTPSVKNPVAMRALHQLRKLINYLIKIGEIDSDTCVHVELANEVNDKNWRKAIEEFQKDNEKKNAEYKARIIELCKEYGFDIVPTDDDIKKYRLYEEQKIGGVSMCPYTGKTINITDLFGPNPKFDFEHTIPRSLSYDDSLENLTLCDSDFNRNVKKQHIPSELANYDEIARRFNKFYEEKINNLLFEKNKKFFGTTKEQKDKFLVRRHKAQLELDYYKGKLRRFTAKEVTSGFKHSQLNDTRIITKFALNYLRSVFQHTYPVKGSMTDTFKRQWGLLDRAESKDRSNYRHHAVDALTIACVDRSKFNLLSEAIRASADGTHLKFAKPWENFDKDVLNAVQYIIPKHFVDDNSLRQSKKVLRDRDGKPRLDKNGNKIYIQGNTARGSLHKDTFYGCIMTPPGKWGESHQIYVQRISCDTLTKDSADKIIDGGIRATFLNNLDSGKQSLADIQERGILLPYQMNGKDVYVKRVRIQAKDVKDPIKLKPHNNIFKDNAKDYKQFYYVKNDENYLIALYRGKDEKGKDLSGYDVSNLLDSVKSKKKREEPYRKEIEKKRTKLSLYKVLKNGKIVILQNTKDENVLNLAPNELFSRLYRVSTIESDGRVTFTHLLVADAKNPQNKNEYIDKNIAKYKRVSHSSIYCLVEGTDFTISPAGEIIRIPQK

SEQ ID NO: 7852 - protein, 1280 aa, synthetic construct
  REGION 1..1280: note = Synthetic
MQAVWRIFMKTLGLDIGTNSIGWGIVDEKAEKPIIDCGVYIFPKGVKTKNKEEISKAAERTGFRSARRLKFRRKLRKYETLKVLIQHGMCPLSLEELEVWRKEKIYPSSEAFVRWYRTSEAEQYEPYFLRKKCAEQTCTKHEIGRALYHIAQRRGFLSNRKETGKETEGGKVTDAIDELSKVMGEKTLGQYFYELRKTGDRVRGRYTGRKEHYEKEFYTICSVQGLSEELVKQLYRAIFYQRKLKSQKFLVGTCTFEPNKPRCPVSHFEFEEFRMLQFINSIKVAKNIDEDDRQDFVPLTQIEKEIIIPLFYRVSKTKVKFIDIEKKLRGKNKNESWKFNYRSDSNVEGCPVSAGLLHIFGENWKEIKIDNYDSYAIWHVLFDFDDRDKLREFAQTKLHLDEEKVESFLKIPIHQGYANLSLKAIKKILPFLREGMLYSHAVFMANIPTIIGKKAFEEDKTKIIAGFENIIKATPEKNREIDLVNSCIDRIFKDKTRDFRSEQWNRAILEEQIADMYEKKYWEKKPQAEQQEIRRNAAEKIDDALRIARTNRANSYKYSHLKTVKLLEEYLEQGYTLHTKKKLYHPSDPEFETLKKAEDGKIYLASPRTKSVKNPVAMRALFQLRKLINHLIKTGAIDRSTKVVIELANEVNDKNMRAAIARFQKENETKNAKYKQAIIETAAEHGFTIEPTDKDIKKYRLWKEQKEECPYTGKKISFTDLFGSMPQFDFEHTVPRSLSFDDSLENLTLCDVHFNRNVKKQQLPSQLAGKEDIIKRIKGYYGEKIDQCRAAIERNKPCGAYIDPSKKDAMIVRRHMAMKELHYYEQKLKRFTLEEIPSEFKNSQLNDTRLITKCALKYLKRVFPNIYPVNGFATDLFKRQWGLLERNEAKDRSYHRHHTIDALTIACISRGKYAALCEAVRNSADGRHLTFAKPWKSFDTDVLTATEYLVPKFYNDDNALRQTKKVVRDTRSGKPILKDGKKQYIQGHTARGSLHEDTFYGCIMTPPEKDRKPKNIFVARVSVLKLTTIDKKKKKTPDEQIRENIGEIIDKKIRNIFLKNFESKIQTIEEIQTQGLLLPYKINGRTTYMKKVRIKVQKTNLLQIKKHPQAENRKDYKNYFYAGNDENYLFVLYRGVSDDGKTVSDYRAVNLLDAVHAVQQKKKMYPAEMAKNGTVLKVYKTLKKGKTVILKESEEENIWELPHDAVWKRLYRIAGLAVTGSGIQIKLVHCSCADKWEYPKGQGSVSEMMKFRCYNTPGGLVCLVEGCDFAISPDGKIIKK

SEQ ID NO: 7853 - protein, 1147 aa, synthetic construct
  REGION 1..1147: note = Synthetic
MTNSSENIPGIRYRVGIDVGLRSIGFCAIEVDDEDHPIQILNSVVHVHDAGTGGPGETDSLRKRSGIAARARRRGRAQKKRLKRLDALLEDLGWGVVSNEMLESHAPWHVRKRLLNEYITDEVERRQCLSIAAAHIARHRGWRNPYSKVDTLMLEHEPSDRMRGLKNRVEEQMGLCFSDQATQGELIATLLEHDKDVTVRGFVRKGGKATKELGVLQGKYMQYDLVAELRQICVKQKVSDEVFTQLVSTIFYSKEPQADKKNQRKRVGIDELQLAVDPQAVELRAERAHPAFQKFKIVATLANMRIQEDGVAERALRPDELRAVTAYLLDESGVGIPTWEEVAGQLGVPRHRLRGASKASLETGGGLRYPPFDETTARVAESEIDWLVDWWMQADDESRGHMIDEISNGCGSETNDIEDEEVIELISSAAAEDTAKLELLAKKLPSGRAAYSLKTLREVTSSILETSDDLSRVIERLYGVEPGWAPTPAPIEDPVGNPSVDRVVKQVARWLKFAEKRWGIPQAVNIEHTREGLKSASLLEEEKENRIKYEERREERLKKMYAQLGISGPFRRSEQTRYEILYLQECACLYCGCKIGFETFEIDHIIPRVDASSDSRRENLAAVCHNCNIAKGGIPFGQWVKLNDCPNGVSLEEAIKRVKRWDKNRVGLTEKAMRKRKGEVIGRLKAEKPYEEFDGRSMESVAWMAIELKKRIEGHFNSDCVTGKVVKVNAYSGRLTACARRAARVDKRVRLIRLKGDNGDHKNRFDRRNHAMDALVIALMTPAIARTIAVREDRREAQQLTHAFESWKNYLGSEERMQERWGSWIGDVEYACDRLNELIDANKIPVTENLRLRNSGKLHADQPESLRKARRGSKRPRPRRYVLGDALPAEIINRVTDPGLWTALVRAPEFDDQLGLPADPARSLSLRGSRISADFPINYFPTDSPALAVQGGYVGLEFHHARLYRIMGPKEKVTYALLRVCAIDLCGIDRSNLFSVELKESSISMRTADPKLREAMKEGNATQIGWLVLGDEIQIDPSKFPKQSIGKFLDECGPISSWRVSALNTPSKITLKPRLLSNEPLLKDRSGARKNDFTVSECVEKIMKKTGWVVEINALLKSGSIRVIRRNALGEVRTSPESGLPISVNLR

SEQ ID NO: 7854 - protein, 1148 aa, synthetic construct
  REGION 1..1148: note = Synthetic
MITSSENVPGIRYRVGIDVGLRSIGFCAIEVDDEDHPIEILNSVVHVHDAGTGGPGETDSLRKRSGIAARARRRGRAQKKRLKRLDALLEDLGWGVVSNEILESHAPWHVRKRLLNEYITDDVERRRCLSIAAAHIARHRGWRNPYSKVDTLMLDHDPSDHMLGLKNRVEEQIGLCFSDQATQGEIIATLLEHDKNVTVRGFVRKNGKAAKELGVLQGKYMQYDLVAELRKICVQQKVPDTVYRRLVATIFHSKEPLSDKAQQRERVGIDELQLAAEPPAVELRAERAHPAFQKFKIVATLANMRIQENEAGERALRPDELNAVTTYLLEQSGNGIPAWEEVAGQLGVPRHRLRGASRAALETGGGLRYPPFDETSARVAESEIDWLVDWWMQADEESRGHMIDEVSNGCGSETNDIEDEEVIELISSATAEDVAKLERLAKKLPSGRAAYSLKTLREVTSAILETGDDLSRVIERLYGVESGWVPTPAPIEAPVGNPSVDRVVKQVSRWLKFAEKRWGIPQAVNIEHTREGLKSASLLEEEKENRNKYEERREERLKQMYARLGIDGPFRRSEQVRYEILDLQDCVCLYCGCKIGFETFEIDHIIPRVDASSDSRKENLAAVCHSCNSAKGGMPFGQWVKLGDCPSGVSLKEAIKRVKRWDKDRAGLTQKAMKRRKAEVESRLKTETPYEEFDGRSMESVAWMAIELKRRIEGHFNSNRPEGYAAVPVNAYSGRLTACARRAAHVDKRVRLIRLKGDNSHHKNRFDRRNHAMDALVIALMTPAIARTIAVREDRREAQQVTRAFESWKNFLGSEDRMHERWDSWIGDVEYGCERLNELIDADKIPVTENLRLRNSGKLHADQPESLRKARRGSKRARPQRYVLGDALPADVINRVTDPGLWTALVRAPEFDTQTGLPANPDRSLSLRGLRISADFPINYFPTDSPALAVQGGYVGLEFHHARVYRIIGRKEKVTYALLRVCAIDLCGIDRSNLFAVELKKSSISMRTADPKLKEAMKEGKATQIGWIVLGDEIEIDPSKFPKQSIGRFLDECGPISSWRVSAFNTPSKITLKPRLLSNEPLLKERYGGRNIDLVVSECVEKIMKKTGWVVEINALLKSGSIRVIRRNALGEVRTSSKSGLPVSLNLR

SEQ ID NO: 7855 - protein, 1043 aa, synthetic construct
  REGION 1..1043: note = Synthetic
MRQTSSNETVLGLDLGSNSLGWALLEFEGNKPKAIIDCGVRIFQAGLEGDIESGNAVSRARERREKRSLRRQTDRRKRRRLHLLHLLQGLQILPEGTPEEVFPTLDKSLIEKYSQIEGIPKKTLAGKLPYWLRARALENPLEPFELGRVIYHLGKRRGFLSNRKTPAKQEEGIVAKEIDELRHEMEKAGSRTLGEYLAGLDPQEDRIRSRYTQRGMFQEEFEAICTFQKKFHDRLNEETIARIGKTIFFQRPLKSAKKLVGHCELEPNSRRAPWATLEAQQFRYFQMVNNSSIKTVDDLAFRPFTDTERTILIDNLERDGDLTFAKAKKLLGKDSKTTAFSFEAGEESRFLGNRINKLLKGIFGNDWFGFDKEKKESILADLRSYRDSQALAKRAQEVWGLDPQKAQEFASIELEPGYCALSRKAIRKLMPYLQKGAPYASARIEVYGEFLKTRIAEDFLLPVKQLFELRNPVVERSLTELRKVVNAVIRKHGKPDRVKIELAREMKQSQKKRREITRTNRLNEKRRLEAAQRIVKEVGITNPSRNDILKVMLGEECNWICPYTSKPVSMMALFGDSPQFDIEHIIPFSRSFDDSFANKTLCYVDENRTVKRNKSPWEAYHGSSRWEDIINNVKRFKGDLRDSKLERFLKRPDELEDMDGFISRQMNDTRYASKLAMHYLGTLYGGLYDKDKQQRVFAVTGQVTAILRNAWSMNSILNDGGFKERGDHRHHAVDAVAIALTSPATIRGLSEAALPSFERNAYRKRFKPFQMPWSTFLQDLEKRIAGILVSHRVNNKVNAALHEETNYGIVKSSTEKAFCIRRRLDSLKASEIDQIIDKRIAQIIRNKLAELGHTEPSKAFVSPENHPHFVSAKGEKIWFHKVRIYVSVKPKKIGEGPAERYVTPAFNHHMEIFEITDSKDSHKKKWECEVVDTLGAMDRLRCGQPVVRKKAEGKRFLFSIATGDTLRLNNPGEWPEYLHVRTVCKSNEGNIEIAGVSISDARKKKDTLKAKEFYRIRSTTSLQNLDPQKVTVLPCGDLLVASG

SEQ ID NO: 7856 - protein, 856 aa, synthetic construct
  REGION 1..856: note = Synthetic
MRQTSSNETVLGLDLGSNSLGWALLEFEGNKPKAIIDCGVRIFQAGLEGDIESGNAVSRARERREKRSLRRQTDRRKRRRLHLLHLLQGLQILPEGTPEEVFPTLDKSLIEKYSQIEGIPKKTLAGKLPYWLRARALENPLEPFELGRVIYHLGKRRGFLSNRKTPAKQEEGIVAKEIDELRHEMEKAGSRTLGEYLAGLDPQEDRIRSRYTQRGMFQEEFEAICTFQKKFHDRLNEETIARIGKTIFFQRPLKSAKKLVGHCELEPNSRRAPWATLEAQQFRYFQMVNNSSIKTVDDLAFRPFTDTERTILIDNLERDGDLTFAKAKKLLGKDSKTTAFSFEAGEESRFLGNRINKLLKGIFGNDWFGFDKEKKESILADLRSYRDSQALAKRAQEVWGLDPQKAQEFASIELEPGYCALSRKAIRKLMPYLQKGAPYASARIEVYGEFLKTRIAEDFLLPVKQLFELRNPVVERSLTELRKVVNAVIRKHGKPDRVKIELAREMKQSQKKRREITRTNRLNEKRRLEAAQRIVKEVGITNPSRNDILKVMLGEECNWICPYTSKPVSMMALFGDSPQFDIEHIIPFSRSFDDSFANKTLCYVDENRTVKRNKSPWEAYHGSSRWEDIINNVKRFKGDLRDSKLERFLKRPDELEDMDGFISRQMNDTRYASKLAMHYLGTLYGGLYDKDKQQRVFAVTGQVTAILRNAWSMNSILNDGGFKERGDHRHHAVDAVAIALTSPATIRGLSEAALPSFERNAYRKRFKPFQMPWSTFLQDLEKRIAGILVSHRVNNKVNAALHEETNYGIVKSSTEKAGLPESFRDRSDHRQEDRTNNQEQACRIGAYGTVKGLCLS

SEQ ID NO: 7857 - protein, 1084 aa, synthetic construct
  REGION 1..1084: note = Synthetic
MAYAREDVGEYMLGLDIGVGSVGWALIGLKDGKPDRLIRLGSRVFDAGMDEGSFEAGKENSRNASRRQARQARRMTERRVRRQAKLYRLLARAGLLPEGDHPELLCGPPREERARYVHEQLKALDVDLKKKHLHGKPGRHRLEQVWPYWLRARALTEKLEPYELGRALYHLGQRRGFQSNRKELAALDEAGAEAAQKKPKGKKKDHGEEKDPRKKELGEVKAGINQLEQDMKALRAETLGQYFASLDPHEKRIRQRWTSRDMYKHEFGKIWDAQAGHYLAILTDDLKKQVHRAMFHQRPLKNQAFLIGWCEFEKGRRRAPWSLLIAQRFRMLQQVNDLRIVTSGNPAGDHLTVEQRDALLARLEREGDLKFKAAKELLVPLGLPKGARFNWESGGEDRFLGNRTNAKMFTVFGDRWWQFNKADRERIVEDVWSIQKAEALARRGKKAWGLDDAAAKKFGSLALEDGYCNLSRQALAKLVPMLQDGVPYATAVEEAYGKKDCKPVACLPPAARQYPHIRNPMVLRVLSELRKVVNAIVRKYGKPGIIRVELARDMRRSKKQRTEVWKQNRQNESLRKKAIKKIFDELQRENPSRGDVEKVLLAEECDWTCPYTGNRFNMNGLLGPTPQMDVEHIIPFGRSLEDSFVNKTLCDVDENRHKKRNKTPFEAYGGTTQYKDILARVRGFKGRAADEKMRRFLMEKIDSMDEFASRQLNDTRYAATQATDYVALLYGGQYEKGGKRFIQASRGGVTAYLRNEWQLNSILGDGGTKSRDDHRHHAVDAVVTALTEPGTIKMLSDAAERAPKEGRRRFGRLEDPWPGFLQDVRAAVEAAMVSHRVSHKVNGPLHEETNYAPSQERDKQGKPNSFTVRKPIDQLTPNEVEDIFDEVVKKIVKAKLDALGGDPKKAFKDSSTHPFIATKYGRRIPIHAVRIRKSVAAFEVGRGMRGRYVTTESNHHVEVFEVGKGQWDGRVVSRYEALRRQAKGAPVVDRKAQGQGEWLFSLTCGDLVEMKGRDGKPCLYAVRTVCESSQGRIIIAYAKATDARKKKDIIAAKDWRQVGLNALAQMLCRKVLLMPLGEVRYAHD

SEQ ID NO: 7858 - protein, 1047 aa, synthetic construct
  REGION 1..1047: note = Synthetic
MGPSQPKTQILAVDMGSNSIGWALIELHNNQPEKIVDCGVRIFEAGKDGDIESGRAESRATARRHARLLRRQTERRCRRKQKIINHLQKMGLLPRGKAKDIIPEIDRSISKENKVGFNEIRQGVSPDNLLPYLLRKKALDHKLQKHELGRAFYNLAQHRGYISNRKTRQQDDDSKVVFAGIAELEEEIKARNARTIGEYFASIDPHEKRIRNRYTHRQMFTHEFDSIWTAQKKHYPQLLTDQNYKYLFDAFFSQRPLKSSKNLIGKCELEPNCRRAPVACFEYQRFRYLQLINNIELLDKQTGEIRILTQKEGSKLIKAVETAGDLTFHQAKKIIGTKPKTVEFNLEKGEEKKIIGNRINGAICSAIGNDWLNLSDQQRQNLLHDLKSIRSSDVLTRKLTSKYDFTKEQAHSLSEICFEQGYASLSRKAIRKLLPLLEQGKPYATARKEIYGEMIANVEQKDILPPVNEFCIIRNPVVQRTMTELRKLVNTIIRNHGKPEIIRVELAREIKQPEKLRQQITRKMRQNEALNETAKERIRVKVPVQSPSRDDILKVRLADECNWQCPYTQKPIQMADLVGESPKFDIEHIIPFSRCLDDSFANKTLCYHEENRRVKCNKTPYEAYCGHDEKWDAIIGSVMRFNGSYRDSKLRKFQTTPQQLQDIQEFVSNQLNDTRYASKVAMQYLSTLYGGLWDNQGKRRVFAVNGQVTAIIRNMWDMNSILNDGGRKERNDHRHHAVDAIAVALTTSGLIHQLTKQSLPHWKRSGYKARFRQLPLPWKTFHQDIQKAIDSIIVSHRVDHKVNGPLHEETNYARIEHNGQTYVRVNRKLNTLKPSEVAKIAHSHIRCAVENKLRELNTSDPEKAFADERNYPVLPGRHGKGCTIRSVRINCNANPKPVGMKDNPRFCTPKSNHHMEILEITNSAKKSKWQAVVVDTLEAMNRLRMKEPVVKRNHGPKKKFIFSISPGDTLYFNNPDGFPEYLRVRTVSVSNSGATEIAGSALNDARKKADMKKAKQWYRIHSMNSFKNKQPQKVVVLPDGKVIKANN

SEQ ID NO: 7859 - protein, 1047 aa, synthetic construct
  REGION 1..1047: note = Synthetic
MSEKISGEYILGLDIGASSIGWAILGAPKGKPANLIRLGARVFDAGMEEGDFAAGKENSRNAARRQARQARRLLSRRVRRQRKVFNLLVKAGLLPAGDPAEVIPALDAALRAKFIRPMPKYSPERRQAEQVLPYRLRALALTQKLEPFELGRAIYHLGQRRGFLSNRKAPPKKDEKLGEVKEHIHKLEKQMKDAGAETLGQYLAGLDSETERIRRRWTSRAMYLAEFAKIWAAQAIHHPGILNQELGKRLHRAIFHQRPLKSQAGLIGTCEFERGRKRAPWGLTLAQRFRLLQQVVNARIVAPHGADRYLTADERDALLRVLEREGDLSFSKARKLLNLPRGHGFNWESGGEERFLGNRTNAKLAGIFGDRWWAFTDAERDQIVEDVLSIHKDDALTRRGQRRWGLDAEAAANLGQTALEDGYCGLSRQALAKLVPMLQDGVPYSMAAKEVYGERHTEPLDSLPPPAPTYPHIRNPMVLRVLAELRKVVNAIVKQHGKPAAIRVELARDMRRSKKQRTESWKKMRQNERDRKKAAEKIAQETRVQEPGRADVEKVLLAEECNWQCPYTGKSISMSSLLGPSPEFDVEHIIPFSRCLEDSFVNKTLCEVKENRDHKRNRTPYEAYGASPDRWHDVLERVKRFKGSAAEGKLRRFQQQTIEGIDEFTDRQLTDTRYATRQATQYLALLYGGLYEKDGRRFIQAGKGGVTAYLRNQWQLNTILGDGGTKTRDDHRHHAVDAVAIALTDAGTVKMLSDAAVRAAQKGTRWWRERIEDPWQGFLEDMRQAVEGMVVSHRISRKVNGPMHEETNYGPSRERDPQGKPVFFSVRKTLDALTASDLENIADERVREIVKAKVDALGGDPKKAFASAENHPCIQTKHGRRIPIHAVRIRKSEAMIGVGQGPRQRYVASGSNHHVEIFEVKDKKGSTRWKGRVVSRYEAMRRLATRRPVVDRTPPEGGRFIFSLTSGEIVQLAGDQGRQELYRVRTVSLSKSARIEIDLARLTDARLKNDIIKSDDWLRITSLDKLAASSCRKVIVTPLGEIRYAND

SEQ ID NO: 7860 - protein, 1080 aa, synthetic construct
  REGION 1..1080: note = Synthetic
VACGTIVPYCDIAGQSPLWYTYTSISNPRVLPSQGESVMAEEISGDFILGLDIGASSVGWAILGTDKGKPVKLVRCGARVFDAGMEEGDFAAGKENSRNAARRQARQARKLTNRRWRRQRKLFNLLVKAGLLPPGDPGKVMPELDATLRAKHLAPLLKYSAERRRLEHVLPYRLRAMALTEKLEPFELGRAIYHLAQRRGFLSNRKAPLKKDEKPGEVKAQITQLEIKMKEAGAETLGQYFAGLDPEEERIRRRWTSRGMYQVEFKKMWDEQARHHPAILTEELGKRVYRAIFHQRPLKNQSNLIGTCEFERGRKRAPWGLLLAQRFRLLQQVGNTLIVAPNGARRAFTADERDRLLNFLQREGDLTFPKTRKLLDLPKGHKFNWEEGGEERFLGNRTNAKLAAIFGERWWGFSETDRDQVVEDVLTIHKDEALARRGAKHWGLDKEAAARLGQMALEDGHCALSRQALLKLMPMLQDGVPYSTAVKELYGDRHGDALDCLPPPAPAYPHLRNPMVLRVLAELRKVVNAVIRERGKPAAIRVELARDMRRSKKQRTEAWQKMRQNERDRRKAADKIAKEAAMENPSRADVEKVLLAEECGWICPYTGRAISMNDLLGPTPQFDIEHIIPFSRSLDDSFLNKTLCEVKENRDHKRNRTPHEAYARDPEKWDAILARVRRFRSSAADAKLRRFQQEELVDLEEFTKRQLNDTRYATRQATDYLALLYGGLYEKDGRRFIQASKGGTTAYLRNEWQLNTILGDGGAKSRDDHRHHAVDAVAIALTDAGTVKMLSDAAERATSEGRRRFGRVEEPWAGFLDDVRQAVQAISVSHRISRKVNGPLHEETNYGPSKRRDAQGRPESFRVRKRLDALSPADVKLIADERVRQLVEEKLAELGGDAKKAFADSKSHPCIVTKRGRRIPIHCVRLRKSEAMIEVGQGPRLRHVASGSNHHMEIFEVKDKKGKTHWKGRVVSTYEAMRRLATRRPVVDLTPPDGGRFLFTLAGGEVIQVNHTNGEPLLYMIRSFWDTPSGCRLRRDRINDARRQEDIERKGREPMLSILQEESCRKVTVTPLGEVRYAND

SEQ ID NO: 7861 - protein, 1061 aa, synthetic construct
  REGION 1..1061: note = Synthetic
MKNEKNPGHILGLDIGVNSIGWAIIGTSDGRPSSIVATGVRVFPFDADFERDFKAGKPASLAAPRREARLMRRMTERRARRHTKLFNMLARAGLLPAGKPEHVIPALDKEILAKYGRAGSRTLAHVLPYELRKRALDGKIEPYELGRALYHLGQRRGFLSNRKTAPKKDEDEKSVVKGGISQLAQEMNGAGARTLGEYFAGLDPTHQRIRNRYTSRGMYEDEFERIWQGQARHYPEVLTHELKKRLHKCIFHQRALKSAKGLVGTCEFEPKRRRAAWAHILSQRFRIWQQVNNTEIIDDNGEIKPLTEDQRQTLYNALDKEGDLSFTEAKKRLGLSRQCTFNFESGEEKRFVGNRTIAKLAGIFGDRWWAFSDEERDKIMHDVISIQKDATLAKRGRERWGLSEEAASEFGAVELQPDYCRLSRRAMMKLMPYLAKGARYGEAVKAVYGSPFAAEQALGALPPVSKYAAAIRNPAVTRVLSEVRKVANAIVGKYGKPDQVRIELAREMKKPAKERREIMKRNRENEKGRTKAYGRILAETNIQNPTRDDILKVLLAEECRWICPYTGRSISMTALFGSHPEFDIEHIMPFSVSLDDSFMNKTLCYVEENRSIKKNRTPYEAYSGSPAKYEEILQRVNRFQGTGREAKLWRFKQGEMNFDDFVERQLNDTKYATTQAAGYVGLLYGGVIDADHKRRVQASKGQMTAYLRNEWDLNGILGGGEKTREDHRQHAIDAICVALTDAGIVKALSDAAGRAQREGRRRFGRMEEPFEGFWDRAAESVLSINVSHRVSRKVNGPLHERTLYGPAPELDKKGNPVYHVRKSLDKLSVGEVADIVDDTVRKLVGEKLAQVGGPANKVFSNPANHPVLTTKDGRQIPIHRVRIRKAVAAQRIGHDATSRYILPGSNHHVEIFETKDEKGGIKWVGHMVTRLEAARRLARHQPIVNKEHEEGEEFLFSLAPGEMIEVDGDEGRELYVVRVTSIDKSGYITISYVRHTDARKKDVIMGRAKQSGDSTEQSGGVRGRRKPGESDWKKSMPESLKRLNCRKVLITPLGEVRRAND

SEQ ID NO: 7862 - protein, 1047 aa, synthetic construct
  REGION 1..1047: note = Synthetic
MASESAKPYVLGLDIGASSIGWALIGTSNRKPQGLIRCGARVFDAGMEEGDFSAGKENSRSAARRQARQARKLINRRLRRQRKLFNLLVKAGFLPAGDPAQVLPQFDAALRKKHIAPLPKGSRERRQWEHALPYHLRAMGLAHRLEPLEFGRAIYHLGQRRGFLSNRKAPPRKDEKPGEVKAHITELEKKMQDAGAQTVGQYLAALDPEEERIRRRWTSRQMYLDEFKKIWVAQAAHHRTILTEDLCKRVYRAIFHQRPLKSQKGLIGTCEFERGRQRAPWGLILAQRFRMLQQVGNARIVAPNGAARNLTSAERGTLLAVLDRQGELSFGKARALLKLPRGHAFNWESGGEDRFIGNKTHARLAQVFGERWWSFTDSERDQVVEDVLSIQKDETLSRRGQRRWGLDPEAAARFGQLALEDGHCGLSRQALAKLVPLLERGLPYSTAVKEVYGERRKEPVDFLPPPAPTYPHLRNPMVLRVLAELRKVVNAIVRQHGKPAAIRVELARDMRRSKKQRKESWQRMRQNERDRREAAAKIAAEAGIQDPGRADVEKVLLANECNWVCPYTGKSISMNSLLGPNPEFDVEHIIPFSRSLDDSFTNKTLCEIKENRDHKGNRTPHEAYAGQPDKWLEILARVRRFRGSAAEGKLRRFQQETVEGMDDFASRQLNDTRYAARQATDYLALLYGGPYEIGGRRRIQASRGSVTAYLRSEWQLNTILGDGGAKSRDDHRHHAVDAVAIALTDASTIKMLSDAAERAAIKGTRWWRERIDDPWSGFLDDVRQAIEGLNVSHRVSRKVNGPLHEETNYGPSKARDPSGRPVSFTVRKHLEDLSLPDVKLIADERVRQLVTAKLEELGGDPNKAFGRPENHPCFVLKDGRRVPIHAVRIRSRQSAMPVGQGARLRYVASGSNHHMEVFEVKDAKGKTRWKGRVVSRYEAIRRLAKRQPVVDRTAPEGGRFLFSLATHEIMSLTDANGAVNLYRVRKVSQSKSGSIEIAGARLNDARLKDDIIKAGDWLRIRSVDDLARKTCCKVLVTPLGEVRDAND

SEQ ID NO: 7863 - protein, 1049 aa, synthetic construct
  REGION 1..1049: note = Synthetic
MEDKRATPYILGLDIGASSVGWAVIDLDRGKPAHLIRCGARVFDCGIEGTNFSAGKDNSRSATRRQARMARRLLNRRFRRQRRLFNLLVKAGLLPAGDPAQVLPALDATIRAKRLAAFPAKSAERRRQEHLLPYRLRALALSEKLDPHEIGRALYHLGQRRGFLSNRKAPPRKDEKPGEVKAHITELGEKMKAAGVRTLGEYFASLDPEQERIRRRWTSRQMYLDEFAAIWAAQASHHPAILTDETRKRIHRTIFHQRPLKSQAGLIGTCEFERGRKRAPWGLLIAQRFRTLQQVCNALIVARSGITRDLTTAERDTLLTVLDRQGELSFAKARKRLKLPPGSTFNLESGGEDRFLGNKTNARLAEVFGDRWWRMCPWGQDQVVEDVLSIQKDEALARRGRRWGLDADAAARFGQTSLEDGYCALSRQALAKLVPLMRQGTQGKPCSYSTAVDQVYGKRLSEPVDFLPPPAPTYPHLRNPMVLRVLAELRKVTNAIIREYGKPDAIRVELARDMRRSKKQRHESWQRMRQNERERRKAAEKIAAEAHIDNPSRADIEKVLLAEECNWTCPYTGKSISMSSLLGPTPQFDVDHIIPFSRCLDDSFMNKTLCEVRENRDHKRNRTPHEAYAADPEKWEEILARVGRFKSNARGEKVRRFRLETLEDLSDFATRQLNDTRYATRQATDYLALLYGGRYERGGRLRMQASKGPTTAYLRNEWQLNTILGDGGGKSRDDHRHHAVDAVAIALTDAGTVKMLSDAAERAEREGRRRFGRVEDPWSGFLEDVRQSIDGLCVSHRVSRKVNGPLHEETNYAPSKARDAAGNPRHFAVRKRLEELSPKDFKNIVDDRVRDLVTAKLAELGGEPKAFQDPKNHPCFALKDGRRIPIHAVRVRRSEAAIPVGKDARERWVQSGSNHHMEVFEVKDAKGKTHWKGRVVSRYEAIRRLAKREPLVDRTPPDGGRFLFSLAHGEIIHLTDANGEVVFYRVRKVSQAKSGSIEIAVARLNDARLKDDIIKAGDWLRITSMDTLARMACRKVIITPLGEVRNAND

SEQ ID NO: 7864 - protein, 1046 aa, synthetic construct
  REGION 1..1046: note = Synthetic
MAEKISGDFILGLDIGASSVGWAILGTDKGKPVKLVRCGARVFDAGMEEGDFAAGKENSRNATRRQARQARKLTNRRWRRQRKLFNLLVKAGLLPPGDPGKVIPELDGTLRAKLLAPLLKYSPERRRVEHVLPYHLRAMALTGKLEPFELGRAIYHLAQRRGFLSNRKAPPKKDEKPGEVKEHIIELEKKMKEAGAATLGQYFAGLDPEQERIRRRWTSRCMYQAEFKRIWDEQARHHPAILTEELGKRVYRAIFHQRPLKNQSNLIGTCEFERGRKRASWGLLLAQRFRMLQQVGNTLIVAPNGAQRAFTDDERDRLLSVLQRDGDQTFREARKLLNLPKGHKFNWEEGGEDRFLGNRTNAKLAAVFGEDWSKMSETEREQVVEDVLSIHKDDALERRGARRWGLDPEAAAKLGQTALEDGHCALSRQALLKLMPMLEDGVPYSKAVKEIYGDRHGDALDCLPPPASTYPHLRNPMVLRVLAELRKVVNAVIREHGKPTTIRVELARDMRRSKKQRTEAWQKMRQNERDRKKAADKIAKEAGTENPSRADVEKVLLAEECGWICPYTGRAISMKDLLGQTPQFDIEHIIPFSRSLDDSFLNKTICEVKENRDHKRNRTPHEAYAGNPEKWDAIIARVRRFKSSAAHAKLRRFQQETTEGLEEFASRQLNDTRYATLQATDYLALLYGGLYEKDGRRFIQAGRGGTTAYLRNEWQLNTILGDGGAKSRDDHRHHAVDAVAIALTDASTVNMLSDAAERATTEGRRRFGRVEEPWAGFLDDVRQAVEGTSVSHRISRKVNGPLHEETNYGPSRERDAQGRPASFAVRKPIESLSANDVKLIVDDRVREAVKAKLDELGGDAKKAFADPKNHPFLESRRGRRIPIHAVRTRRAESAITVGEGARLRYVASGSNHHMEIFEVTDKKGKRRWKGRVVSRYEAMRRQATRRPVVDRSPPDGGRFLLSLAHGEIMELTSAGRGPELYRVRKVSLSKSGSIEVAAARLTDARLKDQIIKSGHWLRIRSLDNLAAMACRKVIVTPLGEVRYAND

SEQ ID NO: 7865 - protein, 1565 aa, synthetic construct
  REGION 1..1565: note = Synthetic
MCKKQYTLGLDLGTSSLGWAVTVREGVSVGSILNAGVTVFPSGKAMVNGVEKTNNEERRNSRQARRQLARRRLRKQHLLRLLIENDMCPLTQTELDGWMKWDKSKPTEERRRFPDSPRFREWLALDPYRLRAEAVDTPLEDDPDGGFTAREKLGRILYSIIQHRGFLSSRSGKEDGSIYTSTMEKNGKVGIGETRAALGDRTLGQYLYSIAPKEGDPFSDQTDRVRSRYTLREMYVEEFDRIWTRQAPLLGLDREQVETIHYRYFTGKSDSYEARRRLERYRAKDPSAVIETLSGDEHRFVYKTTTSLKEHLAGKIWYDKDGTIRFVSKESTLFWQRPLRSQKGMLDKCSLESHKVKDRGTNRFITQGPTVVSASHPYYELYRVLQTLLNMRVRGQKLDLMMLQSMLDKLLTYGKNTKVSKLKNDLRLTADLNFPDDFELPGCPTISGITKLLDSKKMPSRKGDASPSDRLVIPFDLNLYTRIWEKLFFYDDNHLLAQGLKKIEGAVFVEDLEDKLAKLHLSEDYGNLSLHALRNILPYLLRGEELYDAVLLGGIRNAVRDVALVDDHDDALRSWIHSQGPLERGEMIDRIVALLQDPDGPFHLDTPELKLRQRLYHPSQGTAKHQLMDQLPPVENLRNPMVEQALWSMRRLVNYLLNNYRSTIRPDFTFDEIHVELARDLKLSTQKRAEMRQRQKKAEEDNDMARDYLRSQGLSTSRENLQKYKLYMEIAGRSMGVVTCPYTGKVIRGLSAALDGNSNFQIEHIVPRTVTYDDSFANKTLCDADFNRKKGNLTPWQFYQQDPSPKLWGADSWEEVERRAFRLLPYRKALRFVSKTVEDQLSGDQLVDTAYISRKAKEYLSYICPQDHIRLYPGRVTARLRQLWGLNSILSQGPTVTKDQLPTECALSTDQIPAVVIGNKKSGELSCILPKYTSRPEREEGDVVLLVRVQKGKIYSARYSELPLSWDKATSLADGTYYIVLRSTEVLRVERMFADEPRLSEDQLRARVTIELNRDGQPKLSSREMDVRILKDMPLPAAPGNYWLTIPLVSVPEVTPEHPRAKVAPDTIKVTGSVEQGEFISKVYRQGGVAMADGVAQVILTPMLSEASFTKIKLDAPVITSGEVVLTGAVDTSDLFVCDQDDELRVQIDSFDEPGKYYAVFSFDPMASYILSYEQAPKLSSDEVVLDGELIYNDKDDRIHFSPAKNRDDHRHHALDAIVIACTGQKVLTAMSTYNAHADDYERGTGNRPTFSSPWQGFRDDVRVAIESVLVKHKQSTKILNKVTKKITKDGRTHRSQGLAVRGKLHNQTFFGLRQSPQESFLSLHKRESIQNIESYSSLSRVADVTIRDLMISRLRDIGIDTTRKEYSIPKEAHAFVDEEGNYTIHLPNKRKGGAPIPVKKVRLCERSGSPIQIAGYNKWVKPENNEYLMVYTNYDNKIQYLCVPFFEEVNNKIRGVDGWKKLKDLKEVLLVLRINDMVLWGLNTNEARSILQSGDYREASKYLYRVNAISAGEFELRHHSDARTDKSSRTRITPGTLRKRGLPIKVEVSTMGELSVVRIAESDD

SEQ ID NO: 7866 - protein, 1566 aa, synthetic construct
  REGION 1..1566: note = Synthetic
MCKKQYILGLDLGTSSLGWAVIVREGDSARSILNTGSSVFPSGKTMVGSKERSNNEERRNFRQARRQLARRRLRKQHLLRLLIEKDMCPLTQKELDGWVKWDKSKPSEERRRFPQSPRFREWLALDPYRLRAEAVDTPLEDDPDGGFTAREKLGRILYSIIQHRGFLSSRSGKEDGSIYTSTMEKDGKVGIDETRAALGDRTLGQYLYSIAPKEGDPFSDQTERVRSRYTLREMYVEEFDRIWTRQAPVLGLDREQVETVHYRYFTGKSDSYEARRRLERYRTKDPSAVIETLSGDEHRFVYKTTTSLKEHLAGKIWYDKDGTIRFVSKESTLFWQRPLRSQKGMLDKCSLESHKVKDRGTNRFITQGPTVVSASHPYYELYRVLQTLLNMRIRDRKLDLMRLQSMLDKLLTYGKNTKVSKLKKDLRLTLDLNFPDDYELPGCPTISGITKLLDSKKMPSRKGDASPVDRLVIPFDLDLYTRIWEKLFFYDDNHLLAQGLRGIEGAAFVEDLEDKLAKLHLSEDYGNLSLHALRNILPYLLRGEELYSAVLLGGIRNAVRDDALVDDHDDALRSWIHTQGPLARGEMIDRIVALLQDPDGPFHLSTPELKLRQRLYHPSQGTAKHRLMDQLPPVENLRNPMVEQALWAMRRLVNYLLNNYRSTIRPDFTFDEIHVELARDLKLSTQKRAEVRTRQKKAEEDNDMARDYLRSQGLSTSRENLQKYKLYMELAGRSMGVVTCPYTGKVIRGLSAALDGNSMFQIEHIVPRTMTYDDSFANKTLCDADFNRKKGNLTPWQFYQQDPSPKLWGADSWEEVEHRAFRLLPYRKATRFVSKTIEDQLSGDQLVDTAYISRKAKEYLSYICPQDHIRLYPGRVTARLRQLWGLNSILSQGPTITKGQLPAGLALSGDQIPAIVIGKKKSGVLSRILPKYTSRPEREERDVVLLVRVQKGKIYSARYSELPLFWDKAASLADGTYYFVLRSSEVVRVERMFTDQPRLREDQLRARVTIELNKDGQPKLSSREMDVRILKDVPLPTAPGNYWLTIPLVSVPEVTPEHPRAKVATDTIKVSGSVEQGVFVSKVYRQGGVAMEDGLAQVILTPDLSEVSFTKIKLDAPAITSGEVVLTGAIDRSDLFVCDQDDELRVQIDSFDEPGKYYAVFSFDPMASYILSYDQTPNLSSDEVVLEGDLIYNDKDDRIHFSPSKNRDDHRHHALDAIVIACTGQGVLTAMSTYNAHADDYERGTGTKPTFASPWEGFRDDVREAIEAVLVKHKQSTKILNKVTKQITKDGRTHRSKGLAVRGKLHKETFYGQRQSPEEPAPTMHYRVPITSITKSKQLNQVADPTIRALMIRRLQDMGVDTTQEDYAIPGNAFVDKAGNYTILLPNKRGVPVPVKKVRRRRVVNNTVQLDGYNKEVETSNNDFALIYEDQEGNYCEEVVTFWDSADRLLHGQDRVQLPMDAKRVVMTLRINDMFVIGMSEDELRSAIGSSDYGGISDHLYRVQKLSSMHYVFRLHRASTLNHDEELYTIRSFSALKESTPIKVIIDTDGTISIATRDDQANNHHQ

SEQ ID NO: 7867 - protein, 1122 aa, synthetic construct
  REGION 1..1122: note = Synthetic
MEYRLGLDLGTASIGAVAVTPDKKDGSLHILAQQLRIFAEPVENDQGTLQPKKAARRQARQQRTQIERRAKRLKDIAKLSQHWGLDRKAIAPDNGQHLPRLRALAVTERVELEDLFRIFLKLAKRRGYAGGFRTQGDESGEVKSGVERLRNIMQERGCETLGQYLYDRQQRHLPIHLKIKTTGGSTGNKKGKQEITDPESENLYATRDLVMEEFDKLWDMQATFHTVLNNEHEGKHLRTVFREVIFHQLPLKSVSGMVGKCPLETNLPRAPRSHPVVQAFRIEKQLSDLRWGIRKNAEALSPEQKTIIRELLTKQKSTSFSSIEKALEKAGCPKPMGKSLNLQTITRDELQGDTTIAAFRTMGVEQAWLDIPTNAQTQVINLLADMGSPEQFDTDHWHTQMVGANGKTRTFTPETVQFINTLITSGKFGRLAKMGLEGGRSAYSIKALQTLTEWLQNPWWPENWSGEMIVSEDNAVRVYYPQANQQPTLQDTLPLPPKTGNEVVDGALRQLYRTLNIIRTELKAWPSSIVVEMSRELGQGITRRNEIMEQQGKNQLARKNAKAKLEENGCTASERNIKRYLLAAEQDFKCPYCQGQNTLKISDIVNGHETNFEHILPRSLTRVGLKRSEIVLAHRHCNDEKGDQTPWQAWGDGKNPVRWKAVEVMANWLSDKSNKARKDRSRAIAMSRKAKLLIMQDFENDVLNDESIANFTDRQFHESSWIAKEAAQWLRSICPDVSVSRGQMTAHLRRSWGLETVIPEARLKEGFPILDDEGKPVSAEEFADFRQAWEGHAKSKSGQYVERKLDKRIDHRHHLIDALTIALTSRSLYKKMADHYRNDCERNQRGEKSRIRLHAEPPYKKVRDAALSMILTCEVSHKPDRYPSGQLFYDTTYGRKLHPGTGKATFTYRQTLASLVGEKDNADKAYKQVQSIVSDDVRQLVLKALDDGIAKGMTPFTALQQPIEHPQYSREGKPVYIKKVKCYGNSAENAKEVKHRNRQGQVLTKYLNSKGYAYLEIRVENGKLIGEPNLIPLHQAASQKNRTKPSNVIRFFKGDTVEDSKTGKHYVVRQLKSQGGGMLVLSPVTEPRSVEGLSAKDGAFRPSGKSVVRFRGVEKCLNTVSF

SEQ ID NO: 7868 - protein, 1194 aa, synthetic construct
  REGION 1..1194: note = Synthetic
MSMHYRMGIDVGLKSVGLAAIAIDDSSDNPLDAIPMKLLSVMSVVHDGGTDPDGAKTDTSRMSSAGVARRARRLRKRATARKKNLQKLLEKYGFDFERANAIGDLAFSKDPYFSWYAREQAASSYIPNETQRNLAIAISLMAIGNHRGWRNPYSSINMLKGQSLKPSSFYLEFANELMELNRIPANTDINSEHRLTPAQLVVRANLLSPDVNFRGNPANRSKNRRDRSVNLGITLIPLGKLHQSDYYYEARTILEMQHVDETAKNELLTELFSQINPKDVGAAASKVARDDLQPSLARASKASLEFQRFRILTTLQNIRIKTNDSTRRLSADELVSAYEYLCSEDASLDADLSWDDVALHISPSLKRSDLTGVGGITEDGEPISSKRPPVLTTQSLIVRAGKKEALRDVSQWWARASDDEKEMFINFLGNVGASAECQTNEEIMARNSVDEEMSRLEEDSLAELEKISIPAGRAKYSINTMRRLNHRMLHDNLDLHDARMREFGVASDWKPSAEELGTPTGNPAVDRTLRIVSRWVRACVDKWGIPESVNIEHVRDGFMSPKTAREYDKKLEFRYKENKKIREEIVKALSEEGSEGLLSNEYVRRSDIRKWQALQRQNCQCAYCGRRISFFTAQMDHIVPRKGAGSTNTLDNLVATCANCNKEKSNTLYSVWATVEQRKATIERVKHWNRDSYFANGKEFEQYKRAVIARLNQTVEDEPIDNRSIESVAWMARCLSEQIEGYLIERSAADSDPGRKNSVHVYRGWITAEARRASGIENELPWLGGASGKTRLDRRHHAIDAAVIAFLRPAVAQVLVERDSMRRASLDLGRDNDWKTYCGGLEEHSIYLNWRDNQMTALGMLLCRAMLSDKIAVTSPLRLKLSRGKVHEDTVQKAVYLRVGDAMTSEAIDKALSPAVWGALTHQPDYDPATGLAENNSRVLNVHGKVLPHDSKIGFMSDKAKLMKREYALRCPVRGGYANLGDSIHHARIFRIPGSRGKGFRFAMMRVAEIDLARYRDADLFSVQLPMQSISVRFADDSLKAALRDGTAEYLGWLVVNDELVINPDASLFSPKGKQAINLFMRAFPGTRHFKVTGFPQRSKIKIEAQMLSSEGLPDLSSIEDDAERSRIIEDVYGGLAWTDDEVDTIRKAFGDHAGLLLSVDVLFATKPLVVRRSTLGYPRWRSKSNMPLSWTVE

SEQ ID NO: 7869 - protein, 1557 aa, synthetic construct
  REGION 1..1557: note = Synthetic
LDTEKPCGNSLLQQRISPRITTNHSLRQFLMNHNSVAAVSQDKGYGPLTFGFDIGMASVGWAVLNETRIVALGVRAFDAAEHPREKIPLNAKRRMARVARNRIAQRAWRLKRLMRLMRDIGLVESADAERELGKIPAIADRNDISPWALRARGLRERLGPTEWARVLYHLVKHRGFALLRKVELNSESTTIPTERGAGANGQSSPNANTRREVEGLQRGLALTHGALRELAPHFKTIGNIFWCASQPEESLSPMDRKHLEKLDPVLRKSLRQAIRNKGDSYAHASYRADLRDELLELFAAQRSFGNSFVDTALSPATTRLETVQVLNTKRDVSNVFWEQVLALFDLQHPPITERQMSQMIGKCEFEPTQPRAPKNSYANERSTWLQKLNNLEIRSDGNTRPLTSEERSCLINLPFEYETVTYALCREELVKNCLFPSNWREAAFSVLTYRSKVAKNAGWVYVVDDTSADRIPLHKYGIDKSVPKQLVKQRKEVIGKLLERLEFGSVNFGEARRLLEVPQSLKFQIEHTDTQLLTDHDEASEQIPFHNTPDRLLCANTLIKWIASGEVRSKKLSAALMRSLDQLKVGGSVATFEQLRARAMSIDPKLRGSFEVTRQTSFVVEIENEEHTQIPVVFEGAQAIEDEPFVSLKGWHKLKYALAKPHPDLWEEFCTAYKLPESQAGKVAASQIDSIMTALSTCATDAEITEKLKSDAGVDPLHIDSLLNVSVSGFRNLSLLALRTILPHLESGAQYSGACAMAKYDHAKPGGPKKRELYLPPLQTIAFERYRHGNPIPTKTEQRYKDLKNPIVARSFNQARLVLNSLVEKYGSPTYVAVELARDLAKSGEERNKIESDQEINRKRNTAARAAFITSRADAASRLKQPLPTREEGTFALKFKLYKEQNGQCPYTDGDDSHKRIDLDRLLTEGEYTQTDHIWPRSRVSDNSLKNKVLVKAGANQDKLNRTPYEWFGHDEARWLRFEKWVQAQQGMNSDKKARLLAKELDDDEFSARNLVDTRYITRLFANMVRNHLIFANQSLNAGQDISPDDTGMDRLNKFFANCVRTPQGKVTSFLRSRWGLSKDRESSDLHHAIDAAVVAACSVKLIRDVNNWHSREEAETGRYARQSNGCYLDRSTGEILTREQALTKGLIFPEPWNHFAKELLARLSPDGCTYDTTCNRKYDFSNYPANEAVAVKSVLVSRLVRSAKNGEIHDANPVGMSASWIQKRIPLKQLTLEILDEARLPVAYKEHNKGLIAQLRERLQQHSGDAEKAFAAPLDWLPKKASGMQAIRLPIMVKNGKHFQEAPAQCLTEAQAYKRVDLEKLTLKHLTVDKLGEQYYRRNKVLFDALRERLEQFDGDGKKAFTTEFRKPIHSRPRKPGVAAPEQGPVVRSVKLPVPANSGIRVRGGVAGLSAMRCVHVYWTGQAYFFEPQYQAHAEKVFGVVTAPTQAVKLFALRKNDLIEVLRADGSRVFGYFVMFEANDGRLTIRNHDRPGTTRKKAAESDMVNEFIGEEKESSSTSDPTLHRFSLSAVRVLRKYKVGVLGDYSEILVPQKHGLA

SEQ ID NO: 7870 - protein, 1117 aa, synthetic construct
  REGION 1..1117: note = Synthetic
LSRSARRRRRKKRRRPAGRRQTLRRASLADESPCCNQHDNRRSGTIHVIIADRGHPVKGVIMKNSLLPEEHVLGLDIGANSVGWALVAVKDGQPMRLVRAGVRVFAAGVEGDIGAIESGRDVSRAVARREARLRRRMLERRRRRLNKLAMLLQQGGLLPPGDISSAAARMTFFADLDRSLFPQDLRRSHPHVLPYRLRARALDEKLSPCEIGRALYHLAQRRGFLPAGRVKAGRGGEEEQKEQGQVEKGIGKLEERMRESGARTLGEYLSGLDPDEQRIRGPGHWTARGMFEDEFEKVWAAQTPRYPEILTEELKKRVHRAIFFQRPLKTQRHLVGECELEPGRKRAPIALPSAQRFRFVQKVNDLEIITPDGERRKPTPEQRETLVSALETQGDLEFKKVRKLLSLSKEHSFNHEHGGDKKLIGNRTASGLGQIFGDRWRTLSAEQRDRVVEDVRSMHNRDALKRRAMRVWGLDEHEAERLASLPLEDGHCSLSRKALEKVLPAMERGVRYATARNEVYGERPRPPTAAFLPPLDRAVEVRNPAVERALTEVRKVVNAIVREHAKPALIRIELARDLKKSRPDRKRIAEGNRERETARNRAAEEICKEAGIAKPRASDIEKYLLAEECSWQCPYTGKQINWDTLFGDSPQFDVEHIIPLQRCLDNSFVNKTLCDLEENRKRKGNRTPWEAYGADPQRWEEMIRRVRGFRSWAARAKLQRFQMKDLESLDDFATRQLNDTRYASRRAVEFVGLLYGSGADGVDPKGTRRIQASRGQVTRFLRDEWRLNAVLGGGEKRREDHRHHAIDAVVVALTEPGTIKRLSDAAARARLERRRRFGKMPDPWSGFLDEVRAAIERLIVSHRVSRKVSGAMHEETIYSKPRTGPDGKECVHVRKPVGGLSKQDLENIVDPIVRDCVLAKLEELGGGEASRAFSDPKKHPSLAARDGRQVPIHKVRVRVSAGTTSVGEGARERHVILGNNHHVEVLETKDAKGRAKWEGFVVSMYEAMRRLKAKEPVIRRDHGPEKKFLFSLAGGETIEIDEHDGTRGLYVVRTVATGRSGQREYPAIEFARLNDARKKEDIKKAGAWKKALVDPLRRAQCQKVTITPLGEVRRASD

SEQ ID NO: 7871 - protein, 1080 aa, synthetic construct
  REGION 1..1080: note = Synthetic
MYSPYTTSGGDLSRRVPMNAMQESASPKGELVLGLDIGAASVGWALVEEVDGRPVGLRGAGVRVFPTGSGETLSDITAGREESHAVKRRQARLRRRQLARRRHRLDKLALILQSAALLPPGEMQPADAAMAYFDAVDRDLFSRAARKEDPHLLLYRLRARALDGALTRYEIGRALYHLAHRRGFLSNRRVRARPAGAKETEEEKEEGKVRTAIGELARSMAESGARTLGEYLAGLDPHEQRVRGRYLSRKMLEEEFGAIWAAQAAHHPDILTADLRKKVQRAIFYQRPLKTARHLVGRCELEKRRRRAPLACLAAQRFRLLQKVNDLKVLLPDGHERGLTEEERKRLLEVLERQGDLKFPAMRELLGLPKRGCKFNFETEGEKGLIGNRTRSKVVAVFGEQPWQALGAEGQERVVIELRSLHKPEAVKRRAMKLWRLEEEGAARLAEVALEDGYSNLSRQALEKVVPLMEEGMQYATARKQLYGEEPPRAVRSLPAVQRVVTLRNPAVERALTELRKVVNAVMREYGRPDHIRVELARDLKRPRKDRKGMAAAMADNRRGREEAARRIIAEAAIPSPRPSDIEKWLLADECCWECPYTGRPISFQALFGGNPEFDIEHIIPLHRSLDDSFANKTLCYLAENRERKRNRTPWEAYHGTDQWEEMIARVKRFKSRLAGAKLRLFQTEEVRSLEDFTAQQLTDTRYASRLATRYVGLLYGAPETGVDPEGRRRVEASRGQVTAQLRGRWGLNAVLGGGEKTRDDHRQHAIDAIVVALTDAGTIKRFSDDAAHAALTERRLGRLEPPWRGLLDDVRKAVEGMVVSHRVSRKVSGALHEETVYSKPHQDEEGKEFVHVRRPLGGPPKGLSEKEVADIVDRSVRERVKAKLEELGEKDPRKAFKDPKNHPALRAKDGREIPIHSVRVRVRVSPELIGGGAYARRVKLGSNHHVEIVEATDKKGNPRWEGHVVTTKEAMRRLKAREPIVQGDHGPGKRFLFSLADGEIVELNAEQDKRALYVIRTVRTDRRVEFVGITDARKKGSRSERGTIKGEGAWFTAAVDKLRERGSRKVVVTPVGEVRWASD

SEQ ID NO: 7872 - protein, 1117 aa, synthetic construct
  REGION 1..1117: note = Synthetic
LRGRIAGTQPRLEKRESTSLGGAQWRSTGERCLRTKVLAVSSRTIAAQVQCAVSIACRKASVKGECPVAVQAGDKRCVLGLDIGANSVGWALVEESGGSPVGLVGCGVRVFAAGVEGDIESGRDQSRAVKRREARLRRRMLERTARRLTGLAVLLQGGGLLPQGPLSSEEERHRFFLNLDRTLSLALPAGQDPAMLPYRLRARALDEGLQAYEIGRALYHLGQRRGFLSNRRAPSKKHEESEVKEGIAELAREMEAAGARTLGEYFSGLDLHHARIRHRWTSRQMYLDEFDKIWETQAQYQPGLLTNEFRRQVHRAIFYQRPVRSASHLIGHCDLEPGRKRAAWALLPAQRFRLLQKVNDLELATPDGVRRRLTGPEREALVAHLETKGDITFPRLRGLLSLDKRTGFKLAESEDRVIGNRTAARLMRVLGESRWEGLSSEDRERIVEDLGSIQKEEALARRVRRVWGLDEEKARELASTRLEEGYCNLSRKAIERLLPLLEQGVAYATARKQVYGDAPPRAAYDEVPPFDLPRRLGRLSMPEVRNPAVKRALNEARRVVNAVIQEHGKPDIIRIEFARELKKARKERKAISERNRANRKAREEAASRLLQEAGIQPATRRDIEKWLLAEECRWECPYTGKQMSAGSLFGEAPQFDIEHIIPLYRCWDDSFFNKTLCEVNENRNVKANRSPWEAYGSDSERWDEIIRRVKSYRGAAAKAKLERFKMTDLVSLDDFAGAQLNATGYASRLARECFGVLYGAGADGVDPRGKVRVQVTRGGVTRYLRDEWGLNAMLGGAEKRREDHRQHAVDAILVALTDQRAIKALSDAAERARSVRRRRFAPIEAPWRSFVEDVGQALETLIVSHRVSRKVSGPLHDETYYSRPRADMEGEERVRVRKPLNGDFKDRDVEAIVDPAVRERVREHLERHAGDARKAFGDAADLPFLEAKDGRRMPIRKARIYKALRTQAIAEGARRREVATGSNHHVEILEVRNKKGAVKWEGEVVTMLEAMRRLRAGEPVVRRDHGPEKRFLFSLCGGDTIELDSEGSRQLYVVRSTSPAGGGRYVLVEFVRNNEARNVGHIKKGGEWSKALLDPLRERNCRKVVVSPLGEVRAAND

SEQ ID NO: 7873 - protein, 1149 aa, synthetic construct
  REGION 1..1149: note = Synthetic
VRWWEYDAGSHPTTDIETAALGTSGGPLRLRDKSLAPQDGAPGRSVDRCLRTKVLAVTSRTIVALVQYVACTTPKGNLSRGCPMKSAQGVNSGDLVLGLDIGAASVGWALIQLQDGMPKVLRATGVRAFPAGVEGGDASAITAGRDVSSAAKRREARSRRRLLARRRHRLTKLALLLQQAGLLPQGDVASGDALVGYFEALDRELFPADARHDTPHLLPYRLRARALDEKLAPHEIGRALYHLAHRRGFLSNRRVKPKAAGVKETDEEKEEGKVKGAISELAQRMRDSGARTLGEYLATQDPEEKRVRNQYLGRKMLEDEFDRIWAGQAEHYPHLLTDELKQRVHRAIFFQRPLKTQRHLIGDCDLEKGRKRAPLALLSAQRFRLLQKVNDLRVRPAEGEERELTPAERTALVDALETQGDVTFATIRRLLHVPRETTFNFQTEGEKGLIGNRTGRKLAEVFGNEQWAAFAPTERDRVVEDLLSIHNHEALKRRAAKAWGLNDTAADRFASIALEYGYCNLSRQALAMVLPPMEQGIPYGTARKQIYGESPPLTAAAALPRLEAAPFTVRNPAVERALTEVRKVVNAVVREHGLPALVRIELARDLKKPRKERKAISERNAANRREREAAAKEIEDLVGPDPRRSDREKWLLWKECRGQCPYTGKPISRDALFGEHLQFDVEHIIPFPRCLDNSFMNKTLCEVTENRSRKGNRTPWEAYGHDPERWGEIIARVRGFQGQAARAKFSRFQTREVASLEDFTTQQLNDTRYASRLAVEYLGLLYGAGRDGVDPQTHRKRVEASRGAVTYDLRSVWGLNGILGGGEKTRDDHRQHAIDAVVVALTEPTAIKRLSDAAERAPLQRRRLFADMAPPWPDFIDHVRAAIEAMVVSHRVSRKVAAALHEETIYSKPHFDDDGKQWVHVRKPLDQNFSARDVPNIVDPAVRQAVHKKLEEVGEKALKDVGNHPALATKDGRQIPIHSVRLRVPITTEPIGTGASGRHVKLGSNHHVEIIETTDRKGQPKWEGIVVSTLKAMQRLKARQPVVQHDHRPGKELKFSLAGGEIIELDAEQGKKDGSDRPCSAAGLYAIRTVSVSKTGRVEVAFVSIKDARKKADIQALGAWGRSDVDPLRRRNCRKVVVTPWGEVRRASD

SEQ ID NO: 7874 - protein, 1053 aa, synthetic construct
  REGION 1..1053: note = Synthetic
MGTMSERMPAAPYILGLDIGTNSVGWALVNVDGTGHPTGALAAGVRVFPVPVTGDISSGLDKPRGAERRAARLRRRMLARRRQRLNKLAHLLQGAGLLPPGALDTPQDHLAFFADLDARLFSAQERKEAPHVLTYRLRARALDEPLSPHALGRALYHLAQRRGFLSNRRQEPKEGDEEGKVKKGISRTHDAMHAAGARTLGEYLASLDPTQERIRQRYTDRKMYQDEFAAIWAAQQPHHPHLLTEDLRKRVSRAIFFQRPLKYPRNRIGQCDLEPRCKRAPLALLAAQRFRLLQKVNDLQVITPDGEICALTTEERAKLVHALDTQGDLTWPKVRHLLGMTKEHRFNHEQADDRLIGNRTNARLVEVFGDRWWALSPAEREAVVDDVRSIEKPETIRARAMRRWGLDQAAAQALADVRLEEGYCSLSRRALAKVLPLLEEGLSYATARKRLYGEPRNLEPKDSLPPVLQAVSVRNPTVQRALTESRRVVNALVRRYGKPVRIRVELARDLKKNRKDRQAIHTRNRENYRRRETALRQILSGTDILRPKPADIEKWLLAEECRWRCPYTGKPISKPALFGPAPQFEVEHIIPRQRSFDNSFMNKTLCEHEENRTRKRNHTPWEAYGGDPQRWEEIITRVKSFTGSAARAKREQFMTGAPGGRDLLSLDDFATRQLNDTRYASRLAVEYLGALYGAGADALDAQGTRRLQASRGQITYDLRSAWGLNNILGGGDKTRDDHRQHAIDALVVALTDPATVKAFSTAASRAPGRARPELPPPWPGFLDEVRALVGRLHASHRAARKVAAAIHEETIYSKPLAGASGKPYSHVRKPLERLSPNEVKRIVDPKVRDLVERRLQDLGEDNPAKAFADGANLPALPAPTGRMVPIRKVRISVSGAVFPIAHGARQRHVKLGSNHHMEVMRTTDKRGEERWHGVVVTTYEAMRRLRTGNRRVINPAGDPAFLFSLCQGEVVELDDGPQGGRALFVVKKITVRGEGETARSTVGIVPLNDARMSTPRGGGEIRELREPSAEVLRRLHCRKVVVTPLGEVRRAGD

SEQ ID NO: 7875 - protein, 1054 aa, synthetic construct
  REGION 1..1054: note = Synthetic
MKSAQGVNSGELVLGLDIGAASVGWALIQLQGGMPKVLRATGVRAFPAGVEGGDASAITAGRDVSSAAKRREARSRRRLLARRRHRLTKLALLLQHAGLLPQSDVASGDALVQYFAALDRELFPADARHDTPHLLPYRLRARALDEKLTPYEIGRALYHLAHRRGFLSNRRVKPKAAGVKETDEEKEEGKVKGAISELAQRMRDSGARTLGDYLSRLNPEEERVRNRYLSRKMLQDEFDRIWAAQFPHFPDVLADDLKQKVHRAIFFQRPLKTQRHLIGDCDLEKGRKRAPLALLSAERFRLLQKANDLRVRPPDSEERDLIPTERAALVNALEQRGDLTFEAVRKELNLPKGVTFNFQTDGEKGLIGNRTGRKLAEVFGNEQWTAFAPTERDRVVEDLLSIHNHEALKRRATRAWGLNETAADRFASIALEHGYCNLSRQALARVLAPMEQGVPYATARKQIYGETPPLTAVAALPRLEAAPFTVRNPAVERALTEVRKVVNAVVREHGLPGRVRIELARDLKKPRKERKAISERNAANRKAREAAAKEIEDLVGPDPRRSDREKVLLWKECREHCPYTGKPISRDALFGEHPQFDVEHIIPFPRCLDNSFMNKTLCEVTENRSGKGNRTPWEAYGHDPERWGEIIARVRGFQGQAARAKFSRFQTREVASLEDFTTQQLNDTRYASRLAVEYLGLLYGAGRDGVDPQTHRKCVEASRGAVTYDLRSVWGLNGILGGGEKTRDDHRQHAIDAVVVALTEPTAIKRLSDAAERAPAERRRLFADMVPPWPDFIDHVRAAIDSMVVSHRVSRKVAAALHEETIYSKPHFDDDGKQWVHVRKPLDQNFSARDVANIVDPAVRQAVHKKLEEVGEKALKDVENHPALAAKDGRQIPIHSVRLRVPVTTEPIGTGPSGRHVKLGSNHHVEIIETTDRKGQPKWEGIVVSTLEAMQRLKARQPVIQRDHGPGKPFLFSLAGGETIELDAEQDERKLYTVRTISVDSGGRVGFVSINDARRKEDIAKAHAWYRETINGLRKRGCRKVVVTPLGEVRRASD

SEQ ID NO: 7876 - protein, 1052 aa, synthetic construct
  REGION 1..1052: note = Synthetic
MKSPRQSESQPHSLILGLDIGAASLGWALVEVGPERPQSIKASGVRVFHPPVDEKKGDIAKGTEVFHSAARREARLRRRQLARRRHRLDKLAGILQEAGLLPPGDLSSADAAVRYFETLDRDQFPREARRANPHLLPYSLRARALDESLAPFEIGRALYHLAHRRGFLSNRRVKPGAQGDDQEKEEGKVKGAIGELAQRMQDAGARTLGEYLSRLNPEEEPIRGQGHYLGRKMLEDEFDAIWSAQAAHHPAVLTEALRDKVQRAIFFQRPIKSQRHLIGYCDLERTRRRAPMCTLAAQRFRLLQKVNDLLVEGPDGKHALTADQRDRLLEALEAARRLSFPDIRRMFSLPRGTKFNFETEGEKSLPGNRTAHDLAAVFGSQRWSALAPEQRDRAVEDLRSIHNRDALKRRAAKAWGLQGEAAERFAEIALEDGYCNLSRQALAKILPLVEQGMQFATARKQLYGDEPPPAAVTMLPRLESVLEVRNPAVQRALTELRKVVNAIVREYGKPDRIRIELARDLKKPRKDRQRISRQNARNRAAREVAGEEIEDLVGPNPSRDDRVKLLLWKECGGLCPYTGKPISREALFGDHPQFQVEHIIPFPRCLDDSFMNKTLCEIEENRRKGNRTPWEAYHGTDQWEAILGRVKQFRGDARRAKVDRFQTEELPGLDDFTTQQLNDTRYASRLAVEYVAMLYGAGADGVDPQTRTKRVEASRGAATSYLRDEWDLNTILGGGEKTRDNHKQHAIDAIVIALTDPAAIKRLSAAAARAPEARRRRFAPLPPPWEGFLDHVRALTDHMVVSHRVSRKVSAAIHEETIYSKPQLDERGKPCVHVRKPLESITKKDLPDIVDPAVREAVAAKLEAFGDKAFKDRANHPTLRAKDGRMIPIHKVRLRTSVSPEQIGGDGAYSRSVKLGSNHHVEIIETQDKKGNARWEGCVVTTKEAMRRLKAREPIIRRDHGPAKCFLFSLAGGEIIELDAEQSKRQLFAVRTITVKRTGRVSLEYAAINDARKKNEIQAANAWGMADVDPLRKRHCRKVVVTPLGEVRTARD

SEQ ID NO: 7877 - protein, 1057 aa, synthetic construct
  REGION 1..1057: note = Synthetic
MESKRDGSRWLGIDLGSNSIGWALLDTRKDDAAEMIDAGVRTFPAGVEGDIDSGQDASRNVERREARQRRRMTMRRSRRKAKIARTLQRAGLLPDGDVTDPVRRDTLLKELDQSIYTKYDRVLDDDSPERAALEQLPYFLRARALDHKLAPHELGRAFYHLSQRRGYLSNRKAPPKKDEKEGEVKKGIAELSRKIENAEARTLGEYYSKVRPEKADTKRIRDRWTARAMYQREFDRIWEAQAPQHPNRLTDGFRHKLHKAIFYQRPLKSQRHLIGPCSLEHGRRRARWALHHCQQFRMLQRVNDLEVTDPEGVKRSLSPDERIRLLDALDTDGDLTFGAIRKLLGLRGHTFNLEGGGEKKLPGNRTAARIIEAIGEARWDGLTSEDRSALVQDLISMRSRDALARRAQGAYGLDEETANELADVRLEMTFCRHSTKAIKKLLPLMEGGVPYRTAVEEIYGEQGPFAEPVDALPPICEVDPTLRNPAVLRTLTELRKVINALVRRHGKPDLIRVELARDLRKSRSDREDASKRNRRNQKAREDAKQKIIDEIGSDPSGRDIEKVLLAEECNWTCPYTGRTISMRALVGQTPQFDVEHIIPFHRCFNNSFFNKTLCYHEENRSRKKGSTPYEAYAGSPDNYAAILERVKKFQGSAAREKLRLFRMEDLEPLDDFASRQLNDTRYASRAAVEYLGLLYGGAIDRAGKRRVQATRGAVTRYLRDEWGLNAILGDGGSKSRDDHRHHAVDAVCIALTRPGVIKRLSDAAKRAAQAGRRRFAPIEPPWPGFLDDVRSAIETINVSHRPDRKVSGALHAETNYSPPIVETDENGNTVEYHRVRKPLGALSRKAIENQIVDDAVREAVLAKLDELGGSSKKVFQDPQNHPQLIAGDGRRIPIHKVRIRVPEKAVPVGSGHRRRHVLTRANHHVEIFETTDRKGRAKWDGEVVTMLEAHRRVGAGEPVVRRDHGPGTRFLFSLCGGDMVEIDHKAEGRALYVVRTIAKEGEKESIRFLLAPASDARRKTDMTKAGVLVRPGLESLRKLNPQKVSVDPLGMVRRAND

SEQ ID NO: 7878 - protein, 1134 aa, synthetic construct
  REGION 1..1134: note = Synthetic
LLGLPRGDYSRPGEGQQRRGSGQKATPPRRRASGRSVERSLRTEALAVTSRATAALVQCSLRVADTSDLVKGDTVEIVADSGRSRSESVLGLDIGAASVGWALVETQDGTPCRLIAAGARAFAAGVEGDISAGRDESRAAKRREARLRRRVLARRRYRLTKLAGILQSGGLLPAAELDSPEAVDAFFTELDRELFTQDMRARDPHLMHYRLRARALDEKVTPDEIGRAIYHLAQRRGFLSNRRETARPRRDDDEGVVKKEIGELEQQMRDAGSRTLGEHLSKLDPEKKRVRDQYLSRGMIECEFGAIWQAQAAHYADLMTDELRTQIHYAIFHQRPLKSPKRFIGFCELERDRRRAPLALLGAQRHRLLQKVNDLRFTTKDGQTRDLTPEERRKLSQALEARAEMTFGAIRKLLSLKDGRFNFETEGEKGLIGNKTAARLAQVFGDERWEALSPAQRDQVVEDLRTIHNPAARKRRAMKEWGLDDEGAARFAEVRLEDGYHSLSRQAISRVLPLMEQGTQYATARKACYPDRAEGRPRDLLPPVHEVREVRNPTVQRALTEVRKVVNAIVRKHGKPSLIRIELARDLKRNRKQRGEIHKRNAENRRDREQAAAALLQERGITKPLRSDTEKWLLAEECGWTCPYTGRQISVEALFGDAPQFQVEHIIPFPRCLDDSFLNKTLCHVEENRRKANRTPWEAYHGSDQWDNIISRVKSFQGGGRGRAARNPKLRRFQMEKVESLDEFTSQQLNDTRYASRLAVEFVGQLYGAGADGVDASGRRRVQAGRGQVTADLRAEWLLNSILGGGEKTRDDHRQHAVDAAVVALTDPGTVKRLSDAAARAESAHRRRYAPLDPPWPTLLDEVRDAVNAMVVSHRVSRKVAGPIHEETIYGRPRPDEEGRLHVHVRKPINSLSPKDIASIVDPAVRQCVQEKLAALGESDPAKAFKSPDTHPTLRSRDAREIPIHKVRIRRSDATRQIGLGAYAREVQLGNNHHVEIVEAMDAKGRLRWEGVVVTTYEAMRRLKEGEPVVIRDHGPGRRFLFSLAGGEVIELDEREGGEAEGGAVPARLLYVVRTIALSGSRVSLAFAPTADARRKEDIIRAGDWGRADVGPLRRRNCRKVAITALGEVRNAAD

SEQ ID NO: 7879 - protein, 947 aa, synthetic construct
  REGION 1..947: note = Synthetic
MKIAGTGRTQSEFVLGLDIGAASIGWALVETRDGQPQSLKAAGVRAFAAGVEGDISSGRDQSRAVTRREARSRRRLLWRRRHRLTKLASRLQQAGLLPPVELSTPETINGYFTNLDRDLFPQHIRTRDPHLMHYRLRARALDEKLTPYEIGRAIYHLSQRRGFLSNRKETARPRREDDEGVVKEAIGKLEQEMHAAGARTLGEHLSRLDPEQERVRGRYISRGMIERELEAIWQAQAFHHPDILTDDLKLAVRRAILHQRPLKSPKRFIGFCDLERDRRRAPLAILASQRHRLLQKVNDLKFIPNDSAPCDLTPEQRAALAQALDTTPALTFPAIRRLLSLKGGRFNFETEGEKGLIGNKTAARLLAVFGEERWAAFTPQERDQIADDLRTIHNPDARRRRAAKWGLDEEAAAHFADLVLEDGHHSLSRQALARILPLMEEGQQFATARKACYPDRAEGNPRDLLPPLDDVMEVRNPTVERALTELRKVVNAVVRKYGNPYCIRIELARDLKRNRKQRQDIHSRNIANRRDRDRAAAVLLQERGITNPRRSDIEKWLLAEECRWTCPYTGRQISLEALFGDAPQFEVEHIIPFPRCLDDSFLNKTLCHVDENRRKGNRTPWEAYHNTPQWDDIIGRVRSFQGGGRGRAARNPKLERFQRQDTDALDDFVSQQLNDTRYASRLAVRFVGQLYGAGADGVDPQGIRRVQAGRGQITSDLRNEWALNSLLGGGEKTRDDHRYHAIDAVVIALTDAATVKRLSDAAARAPSAHRRRFAPMEPPWPTLLEDVRTAIEGIIVSHRVSRKVAGAMHEDTIYGRYRYPGEDGKERDWAHVRRPLSGSRSALAKNDIPSIVDPAVRRCIEEKLAALGETDPAKAFKTADTHPTIRARNGREIPIHKVRIRRPDTTQRIGLGPTARDVKLGNNHHMEIVEITDSKGQTRWDGVVVTT

SEQ ID NO: 7880 - protein, 1082 aa, synthetic construct
  REGION 1..1082: note = Synthetic
MAATQEGSRAQDSLVLGLDIGAASVGWALLEKENGSPARLRASGVRVFEAGTEGDIAAGKDSSRAAGRREKRGRRRLLARRRHRLTKLAKVLQQADLLPPGELEPAEAAIGYFNALDRSLFDTEQRKANPHLLLYHLRARSLDEELTTHEIGRALYHLAQRRGFLSNRRFKANAPPLADEEQATESKRKAKPKPREKEKDEGKDDGVVKGAIRDLQTQMQDAGARTLGEYLSTRNPEERRVRSRYLGRKMLQDEFHLIWAAQSTYHPQLRTEELRQAVYKAIFFQRPLKSQRKLIGECQLEPGRPRAPMASLAAQRFRLLQKVNDLLIQSQAGEQRRLTDEERKTLVDALETQGDLSFAAIRELLGLPKRGVKFNFETEGEKGLKGNRTSVHLSRAFGERWEKLSAEERGRVVTELRSVQKPETMKKRGMKLWGLDGEAAARVAEVALEDEYCSLSRQALAKVLPRMEKGEQFATVRQDIYKTSDLPAADQVESLPRLEATGIEVRNPAVQRALTEVRKVVNAVVRAHGRPDFVRIELARDLKKNRKDRQQISLNNAANRKAREKAAREIIAAAVGLANPSRRDVEKWLLADECAWQCPYTGKQISCASLFGEHPQFDVEHIIPFPRCLDDSFMNKTLCDAEWNRTRKGNDTPFEAFRGDPEEWERIIRRVKGFTGSGRGPKLARFLQEEVAGFEEFTTQQLNDTRYASRLAVRYLGMLYGAGVEGVDPQGRRRVQASRGGVTAFLRNEWELNSILGGGEKTRDDHRQHLVDAVVVALTEPAAIKRLSDAAELAPEARRRRFAPMPAPWPGFLGEMKKRVLEEVVVSPRVSRKVATALHEETIYSKPHEDEEGKPCVHVRKPLGSLSTKDVFDIVDPAVRDCVLAKLEALGEEDPRKAFKDPAQHPAMRAKDGRMIPIHKVRIRTSVTPFPLAAGAHQRHVKLGSNHHVEILETKDKRGNVRWDGCMVSTYEAMHRLRAHQPVVQRDHGPEKRFLFSLAGREVVELDEDEDGSRRLYVVRDVSVRESGYVRVRFVGINDARKKDDIAKAGAWYEKPIQGLRRAGCCKVVVTPLGEVRRVGRD

SEQ ID NO: 7881 - protein, 1276 aa, synthetic construct
  REGION 1..1276: note = Synthetic
MKVLGLDIGTNSIGWGLIEDEKQEIIAMGVRIFPVGVNISTKFKEESKGKNRRIGRTSRRCAFRRKKRINELKTILFEMGIWSGHPSYKSSILAYQLRSKGLDSLLTLEELAIVLLHIARRRGFQSGKKDDIDLKSLIREEEKLLHIKDVEIENQVEEEDDDDKEEKKVKAGINELNKKIAETKARTLGEYFYQLFLKEQAKEKCFNPEQPSERIRARYTSREMYKYEFEEILKKQQSYYHDVLSDDTVKKIWNCIFFQRKLKSQKHLINQCRYESQKRCSPISKPIYQEFRTWDSICNIRVVFAEDEPTRPLSLSEKEILYNAAQNSANLSLTDVRELVFGGKRVEINFDEDGKVIGNITRIKIINALLGSARVEEIKKRAENHPSKNPLLFDELLFEEIDKNGLNEYLQGEVYERIWHWLHIFDSRSWLKEKLEKEFTSIIQKPTLVKQELSKLQILRLASMTIEKKFGSISEYAIKKLLPHMKKEGGNLTTACQAQQYTITTEEYKYDKDRILKKELAFLKINELRNPIVQRALSEMIKLVNEIIKKYGQFDKDGNLDIKTVRIETMRELRKPKKAREKIYKENNDKQTIRRAYAKFLTNSGLGKEKGEILPSDPLVKKYELWLELYPIPSEEFEKKKDKEDFEELDSKMKKGEIKDMGTFAKGFLKFADNIEKPENTKFKLWLESNRISVYSGKPISLARLLQKNSDIQIDHIVPLKRSMNNDFANKILCEGDINNEKKDRTPYEYFMQEHGKGEWKAFCARIKKLPDYKQEMLKLEQFPDEEWSKQQFQNNAYTARKAKQILSSVFKDVETVKGQATAMLRRHWKLNYLLNKEGKDIKERKDNRHHAVDAVVIALTTPELLNNHLTKVIKYNNEREKFVNINYSRDKDRIDIKQESVDILQEPWRNNQLKEQVNLHLEKLLVSHKSEERLYSKRRAKTLIGKKVKTWISKNGKLRKKVKPIFKLSEKSIIAPRGNLHTQPYRQITMPFDNHPSGYERGEKIVVKKILVAEIKQVDIANVLDLITQKQLRKYWAEKAQAKNKDHEVHAKAYSKPENDFDVPMHKVTVIMKKQPSLIEIRPHTPHRIFVESDSNYIIGIYQAEKTDKKGKVTISSKAVAVNFIDAIRAKRAKKPLLADEFESIKDKLIYGLKRTIKKGDMFIRYDKSPDEIANYFDDDKEIFNRLYKLTAMSVTQTDGIDLNLSKHYVNNMTKIKKKEDDGNDEPTENNTEKQEKVDKIEKYTQNNAFLRIRSIANFKFVKVRIDILGRISIA

SEQ ID NO: 7882 - protein, 1163 aa, synthetic construct
  REGION 1..1163: note = Synthetic
MRCSCEQAEPCAEMFPLTVIGEKHRSDTWLDCSTVANYSKGSKSHFSPKGLPMNDNQPFEYTLGLDIGVSSIGWALVAEANGQQKPARLLRAGVHLFEAGIDSGKNTPAGALESGNEQSLAKVRRDARSARRRGWRKTARKRKLLRTLIRLGFLPNPKGRLETPIEIDCYLKEIDSQLKSKWEAGERISHSERQLLPYRLRAACLDGRLEPIEIGRALYHLAQRRGFYANRKIDLSEADAQDGNGDGSDEGSEQRQDDLGKVKAGILSLAQEMDKVGARTLGEFFASLDPTDPQSQRIRNRYTDRKMYQDEFNKIWDAQYPHNPNLLTNEAKSLIYPAIFFQRPLKSQKHLIGKCSLLPHLRRAKISNRRFQRFRILQQLNDLQIIPTKKVEISGYDAKTRGVKQKKTEIPDTNQSRRSLTDDERSKALRLLEDGDASFREMRNAGIGPKLSRFNFEEDERTEKKLIGNRTDAKLKAIFGPQWDEFTEVEKDAVYADCVSIQRIDTLEKRATSHWNLSPENARRLATVKFEDDYGSLSVTAINRLLPRLENGEHLETIRNELFPDRVKKTVPAFDLLPPLEKTEIDLPAPAIRRALTEVRKVVNAIIRKFGKPVHIRIELLRELKKGKQQRKEISKRIGQNEKERKLASDEFKKQYPQFIEHGEVSRDDVEKIRLANECGWICPYTGRQFCWDDLFVSHTVEVEHIWPRSRSLDNSFANKTLCFAEENRSVKKNKMPSEVYDDRRLSEILERVARFSGRYRQVKMERFEAKEVPSDFTNRHFNESSYIARAAGQYVAYLYGGQIDDERRRRVHVTSGGVTAWLRRLWGFNQLLGDSDEKNRHDHRHHAIDAIVIAMTTPDTIRSLQTAAARAEQFHKMRLFDSIECPFELEQVRNIVSGIVVSHRQSRRVRGKLHKDSIYSRNMGTEQSPRHHIRKAIELLTENEIDKIVDPRIKEIVKVAWAERKAQGARTIGQAFGEPTNRPQVPHGKGWVYLRRVRISTGDKPVMIGGKAGDQQLNTTNGRFVNLGANHHIAVYETIDGKGRRKLQDRIVSLLEAMERVRNGLPVVDKTNGNGQSRFIFSLCKNDFVEMDNNDLDERIIMRVSNISHRFDVECIVHSDGTPATLRKQFGGRIRLSLSKWIARNARKVRVTYLGEVENAGG

SEQ ID NO: 7883 - protein, 1452 aa, synthetic construct
  REGION 1..1452: note = Synthetic
MSSKILGIDLGTNSIGIAIRNDYRNENLQDQLEYFSSDIFKAGKGGPNQQESYASERTCHRQSRRLKDTHRRKLWATLSLLIEYGMCPMKEDSLKKWSTYNKALGLKREYPVDDKDFNSWIALDFNRDGQPDYSSPFQIRSELTKRQLDLNLREERELLGRALYHIAQHRGFKSSKGESLADVEVVTVNNEIEAVYEEKSVDVMAEMQESETNKSKGLAAYMNEHGLNTVGQAYALMEREGRRIRNLDGFQAVRRQLMDEIKYIFEYQSGLHGAKYDNFKTRVLSEKKDEGTIFYKKPLRSQKGLVGKCTLEPSRTRCLVSHPDFEEFRARQVINNIKYRPSDDSQWLTLPLSIKDELYNKLFAGKSSRALFYFKEVREFIEDRLSLRLYNDESGRNINYKDGQSIPACPVTYRLRMMLGDDWQTVSISGTKVRLSNKGKMSHQVCYNAIDIWNVCANSQMNDNVILEKMAKTMFGFTDQQAKQFRLMYADIRQGYAMLSHKAITNINRMLRRGYVYSDAVMMAKVPDLINTSDIEIDELITLFDNVVKPRIEKQKMVRSVTNRLIADYKSHSYSNNGRFADHDYDYQLDESDIRDVERMTVEQIGAKEWNLLATEEQKTLLDEVKNLYQQFFSHRERDYFRVPNLSDGLVEMLSEKYPSVEKSVWVKKLYHPSQIDIYKFAKKEMSKDGLPLLGTPNVGSIRNPTVMRTLNIMRRKLNYMIEERIIDPNDTRVVVEMTRINNDTNLRWAINRYNEERRKQNEAISSLLKEFIPQFENKAPEEADIDKARDYFDQIGCEFYSLNHEGLNEKQLAEQHEYYDMIVTKNKISKSGFEKCVDKYKKWKEQGCISIYTGKPIRFTDLFDDNLYQVEHTIPRSISFDDSDVNKTICERHYNAAIKGNRIPTELPNYDKDAIIDGVKYTAIKPRLAYWEKKVRDYERQVELWRYKAKQSQTKDRKDFCIQRMHLWRMELDYWRNKLDRFNITEVKPGFRNSQLVDTGIITRYATLYLKSVFKNVDVQKGSATAKYRKILGLQSIEEKKDRSNHCHHAVDAAVLTTIPEASKRERMLKLFYEIEEAEMSHHDCTQKKRELNDEIADCEIGSVTGLYDYISSKILVNHITHDRTFSSTHRKEYRNGRPLKKDGIELYSGGDGVRGTLSKESFYAANRYGDETWMVMRQSINSFQKMVDLDSIVDQHLRDNIKNTIQLRMQEGDSFAKAIAQPIWLTDKNGNEIKVDRNGRPLAPIRHVRCRAKAGRGFLSFDKAFPIKDFSQHSSRKLVRLDNRNHKQHVYVQNSTNYLCLMYEGIKKGKVDRELRLISLYDAAQLVNTYRTRNLEDILWNEPYYASMTVKGLTAYRLSAVIKVGTRLLFWKESPDEINQFTSQEELSKRLYVVNKFNVTGCVYVYVKRHSDASADEPIHFNANQLNCLIEHRDFEINPLGEVILKEQND

SEQ ID NO: 7884 - protein, 1451 aa, synthetic construct
  REGION 1..1451: note = Synthetic
MSSKILGIDLGTNSIGIAIRDIDRGENLQDQLEYFSSDIFQAGKGGPNQQESYASERTSHRQSRRLKDTHRRKLWATLSLLIEYGMCPMKKESLKKWSTYNKSLGLKREYPVDDKEFNSWIALDFNRDGQPDYSSPFQIRREITKRQLDLDSREDREILGRALYHIAQHRGFRSSKGETLAEAEALTDRNEMEAEPDEKTADVMAGMQESETKKMKDLIAYMEAKGLDTVGQAYASMEDEGKRIRNKEGYQAVRRQFMDEIRYIFEHQAGLHVAKYRDFMTRILSEKKGEGTIFYKKPLRSQKGLVGKCTLEPSKTRCPISHPDFEEFRARQIINNIKYRPSDDAQWLTLPKNLKEEIYSNLFAGKSSRSLFHFKEVREYLEKKLQLRLHNDELGRTINYKDGQTIAGCPVTYRLKMILGNDWQTASIPGTKVRLSNKGKVSHQVCYHAVDIWNVCANSEIAEKGELEAKAKSIFGFTDQQAKQFRLMYADIRQGYAMLSHKAIANINRMLRKGYIYSDAVLMAKVPDLIDMSDAEINELMALFESIVKPKIEHQKRVRSIANRLIAKYKSYSYTNNGRFADHDYTYLLDESDIRDVEKTTVEQIGIKEWSLMSDDEQGALLKEVQELYQQFFSSRERDYFKVPHLSDGLIDLLSEKYPSLEKKVWKEKLYHPSQIDIYQFARKEQTKDGRSLLGTPNVGSIRNPTVMRTLNILRRKLNYMIEEHIIEPDDTRIVVEMTRINNDTNLRWAINRYNEERRNQNMAISNLLSEFIPQFKHKAPEEADIDKARDYFDQIGCEFYAVSHEELNEKQLTKQHEYYDMIVTKDKVSKYGFQKDVERYKLWKDQGCISIYTGKPIRFSDLFDDNLYQVEHTIPRSKSFDDSDANKTICERHYNAAVKGNKMPTELPNYDKDVIIGGVEYTAIKPRLAYWEKKVKDYEHQVELWRYKAKQSQTKDRKDFCIQRMHLWRMELDYWRNKLDRFNMTEVKPGFRNSQLVDTGIITRYATLYLKSVFRNVDVQKGTATAKYRKILGLQSVEEKKDRSNHCHHAVDAAILTVIPVAAKRERMLQLFYEIEEAESAHHDCSQKKYELSAEVADCEIGSVAGLYNYISDRILVNHITHDRTFSVTRRKEYRNGRPVRKNGKELYSGGDGVRGALSTESFYAANKYGDEIWMVKRQSIDAFKKIEDLDTIVDQHLRDNIKNTIELRMKAGDSFSKAIAQPIWLTDKDGKEIKHDRNGRPLAPIRHIRCRAKAGVGFLSFEKALPLKDFIQHSSKKLVRLQNREHKQHVYTMNDSMYLCLMYEGIKKGKVDRRLRLVSLYDAAQMISIAHSRNVEQVLWNEPYYASLTDKGLTYHLSAIIKVGMRLLFWDKSPEEINQFMPQEELAKRLFVVRKFNAPSTIYVYAKHHADASENKPAHYTANQLNCLIEHRDFEITPLGTVILKEQHD

SEQ ID NO: 7885 - protein, 1273 aa, synthetic construct
  REGION 1..1273: note = Synthetic
MSRTLGLDLGTNSIGWAVIDSAHGGGVVAKGVQVFPKGVGEEGGREVSVASERTGYRSARRIKQRRKLRKQNTLKELIHFQFCPEISKKDIDLWKEKKVYPAHPGFVNWLRCVEKLPDGKEGNPYAYRWWVATHHLDLSVPENRYILGRAFYHLAQRRGYKSNRISGEEKDGKVMGAISALHEKMNGRTLGQYYYEDCFGKAPVRGEGHYTSRSDYESEFSAICKKQNLSEEMTDAIRNAIFYQRPLRSQKETVGPCLLEPKKKRVPVSHPAYERFRLLQFLNNVRIRPQGDNVPRMLNMEEREKGIKWLSSLKRTEKFEKLAKKLTPRKASCSFGEKQNEMEIQTWGFNFRKDAGVPESTTTSTLIKLFGEEYPAGIRKIYRKSGGKTDAEIVSDIWHAMYSFDDDNILNEYAREKLGLLDDNQRIEFCKPLKQGYGTLSLAAIRKINPWLEKGLIYSHAVYLANLPTIFRKAGKEWNVHTEEIASDIGQIIATQRENTAIRSAANDLRRHLIQEEVKDLSMYLSEGRNIRQCQSVLGNCIQMELGRNRWANTSEQDQENVISQALEIVKSCWDSEHGTSATVPILNQTARILHYLQEEHGIPESYLEMVYHPSVIETYPDQNEKLASPRIPSIRNPVFMRTMFRLRAIINELIETGVIDSQTRIRVEMARDLNDANQRAAIERFQRMREKMRSEYSKAIEEAGFNPTPTLILKYQLWIEQERRCLYTDQQIGLTEFLGENPAYDIEHTIPRSRRFDDSQTNLTLCSREFNREIKGRKLPQELSSKEELLDRVRKLWWPEVEKYESFCAKNQMAKRSAADKAAKDKALQNLHYNRMWLRYWKDKIRNFETTEVPEGFTNNQLVDTRIICKYAVLYLKSYFDRVYSMKASALHALKEIWGLTDKSRDNHIHHCIDAVVTASIRPSFYQELAAYYHQMDRFEQDGQSRPHPPEPWPGFAQYLNHDIFEDVLVVHHSKNPLLKPTFKKEKLHGKWVIKQGDSARGSLHKETYYGVIKPPAKDGKYSQKELACVVRKKLDSTFKDFDRIVDPVVREKVKEQKDKLKTGDTIWYDESRGIPIRKVRIYDATQPGSLIKLKSHRDISKHEHKRHLGAANESNYLVALYRGKVKGKPKASWKKVSNFEAVQASKHGIWDELLPATTNEGLEVYQILKIGMQIILKKTNDEDLRNLDQPELSRRLYHVTILEGPRTIIRHHQEARPAKDLPRCISSFPWHPSENPPGLLNLASNGLWVAVEGVDFKLTQSGQMIWIDAEP

SEQ ID NO: 7886 - protein, 1117 aa, synthetic construct
  REGION 1..1117: note = Synthetic
MGNNTIQDLELSFDVGHSSLGWAVLQNTGAENFTSPTPFAKRTVTQETPPAPRVNLLGCGVVTFGADDCLASKRRDYRRQRRHARATRQRIAQMEKLLAHLKVLSAEELKQKHQQAGGNAVPWFLAARVLASNGEAKYLLGWKELWDVLRWYAHNRGYDGNSRWANASEDALTATEQDDKKSDTEKEKNANALMAQHSTQTMAETFCKVLGLEPLGEKQSSEKNFKRLNAAFPRPIVEKEVRRLLELHQKNLPAINAVFLNSLFKDWQAAAVPGLKLPARYQGGLLFGQLVPRFDNRIISTCPSTGEKVPSKNCPEFFKFRWAMALANIRVAGAKEKELRPLTGDERKKINALMVSEGALTPTELKKAIRELPGCERNNLETMLMHPDAKDGLLLDPIQKLVRGDKLKTLWPAFSPRVQKRVRDLWQRGKLVTLECICAIAQKLGEPLTEFEVELNKLADAANTKRGKKEGSFNREVLLREPLTIKKLDGRAAYARPLLVRAYAEVMAGKHPKETGGCLEITDAMRQAQLQKQIDQQTNNHLVRHRLLILERLLKDLIAEPAYANGDKSRVAKVTIEVNRDLREMSGKSAKEIQQDLGRRLANHHGVAAKLEKDLDGKTYNGQPIQITAGLIRKARIAEDLGWTCPYTGKTYDALDLVSRQVDKDHIIPRSLRPADGLDSLVITFSEVNKMKGQRTAIQFVSDEQERPVEGMPQLSIVSITRFKKWAESLETFKGHDDDKRRKKKRKELLLLQSYEEKGFVPRDLTVTSQLVRLGAQNIRKTLPDLNPSKVVSLPGSVTGTVRKGWNLLGCLALAAPQVKEADGTLKNKTDIRSVTHLHHALDACVLGLASHYLPNNGGLWELMLKRNPNEADKAVLRSTGYFDFDSQGRFGLTELPETLKEQIRRRLAEKRVVQHIPADMSGMRVEENTRGITAIKDGRVYLRQQSRDAKTGKLSVKETEESASKVVGLKPGKLTPQKGVRVITDNFGVAILDHAEEGEEKFVVVPWHKVWPRIQELKLKNSGKVPRLLRIGTLIRVPKKAGRSDYRGLWMVRGVQLNQRAGFLVDLSSPDVIQYRVSGRDDCAQNIRLQALYDGGLEILKTPLTGIVSCPITSSV

SEQ ID NO: 7887 - protein, 1090 aa, synthetic construct
  REGION 1..1090: note = Synthetic
MSAKQNPPPDLSLSFDVGHSSIGWAVLQTSPDVEIKGCGVVIFRADDCLASARRGYRRQRRHIRSTRQRIKRMKALLLHLCVLTQAQLDKPGCAWPWKLAGRVLAGGKTLTWPELWDVLRWYAHNRGYDGNRRWSAGEAANEKEDQEKVQNAHALMREHDKQTMAETFCAVCGIDPMGAKCSSNIDPAKRFKAKNAAFPRGIVEAEVARLLRTHFGKLKGVDEKFATAMFSDWRALSCPAIKLPIRYQGGLLFGQLVPRFDNRIISKCPITGQKVPSRNTREFLSYRWGMLLANVRVARLADRELKPLTVEERKELDKLMRAEGSMTAKQFTEAVEKVAGSIRHNLSTMLMHPDAKDALVLDAVQECLTTEKPMPVKALFAALPTRIQKRARGQLRRGQSFTFAALYEAAKQAEELVAAFDAAVQQQLDKAAGKGRKKDKPLTRDELLAKSLSVRKLSGRAAYARPILVQAFAEVMNGKHPKEEGGCLFVTEKMREAQLNRTLAQQTNNHLVRHRLLILARVLKDIIEEYAGGDKKRVGKMTIEVNRDLREMSGKTAKEKAQDLGLRLANFKSVVKKLEEAFEGKQIRITPGLIRKARIAEDIGWVCPYTGEHYDAFDLLHKNVDLDHIIPRADRPSNSLDSLVVTFPEVNRMKGKRTALAFMKEAETKQVEGLPRLTLKSLNHFKADIEALRPGSDPRKAKRRGAVTGPIDDDLRRWKRKELLLKVEKWDGGDFLPADLTVTSQLVRLGAQALKREFIDLEEPPVTVSLPGAVTGEVRKAWDVLGCLSKACPEVLDAEGKVKTKTEIRDITHLHHALDACVIGLAAHFIPNRGRVWELITKRRLTAAEQSELVALKVFTPESHGEVRLNDLKPERKEQIRQRLAERRVVQHIPKRITGLRVEQNTWRVQSIEDGDVTLTQRIRQPDGKRPRKQVIQRSGKLIGLEPGKLQTLKGALVIGENFGVALDPTPTVIHFHKVWSRLRELKKVNGGKMPRVLRNGHLIRVSEGSRAGLWRVTSIKQTEAYGLALDLAYPDSVGLSRPNAPILQLQAEGLAIVGTSLTGFDASAVMYAAIKRRPRKLKTEQSESS

SEQ ID NO: 7888 - protein, 1056 aa, synthetic construct
  REGION 1..1056: note = Synthetic
MASRRNAPDLQLAFDVGHSSIGWAVLQANPDVEIAGCGVVIFRADDCLASARRGYRRQRRHIRSTRQRIKRMKALLLHLGVLTQTQLDKSGCAWPWKLAARVLVGGKTLTWPELWDVLRWYAHNRGYDANRRWSAAEAEAEKEDTEKLENAKTLMDKHGVKTMAETFCKELGVDPRGAKSSSMTRFKGLNAAFPRGVVEAEVARILQAHFGKLKGADEKFAAALFSDWRAIPCPKIKLPQRYQGGLLFGQLVPRFDNRIISICPISGQKVPSRNTPEFLNFRWGMLLANVRVARLVDRELKPLTVEERRELDRLTRAEGAMTAKQFTDAVEKVTGAIRHNLATMLMHPDAKDALVLDPVQKLVTTGHRAALWPTLPERIQKRARGQLRRGKPVTLGDLGNEVPAFHAQVQSILDKTAGRGRKKDKALTRDDLLREILQVRKLDGRAAYSRPILRKAFEQVMDGKHPAEDGGCLFVTEQTRQAQLSRSLTQQTNNHLVRHRLLILSRLLNAIVKEYADGDKTRIGKMTIEVNRDLREMSGKTAKEVAQDLGLRLANFKNVVKKLEGDESFMRELNQRGLHHIPPGIIRKARVAEDLGWRCPYTGMEYEPVHLLTRRVDKDHIIPHADRASDSLDSLVITFSAINAMKGKRTALQFVNEEQGKTVEDLPNLSIVSVNRYREFVEGLEAFRGHDDDRRRKKRRKDLLLLPSYEEKEFTPRDLTVTSQLVRLGALTLKREFADVKQPPVIVSLPGAVTGEVRKAWDVLGCLGLACSQVLDVEGKPKTKTEIRDITHLHHALDACVLGLASHFIPNNGRVWELITKRNLTSAEQKELIALNVFATGPQGRVQLRDLRPERKEQIRQRLAEKRVVQHIPKRIAGLRVEQNTWRVRGSKDGDVTLQQRIRQPDGKRPLKQAVERASKLIGLEDGKLHRLSGALVVGENFGVALDPQPTIIPFHKVWPRLQELKKANGGKLPRVLRNGQIIYIPKGTYSGVWKVFSAKNNKSGMALDMGRPDVVRLRNKTDGHKINVLLSSLLKDGMTIVDAPLTGVSSAPKQS

SEQ ID NO: 7889 - protein, 1110 aa, synthetic construct
  REGION 1..1110: note = Synthetic
MNNSPSPVPTSSKSANLHLAFDVGHSSIGWAVLHSSPELLGCGVVTFPADDCLASQRRAFRRQRRHIRATRQRISRIERLLEHLGVMSRDELKKKHAAGGGHSAPWLLAARVLRGGKLLTWTELWDVLRWYAHNRGYDGNKAWSAQETEAEKEDTEKVQNAQELYGKYHTSTMAETFCAVSGLDPLGKKISCNLPGDKRPKALNAAFPREDVEREVRNILERHLGILPEMDQNLLRCLLEDWTALDCPQVQLPRRYGQILTAGKRTPGGLLFGQLIPRFENRIIATCPITYERVYQEIMEASGDNTKAKHEAKKLAKVSNKDCPEFYRFRWAMQVANIQVASGIDRSTRSLTAEERCRLDEKMKEKGAFTPGDFKKAVREITGEARDNVEQMLTHPDADKALVLDPALKAIENNKIWKAVFPSLPEPLRNRALGKLRRGKRINLGALLAHSKSPLPQVEALISGLVTSANTKTKAGQPAATRETFLSESIRAELPSGRAPYSRAVMRETTGYIFSTDRHPTEECGPLYRNEAIRTAQLQQAIDEQTNNHLVRHRLLILERLHRDIIKEYAAGDASRIERVTIEVNRDLREFSGLTAKQVAQDLGQRLANFKSVTTRLEKAFEGKNIRLTPGLIRKARIAEDLGWKCPYTGKSYDEFDLLHRAVDKDHIIPRSERASDSLDSLVITFAEVNKMKGKRTALRFIEECQGQTVEGKPELSLKRVSNYLKDVGALETFKGHDDDKRRKKRRKEMLELRDYVEKEFTPGDLTKTSQLVRLGAQLLERAYVSQTKKPVIASLPGSVTGTVRKSWKLLGCLSAANPQVIDSQTNEVHTKTDIRGITHLHHALDACVLAFISKFFRNDGGIWELMIKRRLNASEQNVLKERLGSYVEFTQEGQPKLIDLPLPLKNQIRQRLAERRVVQHIPAERTGLRVEQNAWRVLSVQNGKATLRQIRRQPDGKRITEEKEEKIGKLLGLGSGGGMGKLYQNKAALVIPDNFGLALDPEPQILPFHKVPVRLRELREKNGSRPVRVLRNGMLIHVPRGNYTGVWKVFSVKASLTVDIGAPDKVTMESKGVGQKREVRVKTLIRDGLRILHISYTGISSGRTTDNEG

SEQ ID NO: 7890 - protein, 676 aa, synthetic construct
  REGION 1..676: note = Synthetic
LNKWRHGQQLTLKSILDGIDEANRAKAIAALEKFISPEKTSKKKRKEPLTLEGLLAKILSAKLLSGRAPYHREIMREAVADVMEHGIHPTEERGCLYRSEAIRKAQLQRAIDEQTNNHLVRHRLLILERLHRDMLKEYAGGDAACVARVTIEVNRDLKELSGKTAKQVAQDLGQRLANFKGVTKRLEKAFEGKGIHITPGLIRKARIAEDLGWTCPYTGQKYDEFDLLNRKVDKDHIIARSERPSDSLDSLVITFSEINRWKGQRTALRFVEDEQSKPVQGLPQLTIKTLARFKKDVEALETFKGHDDDQRRKKNRKRLLQLRDYVDKEFTPRDLTQTSQLVRLGAQILQKAYAGSQKPPVITSIPGGVTGAVRRSWNLLGCLATANPLVLDENGETKTKTEIRNITHLHHALDACVLAFTSQFLPRDGGVWELLIKRRLNEAEQRLMRQRLGNMVQINGTGEFRLVDLPEGFKKQIRERLAERRVMQHIPKEMTGLRAKQNAWRVVKVENGEVHLRQRFRQPDGSRPLNVATEKIGKVIGLQPGELQKRKAALVIQDNYGLALDPEPTIIPFHKVWPRIQELRQKNGGKLPRILRNGDLIAVPKGNFIGRWKIFSVKNNASGIAIDIGRPDVTRLLNRTEGHKINVRLATLLKDGMIILATPYTGVASCPTTSST

SEQ ID NO: 7891 - protein, 1073 aa, synthetic construct
  REGION 1..1073: note = Synthetic
MNAGIEIALDVGHSSIGWAVLQTDPSVILHGCGVVTFRADDCLASSRRAYRRQRRHIRSTRQRIARMKVVLAHLRVLTKEELDRPGCAWPWQLAARVLRGGKLLAWPELWDVVRWYAHNRGYDGNRRWSAAEAEAAAEDTEKEENAKTLMQKCGVATMAETFCAICGIDPLGKKRSVSLPGNKRPKGQNAAFPRATVEGEVRRLLRAHFGKLQKLDATLERALLGRDTRDKDAWQAVPCPELKLPARYQGGLLFGQLVPRFDNRIISECPVSGEKVPSRNCAEFYNFRWAMQLANIRVVRLRERELSPLTVQERQELDALMRHRGSMGVEEFKKQVRQIAGAIRDNLDTMLMDPDAKEALLLDPVQELIQSNELKAFWPVLPERLQKRARGQWRRGKRISIAKLRQQLVELGGETGTFDVEVDRQLNATNTRGRKRDKQITREDLLNRPFFVKRLDQRAAFGRDLLKQAFEEVMAGKHPKEPGGCLFITQEMRDAQLTRKIAEQTNNHLVRHRLLILERLLVDIIKAYAGGDKARIAKITIEVNRDLRAMSGMTAKQKAQDLGLRIANHHHVVKKLEEDDSLMKVLEKRRAKITAGLIRKARVADDLDWTCPYTGQRFEPVDLITKRVDKDHIVPRSDRTSDALDSLVITFSAINKWKGNRTAWQFIEQEQGKPVPDLPNLSIMSLSRYKGFVEGLESFRGHDDDKRRKKRRKELMLLPTYEQKQFVPRDLTQTSQLVRLGAAALRKAFLGCEDQPIVVSLPGAVTGAVRKSWKVLGCLCLAAPDVLEECGEVKTKNEIRDITHLHHALDACVLGLASHLIPNNGRVWELIVKRRWNPTEERELRALRIFDKDSEGRLQIRDLDDSLKEQIRQRLAEKRVVQHVPARMDGLPVDQNMWRLKGWTAEGKAILEKHSRDVATGSRKLDKAKPGADNKDRLVGWQPEDGCGKLKRLKAVLITNENFGVALTKPDPVVVPFLKVWRHLQALKAANGGKMPLVVRAGSMVEVPRGTHKGSWRIFSIKNNSAGVAFALGLRDALTHDRSKQNVLVRQLLKDGMEVVKAGFTGPPCPNTS

SEQ ID NO: 7892 - protein, 1106 aa, synthetic construct
  REGION 1..1106: note = Synthetic
MNDNPKNNGNSNGASHPSHASHDPNANLHLAFDVGHSSIGWAVLDAPADAEVLGCGSVIFRADDCLASDRRGFRRQRRHIRSTRQRIARLKVLLRHLGVLTEAELNVPGCAWPWMLAARVLRGGKALSWTELWDVLRWYAHNRGYDGNRRWSRVESENAEDTEKVQNANALMEEHGTESMAETICAVSGIDPLGKKRSAAVAPKDRFKSQNAAFDRDVVRGEMQRVLAAHAGQLDKLDADVIRCLIGNDPWDDDAWQVVPVPGLKLPKRYFGSLLFGQLVPRFDNRIISTCPISGGKVPTRHAPEFLAFRWAMQLANVRVAGAGEKELRPLTAPERKQVDEAMHAEGFLTKGNFKKAVREIIGSDRDNLDTMLLHPDAERALVLDPVRKFAHGGILGTLFLTLPENIRRLALNSWRRGKRQTLADLLALAEKHGADTGDFETALEDYLANPPKARGKKKPPAPTRESVLGQSHAYDRGSPGRGPYTRTVMAQAAAEAMAGSDPREEGGCLYVTDELRHAQLNRPLAEQTNNHLVRHRLLMLGRVLEDVVAEYADGDKCKIARAVIEVNRDVRDMSGKSAKQVAQDLGLRLANHKAVSKKLEEEMAALGKPITASLIRKARVADDLDWTCPFTGKRFDVPQLVHGVVDREHIIPRSLRPTDALDALVMTFSAVNHMKGKRTALQFIEEEGGNTVQGAPNLTLFTPTQYKKFVDKLETFKGHDDDKKRKRRRKDWLLLADYEEKEFTPGDLTQTSQIVRLGAQVIQRHFQECEKPPRVISLPGSVTGAVRKSWRLTGTLAVANPQVLNEDGSTKTKTEIRGITHLHHALDACVLGLAAKFIPNNGRVWQLIVKRRLNPAEQNELLKLGVYSRDADGRVHLRDLADHRKEQITHCLAERRVVQHLPARMTGLRVEQNTWRVEQVEDGVATLSQRIRGEDGTLPATKQTTEKAIKLLGPAPVGEGQGKLAALKGALVIPDNFGVALDPEPTIIPFHKVWPRLNELKQKNAGKWPRVLRNGMIIKIETGTYKGVWRILSINNNVAGLKLDLGQPDTVRPRYDAFDPETGKKKSKTTPGCKLMASLETAIKGGLNILNNSLIGTAAPKPKSK

SEQ ID NO: 7893 - protein, 1096 aa, synthetic construct
  REGION 1..1096: note = Synthetic
MNTRPSPSSASPKTGDLHLAFDVGHSSIGWALLHATPELLGCGSVIFPADDCLASQRRAFRRQRRHIRSTRLRIARIERLLTHLGALSSEDLAAKHQAGGGHSAPWLLAARVLRGCKLLSWPELWDVIRWYAHNRGYDGNKAWSAQESEAEQEDTQKVENARGLYAKHGTHTVAETFCAISGLDPLGSKISCNLRGDQRPKHLNAAFPREDVEKEVLQILQAHCGVLPGVDSAFLAALMQDWRAIPAPAIRLPNRYHGGLLFGQLVPRFENRIIAACPITYEQVYQSVLAETGHEVKARHEAEKCSKVPSKDCPEFLRYRWAMQVANIQIATGEGRATRSLTVEERRRLDAKMGENGYFTAGEFKKSVREITDGAPDNLEQMLTHPDAEKALILDPARKAIAAKAAWKGIFSLLPEPLQKRALGQLRRGKPVRLRDLLARSQEPLPEVNAAIDRQVDTLNTKKKQGHPPLTRAELLADPVQMERLSGRAPYARNLMDHVAEFVFSTERHPTEEGGPLYRSEAIRNAQLQRALDEQTNNHLVRHRLLILDRLHRDIVKEYAGSDLARIGRITIEVNRDLRELSGKTAKQVAQDLGQRLANFKSVTARLEKAFEGKDTRITPGLIRKARIAEDLGWKCLYTDKDYDEFDLLHRKVDKDHIIPRADRASDSLDSLVITFAEVNRMKGKRTALRFIEEEQGKVVPGHPELTIKPLSKYLADVAALETYKGHDDDKRRKKHRKERLILRDYVEKDFTPGDLTQTSQLVRLGSQLLERAYLAQKKRPVITPLPGSITGTIRKAWNLLGCLSAANPQVIDPESGEVRNKTEIRGITHLHHALDACVLGFASCFFPRDGGVWELLIQRRLDKAQQATLKERLRTYVEFTQEGQPKLIDLPVPFKEQIRQRLAERRVVQHIPAEMTGLRVEQNAWRVVSIENGEALLRQRIRQPDGQRPLKETKEKLGKLLGLQPKGGIGKLQRNKAALVIPDNFGLALDPEPQIIPFHKVAVRLRELRTQNGGRTVRVLRNGMLIQVPKGKFQGTWKVFSVKNNATGIAVDIGRTDVVRLQNKTEGHKINVRLSTLLKDGMQIEKTRLTGLTSA

SEQ ID NO: 7894 - protein, 1111 aa, synthetic construct
  REGION 1..1111: note = Synthetic
MSGKDKILTQTQLTPADLQFAFDVGHSSIGWAVLQTAIPGASPSGNLSINILGCGVVTFRADDCLASARRGYRRQRRHIRSTRQRIARMKTLLAHLGVLRQQELDLPGCAWPWLLAARVLRGGKLLAWRELWDVLRWYAHNRGYDGNRRWSAVEAEAEAEDTEKLENARNLMNQYRVATMAETFCAISGLDPLGSKKSCHLPGDKRPKGQNAAFPRAAVENEVRRILRAHFGKLAQVDELLERILIGRDNQDATAWQAIPCPGLKLPRRYQGALLFGQLVPRFDNRIISKCPISGEKVPSRNCPEFLNFRWGMQLANIRVARFGEKDLSPLTAQERQQLDQLMRQQGGMGAGEFKKQVRQITSAIRDNLETMLLHPDAQEALLLDPVQKLAMSADLKSFWPLLPEPVKQRTRGQWRRGKSITLAKWRGQLGTETTAFDAEVTRQLDLVNTKGRKKDKQSSREDLLNKPYFIRKLPQRAAYARHILKTAFEEVMAGKHPKEEGGVLFITDQMRQAQLQKDIAQQTNNHLVRHRLLILERLLRDMIKEYADGDKSRIARLTIEVNRDLRDMSGKTAKEKAQDMGLRIANHHHVEAALEKDESLMKVLRQQGTHISAGLIRKARVADDLGWMCPYTSQRFEPIDLVTRHVDKDHIVPRSERASDALDSLVITFSAVNKWKGKRTAWQFVSDEQGKPVPDLPNLSILSITRYKQLVEGLESFKGHDDDKRRKKKRKDLLLLPNYEEKDFTPRDLTTTSQLVRLGALALRKEFIGLENQPVIVSLPGSVTGTVRKAWKLLGCLSLANPQVLNEQGEVKTKTEIRDITHLHHALDACVLGLASHFIPNYGRAWELIVKRNPNEGEKRELMALGIFGFGLENRFEMRDLDNRLKEQIRQRLAEKRVVQHIPAKMEGLRVEQNSWRVVEIQNDKVILRQRIRQADNSRPVKITGEKPGKVLGLHPVGGLGKLSINKSALIIPDNFGVALDPQPTIIPFHKVWPKLQELKKLNQNKKPRVLRNGQLVRVPNGSRAGIWKVLSTKSTEAYGLALDLALPDRIKLDRGNAPIAKLLEDGLEILGSSLVGINSSGIAIAESKKRPRKLKIAATDESCPTTSSA

SEQ ID NO: 7895 - protein, 1119 aa, synthetic construct
  REGION 1..1119: note = Synthetic
MAQTPPIADLQLAFDVGHSSLGWAVLQTSAPDRGLLPRAPDLLGCGAVTFGADDCLASKRRLYRRQRRHARATRQRIERLEKLLAHLGVLSADQLTAKHQQAGGHAAPWFLAARVLASNGEAKHLLTWPELWDVLRWYAHNRGYDGNKRWSAAEADSEAAKEDSEKEQNARGLMEKFATNSMAETFCKHLGLDPLGGRQASAIRFKNLNAAFPREGVEAEVRRLLHAHFGKLPKVDRQFEQALFDKWEAIPCPAIKLPKRFQGGLLFGQLVPRFDNRIISKCVVSGQKVPSRNCGEFFRFRWAMQLANIRVGQMGNRDLRPLNVEERAKLDALMRAQGSLTPGELKKAVRDLTGSARDNLDTMLMHPDAKEALLLDPAQKLVTSDKLKTLWPLLPLRIQKRARGQWRRYKTLTLEKLRAQAAQLGESVDAFDAEVQRLLDSGNTKKSRKQGQPTRESLLKEPLKIERLSGRAAFARHLLQQAHVEVMAGKHPKEEGGCLFITEQMRAKQLLRSLDDQTNNHLVRHRLLILQRLLRDLVADPAFANGDKARVAQVTIEVNRDLREMSGKTAKAIAQDLGLRLSNHKHVSAKLEEAFEGRNVPMTAGLIRKARIADDLGWTCPYTGQSYDAFDLITRKVDKDHVIPRSQRPADGLDSLVITFSEVNRMKGQRTAFQFIQEFEGQPVEGLANLSLVTLKRFKEGVEALESWKGHDDDKRRKKKRKELLLLPSYEEKGFTPRDLTVTSQLVRLGAQVIRGYFTDGARVNNPREATASLTDSGLSNPDSGPRIISLPGAVTGAVRKGWRVLGCLAQAAPQILDENGDPKTKTDIRSLTHLHHALDACVLGLAAHYLPNNGALWEAMVVRNPSLQQKQLLYATGFYEFDKDDKPQFKELPGELKNQIAARLAEKRVVQHIPADMSGMKAEENTRGVVKVEKGRVYLRQRTRDAKTGKLSVKETDEVIGKVVGLEPRNSSGKLTPMKGVRVIADNFGVAILDHAANPDDKFIILPWHKVWHRISELKEKNGGQRPRVLRIGNVIRVPNKSGRSDYRGLWMVRGVKNVQLAGLQLDISGADVIDYSPAGRPDCKRNVSLKSLVEGGLEILKPTLCGVAQTAPVAGPA

SEQ ID NO: 7896 - protein, 1076 aa, synthetic construct
  REGION 1..1076: note = Synthetic
MKDKQKNTLSQTADLELAFDVGHSSIGWAVLQSVSPAPAQTETPSVNLLGCGVVTFGANDCLASHRRAFRRQRRHIRSTRQRIARIKILLKQLGVLDEATLNQPGCAWPWRLAAQVLQGGKRLTWAELWDVLRWYAHNRGYDANRRWSAAEAQAQQEDSEKEANARTLMDKHRTKSMAETFCRELGIDLSGKKKSSTKRFKGLKAAFPREIVENEVRKILQAHHDILPGVDGRLEEALFTNWQAIPCPNLKLPNRFQGGLLFGQLVPRFDNRIISQCPISGQKVPSRNSNEFLNFRWAMQLANVRIARFGELKLSPLSPGERRELDQQMRRVGAMTAEQFKKTVRNVSNAIQDNLDTMLMHPDAKEALTLDPVQKLVRSTELAPFWELLPERLQSRLRGQWRRGKVFSLAQIRTQLAGYGDVAAFDTAVQKQLEARHVKSRKKDKPLTREDLLERQFPPQPIKLAGRAAFARPLLQQAYAEVMDGQHPKEPGGCLFLSEEIRQRQLAREIAAQTNNHLVRHRLLILERLLNGIINEYAGKDKTRIGKITIEVNRDLREMSGKTAKEKAQDLNRRIDNHHAVAAKLEKAFAEENTRIPITAGLIRKARIAEDLGWKCPYTGQDYEPRQLVSRYVDKDHIVPRSHRASDALDSLVITFSAINKWKSNRTAWEFVEQEQGKPVPDLPHLSIMSLSRYRQFVESLETYKGRHDDDKKRKKRRKELLLLPKYEDKEFTPRDLTQTSQLVRLGAQVLKRAFAGHEQPPIIVSLPGSVTAAVRKAWKILGCLSLANPQVLDENGEVKNKTDIRGITHLHHALDACALGLASHFIPNHGRVWELIVKRTVNDAEKEELMALGIFTFSANHRFEMRDLDNRLKEQIRQRLAEKRVVQHVPARMGGLRVEQNTWRVVEVKAGKARIQQRIRQADESRPLKQTEEKTSKLLGLQPGKLSVNKGVLIIPDNYGVALDPEPTIIPFHKVWERLRELKKANGGKRPRVLRNGQLVKVPQGKFMGIWRVFSVKNNTSGIAVDLGFPDVVRLKNKMAGHKINVLLASLLKNGMRVVKPPLTGVPTWPTTSSA

SEQ ID NO: 7897 - protein, 1075 aa, synthetic construct
  REGION 1..1075: note = Synthetic
MSIKGKISNGADANLQISFDVGHSSIGWAVLEKTGQQVSDIKINGCGSVVFRADDCLASSRRAYRRQRRHIRSTRQRIARMKILLKHLGVLTEKELDKPGCAWPWKLAAQILQGGKLLTWPELWDVLRWYAHNRGYDGNRRWSAAENDAQSEDSEKEENARSLMGKYGTKSMAETFCAISGINPLGEKKSANLSGDKRPKGQNAAFPREIVELEVRQILQKHFGKLKNADENLEKVLFTDWQTISCPDLKLPKRYEGGLLFGQLVPRFDNRIISTCPISGQKVPTRNCTEFLNFRWAMQLANIRIACAGEKELRPLTAAERKIIDQAVSEKGGVTPFQLKLIVREKTKCVRDDLEQMLMLPDFEKALLLNPIQKMISADDFQPYWKLLPDRLQKRLRGKWRRGKVFSLAQIRTQLESLGDASAFDAELQRQLDAHNSNAKKKDKQITRENLLQKHFPSKPLKLDGRAAFARHLLKQAYDEVLAGKDPNGKGGCLFRSEEIRQKELNREISDQTNNHLVRHRLLILERVLNDIIKEYAGGKKDRIGKITIEVNRDLREMSGKTAKEKAQDLGLRIANHHNVAEKLEKAFAEEGIKQTITAGLIRKARIAEDLGWHCPYTGIQYEPKDLITRRVDKDHIVPRSERASDSLDSLVVTFSAINKWKNKRTAWQFVTDEQGKTVPDLPNLSIMSLARYKQFVESLESYKGHDDDKRRKKKRKELMLLPKYEEKEFMPRDLTQTSQLVRLGAQVLKKNLPHLTTGDVTSLPGSVTGTVRKGWKLEACLGLANPQVFDGNGGAKTKTEIRDITHLHHALDACVLGIAANYFQNQKLGASSLWELLIKRKYNEQEKTILRALGIFQFDKEGNSQIKELPKEIREQIRQRLAEKRVVQHIPARMDGLRVEQNTWRVVAVKDGEVILKQRIRQPDGTRPEKIAEEKPGKLLGLNPTNGNGKLAANKGALVIPDNFGVALDPQPIVIPFHKVWTRLQELKKANAGKLPRVLRNGQLIRVKDGTYKGVWRVFSAKNNATGMALDIGSPDVVRLKNKTEGHKINVLLSSLIKGGLEPIQSSFTGITSK

SEQ ID NO: 7898 - protein, 1056 aa, synthetic construct
  REGION 1..1056: note = Synthetic
MNGNTKNTAIGSINLSFDVGHDSIGWAVIDVSKETKILGCGSVIFQADDCMASQRRDFRRARRNIRARRKRIERLKMLFEFTSPLSKTELDARGSSSPWKQAAAVLNDGQPLSWFELWNVIRWYAHNRGYDGNRNWANDEGGGDDDDTEKLQNASALMEKYKTSSMAETVCAVSGIDPLGAKSSAAIAPKSRFKSLNAAFDRNVVRNEVEKILRSHVNILEGLSVEFIRCLIGNDHKDENAWKAIKLPDLKLPKRYHGSLLFGQLIPRFDNRIITKCPLSGEKVPTRRSPEFLKYRWAMQLANVRVREAGETSFRALKTEERLEIDSQMTQTGFFTKQKFKQLVRSVSNCVDDNLEAMLLHPDAAEALVLDPVKKYANSRVLKELIPLLPERNQKLVLNRWRKGKAQTISTWLLELDKSSKERALLEQAISKAAESADKRRELIDKEYHFPQNAPGRAPYARKMLLKAAEEVMKGIHPLEKEGCLFVSDEIRQRQLNLPLAERTNNHLIRHRLLLLKRLLQDVVDEYANGDREQVGKVTIEVNRELREFSGKSAQAIKMDLGLRLSNHRKIAEKLKNGLGQTPNASLIRKARVAEDLGWECPYTGHKFDMQTLTQGGVDREHIIPRSLRPTDALDALVMTFPEVNRMKGRQTAMRFIEEHGGEVVEGAPNLTIRTPAEFRAFVEGLKTRGGHADDQRRKKRRRDWLLLLDYTEKEFTPGDLTRTSQLVRLGASVISQYFEESKLPPQIVSMPGSVTGTVRKNWRLIGCLSKANKGVINEDGSTKTKTDIRKVTHLHHALDACVLGLSSHFIPNNGRIWELIVKRNHTPIERKELTTLEMFECDSSNRIQMRDLPLELKAQLTKRLAECRVKMHIPSKMQGMVVEQNTWRVLNVANGEAKLQQRLRNDDGSLPDTKVNIKKTIKLLGVEPDNGGKLKKLKGALVINENYGVALDPEPSIISYHKVWPKIAELKRANQGRYVRVVRKGVLIRIPRGNNKGVWRVVSIKNTTQAGITLELAKPDGIKSDRRNRLTSLIASGLELVNCSLTSVDVSNEEH

SEQ ID NO: 7899 - protein, 1090 aa, synthetic construct
  REGION 1..1090: note = Synthetic
MNGKDKNLAQTPEAPASSADLQFAFDVGHSSIGWAVLQTAIPGASPSGNLSINILGCGAVTFRADDCLASARRGYRRQRRHIRSTRQRIARMKTLLAHLGVLKQEELDLPGCAWPWLLAARVLRGGKLLAWQELWDVLRWYAHNRGYDGNRRWSAVEAEAEAEDTEKLENARNLMNQYRVATMAETFCAISGLDPLGSKKSCHLPGDKRPKGQNAAFPRAAVENEVRRILRAHFGKLPHVDELLERSLIGRDNQDATAWQAMPCPGLKLPRRYQGALLFGQLVPRFDNRIISKCPISGEKVPSRNCPEFLNFRWGMQLANIRVARFGEKDLSPLTAQERQQLDQLMRQQGGMGAGEFKKQVRQITSAIRDNLETMLMHPDAQEALLLDPVQKLALSADLKSFWPLLPEAVRQRTRGQWRRGKSITLAKWREQLGTDVTAFDAEVTRQLDLVNTKGRKKDKQISRENLLNKPYFIRKLPQRAAYARHILKKAFEEVMAGKHPKEEGGALFITDQMRQAQLQKDIAQQTNNHLVRHRLLILERLLRDMIKEYAGGDKTRIARLTIEVNRDLREMSGKTAKEKAMELGSRIANHHHVEAALEKDESLMNVLRQQGTHISAGLIRKARVADDLGWMCPYTSQRFEPIDLVTRRVDKDHIVPRSERASDSLDSLVITFSAVNKWKGKRTAWQFVTDEQGKPVPDLPNLSIVSISRYKQLVEGLETFKGHDDDKRRKKKRKDLLLLPTYEEKDFTPRDLTTTSQLVRLGALALRKEFSGLENQPIIVSLPGSVTGTVRKAWKLLGCLSLANPQVLNEQGEVKTKTEIRDITHLHHALDACVLGLASHFIPNNGRAWELIVKRNPNEGEKRELMALGIFGFGLENRFEMRDLDNRLKEQIRQRLAEKRVVQHIPAKMEGLRVEQNSWRVVAVQNDKVILRQRIRQADNSRPVKTTEEKPGKLLGINPANGDGKLLKNKAALVIPDNYGIALDPQPTIIPFHKVWPRLQELKKANFEKFPRVLRNGQLILVKEGNYKGVWRVFSAKNNAAGMAIDIGRPDVVRLKNKTEGHKINVLLGSLLKAGMEPLNPALTGFFKK

SEQ ID NO: 7900 - protein, 1052 aa, synthetic construct
  REGION 1..1052: note = Synthetic
MWRLALDMGTNSLGWAVFALNAAGQVEGLKDAGVRIFPDGREPSSKDRVGDSLAVERRLARGARRNRRRQLSRKQRLTDRLVQFDLLPQDAAARAEIIKLDPYALRATGVERVLTPHELGRVLFHMGQRRGFLSNRKSDGNDEETGKIKPRISELRRLLDKKTLGQWLHEQKEQGKPIRFRGEEGDFFADRAMYLHEFDAIRAKQQPHHSLSAQDWDNIRNGNRDQQFDGLFFQRKLKPVERGRCEFFIDEYRAHKDLPIAHEFRILQEVGNLQYYDENQQKHALDEQQRNIVIDLLNQQKTVSFGALRKLKHADGRFVFPRGCLFNLESGPRDKLNGNATACDMRKAELLGDHWDALTADDQNDLLEMLHEAEDDHQLIEDLVDRFGISAEQAEAVSKFKLSSATTHLSRKFMTRCAAIMREDHLGYDAAVREVYDDDGVFFHHSRYVVDQLLPKLPYYGEVLKGSMIGGQPDKHDPKKNPEQHFGKINNPTVHVALNQLRKLVNCLIERFGPPAEIHVELVRDLKKSTKARDDIAKQNKKFAKANEKRADLFQGLHGGQAPSGLDLKKMRLWEELGPDQLTRHCPFSGRIISAQMLFNGEAEIEHILPFSRTLDNSTANLTVAVRQANRLKGNRTPYEAFAHGQHEGQGMVWQDIAARAKLLPQNKRWRFDADAMDRFEREGGFLARQLTDNAYISRLTKRYLSHVCDQNKIATIPGGLTAMMRGKWYLNSLLGDHNFKERNDHRHHAVDAFVVGLTDRSMLQRVSSQANRRADDRVQIDLPDITPLRNQLKARLDNMIISYKPDHGTNGKMYKETAYGIVPPEQQDPELKGYGLVTRKKLASLTDKEILAIRNPGWRERIFEHVAGAKANGVKLDKALADFGQDNNIKTIRILVSNQSAVPIPSAPYKAYAPDSFVCVDIWQVPKGRQGKWKKGEFDWKGAFWSYADCKGQSPDKNQGQIDGKPIHPAAKFITRLFKNDMIEIEENGVQQIMRVAGFSTTDNRIDLRPQYETQEARKYYSINVLKTLSLHKLSIREDGTMGVRHGHTGC

SEQ ID NO: 7901 - protein, 1072 aa, synthetic construct
  REGION 1..1072: note = Synthetic
LLPCGEQVNSNSLLNDLRRRKGMWRLALDMGTNSLGWCAFELTADGEALALLESGVRIFSDGREPSGKDRVGDSLAVQRRLARGIRRNRDRANRRKKKLVERLVQLGLMPADRADRKALETLDPYALRAATVERPVTPHELGRALFQLGQRRGFLSNRKTDNDDEESGVIKPKISELRQLLGRRTLGQWLYERQCNGQSVRFRGQEGDLYADRAMYLSEFDAIRNIQREKHSLSEQDWDDLRNGNKAQGFDGIFFQRKLKPVERGRCEFFNDQYRAHKDLPIAHRFRILQDLGNLQYVGDDYSKYELNEAQRTRLQECLDNQKTITFGAIRKLKNGDGERLFPRDCLFNLEAGPKDVLKGNMTAVEMRKVDMLGDRWDSLDEERQNDLLEMLHEAEDDEQLIADLMGSFSLTAGQAAALCKFKLSPATTHLSRKLMSRCADIMDVRKLGYADAVGEVYDDDGVFLHHSQRGPDTLLDRLPYYGALLKGSVIGGKPDKYDAADFPEQHYGKINNPTVHVALNQLGKLVNRLSARFGAPDEIHLEIVRDLKKSAKARNDIAKENTKFAKANDRRADLFRDQNGGADPSGLDLKKIRLWEELGPDQLARRCPFSGRTISATMLFNGEAEIEHILPFARTLDNGTANLTVAIRQFNRLKGNNTPFEAFANGQHEHQGAVWSEIAERAKLLPRNKRWRFEAEAMDKFNKDGGFIARQLTDNAYISRLTKRYLGHICLDNKIVTIPGGLTAMMRGKWHLNNLIGDHNFKERNDHRHHIIDAFVVGLTDRGMLKRVSDQTKRGTDDRVHIDLPDISALRDQLARRLETIIVSYKPDHGTNGKMYKDTAYGLVAEEQQDPDLPGYTLVTRKKIESLSEKEVGAIRNPGWRTPIEQHVAAARASGTKLDKNGLAKVLGIFGQENNIKTIRILVSNQSATAISSAPYKAYAPDSFLCVDIWQLPKGKPGNWKNGEFEWQGAFWSYDQCGGKSPDKNDGLIKGKPIHPAARYITRLFKNDMIELDDGGQRKVMKVAGFSTTDNKIDLHPQYETDGKRQRLSINVLQKQFRKKLRIREDGSGGV

SEQ ID NO: 7902 - protein, 1688 aa, synthetic construct
  REGION 1..1688: note = Synthetic
VHAQCASGARGAHQRIGQRHAMPVVVGVVVVGQLVDYDDKIGQGLCLSTRRERAVVVNVCARGEAGGSSGDQVHTPVEFGGEHRGERCRSIGTVGLEAQDRRGVRQFLQPARRAGPGDDELHPVRAVARRECGQPCSHQFGLSGAGAAEHRGVGTVSAVACLAEVGPHELALRPHREVLIGGPAQGRSQVWLQRVVRPPGGQLGGVGGGDEVQPRIGSRRGRVRAHGVEGLLVAGSGVGGHVFAGQFLESSGIGHGDVPPVQRQDARRRDHQVRLARNRAGATAPVGADRQVSSGSRPEPTQLPPRDAAIAVHRTGLRQVRAPATRTHRGDLKPVVTSRGMSRYVRPCPLNVPEMSLMSPAVSVTSRITDASRAGSQRFPLHFRTMKRGDSPFGARAPAAQRIRPRRRSAEAYTGCSRDHSPRGPAPRLFRFSLPGAYRPCIRGNGFGKFWGSSACRAADRTLLRSFTHPSAAVNRHKGVQMTSSVPLPDEPRGHVVFGFDPGRSSLGIAALRFDADGELAEILSAGTILHSGGTESGKPPESYKSMAGRARRGRNRRASHHARRRELDRELRDRGYPGLTAATVAHAVQIRGGGDVWDIRADLATASWADEQQRRVLISAALLNLYNRRGQRNAFVSSLSVRQAALMEQHSPALLRSHSRGEQIVAGASAGGTATPAQLLRAVRDHHKAERRSDGCVSAKVLPEPLRKATAAHERAMRAYEKKPDGKERPDLGARMAAEVDKNKNPEAAAELERRIHDHLFTSSLHRSDILAEWYRIGEVQGLDRAMMISIGDIIAGQGDPRPAAIERVACDDLPRLEGQPEYRPRAAKSSLTYQRFRIVSAVANLRVGATGSAAGLSREQRAAVVELLSNWHAAEDPRWQDVVDALGVSSRLTGFDGRAKPPIDRTRRALWCAADPKATFYSASLAWLLSSEQLQASPELLDVLVARISGTAVFDPDDEAHCAVQRWMDTLTDEETVLLMDAVKLEHGRAAHCEDNLRRLTAHMIEHACDVFTARSAVFGTAPDWRPRPNPLGTPTGNPVVDANIALVRRAYDDLCRQFGHPDSVVLESTRDLASSVAAAAERHKENANAARARRAALAAANAAAGIDNDAPMSKHRSQEVQLCAEQHGVCMYCGVAIRPGDMQIEHILPVTRGGRSTRLNLAGICTSCNQAKGNRTLTEWAAAGGPSVKSVKARVKHVEPLDGGRLSRSAWQKRYRDAMSASEMDLPMESFGWAARELADQLEGVVGRGRVHLVSGRMTAQARRLGDVDTDRRIRDDGTEKGNPLLLRWPAELVTEDDPLPSGAKSRFDRRHHAVDAVVVALLHDGVARQVFSERNVLKQAQEVTGQAQAARKAGRTPDWQLHVGQGENARRFTQLRSNLKVAAELLAKEVAADTIPVSTVRRLLPRTGRLHKETVRPLVKIALGSAIAAEEIGRASNVGLWTALTRLPDFDPKAGLPEDPQRTISVKGVTYRADDLIGFFGVKGGALAVRGGWVEAPSMHHLRLYRTAPRKRGGRPTVTSVAVPVLDALELRGKPGGDEVDRILSRPLAAHMFGVRQRSAATVQLACDPRSEFRVLMPGDEIVVDREHAARMGVALIKGLLAVTSTEPVRLVVTGARVTGKVRVAPLRLSEEGAPKRAWQELVDQPELGISPFEGAHVIRRSITGHPRPFGPRVLDSFVIGEWS

SEQ ID NO: 7903 - protein, 1148 aa, synthetic construct
  REGION 1..1148: note = Synthetic
MKYRLGLDMGATSIGWAVINIDNGNIEDFGVRIFPDGREDKSKASLCVKRRDARGARRLQKRHIIRKNQIIKTLVDIDLFPRNINERKNLEFKNPYELRSKAVTQQIELYELGRALFHLSQRRGFMSSRKDDKEEGGKLKKGFADLKEAMKAENCITYGQYLYEQQLKNPKDNIRLKDSFDENGKFKGNKFPFRETYKQEFDIIWNKQAMFYPQILTSKNKEALFDIIFFQRPLKEQEEGFCMLEDGEKRIAKASPLFQEFRLLQVINNLKFSEETSVEYKIINENKRGELIEALMNPEEIKTTKDGRASYSEIKKYLKLPSKGVFNYEKSESKNENFAKGVLVDKTQLAINETLHLKNDWNKLGFEKREKLIDIITRPENYIEFPKTKLSIEKQEEIIKQFIIKEFSFSNNGASELLELSIEDGFGNLSRKAIDNIINYMRKGLEYSEACNEAGYHHSLKKYKNIDRLPYYGEILEQHCLGRKEKPNNNEEKYGKINNATVHVALNQLRLIVNELLSLYGKPFDISVEYARDIKASQKERLKMSDTRDKNELENQKIVEEVKSKIGLTISSRVDIQKYKIWKNLGNQKGGNVLDKECPFSGEKIGLTELFNGNKFQVEHILPFSRTMDDSLDNKVIATISSNKYKGNRTPWEAFSESKDGFNWKEIQKRAKKLPLEKQWRFQKNAMDKFSKNEGPIARALNDTRYMTTLIQEYLMPICSEKGFKTIQSIPGQLTSMVRKSWGLNEYKSKDNEDDYRSFHNHHAIDAIIVSCISRGQVTKVSKDLMEARDSIITHFKEDFYKLRDFNTSEKERKEIKEKIRNFRTDKEAGIIREYIPVPDGLDISKVREDVANINISYKPKLKDIKDRKSTIGQLHEDTAYGLVKFIDENSLNAEFKTIDLKTKKKKLVTNDIVTYIPIFRNKEDKDEYYNAYKDWFINDSKARAMIAKTKDEKALKQAQAEKELKTIEKLRNVSIKAFKWFVGGGNFCAEIYEVNSNNKIGGLPTNNQAKWESEIISNYNATIRERRDEKISYWHSKYPNAKRIMTLKINDMVKATFTREEAFDEKFSKGIQNYVRERFEFDENLEKTDILFRVKKISSDGTVFLRPHSIAKEKSDTKCWIASSGSLKNYRARKVFVTPAGRIKNAA

SEQ ID NO: 7904 - protein, 1155 aa, synthetic construct
  REGION 1..1155: note = Synthetic
MKKILGLDLGTASIGWAFLNLDGDNSELKAGVRIIPLNQEDKAAFEKGQSITLNADRRLKRGARKTLDRWQMRRENLINWMLKHNWAKSREELLLPSSGWSTFNNRSKAVTEKISLLELGQVILRLNKNRGFKSNRKTDSGEENSTDYKKQIAGRDNELVEKGLTIGQIFVQERDAWLANPEGPEPHFNSRTYSRASVVAEFEAIWSEQMKHHSEITEADRKEFRDYVLFYQRPLKSQKHLIGKCPFETSRRVAPRSSPVFQEFRLWQDLKHFRVIEKNGGSRPLTYDEQISLSTELRSVSFPNKTKILRFLGLSTAQFTVSVEKLIGNIFSSKVEKIIGDDRLEFVEVDCTLDGNEFDKQPSMQLWHLLYSSEDHDHLVNSIVKRFPEITEEEAEDLANIKLPDDHARLSHKAIRKILPFIRSEECPDYFSACASAGYNHSFSETKEEREKKVLKEKLEPILRNSLRNPVVEKVLNQVVNLVNAILEDENLGRPDEIHIELARDLKNCAKKRKSITKNNRDNEANRLKVKGELEKLGQRTTRSNILRYQLWEECDRISLYTGNPIPISKLFTYDYEIEHIIPQALIFDDGYLNKTISERSENLAKGSTTAMEYMQTKGEAAVDAYEARIRRAKGISKPKADKLRWLRGDIPDGFIERQLKETQYIAKMSYSLLKDISREVIPMAGSVTAYLRRRWGLEDMLSQINFPRYDAIGQTKEITINHKDGSQEQKIIVDDWSKRDDHRHHAMDAITVAFASYRNFQYLNTLSGRDLEIDDSGEKDAALSPPISKSLVRKLSKDAMENILISRKAGKRSSVWSKYQSKTKTGKHSGKHRIPRGQLHLETVYGSRLRHLPSPSILSKIPEDLSLIVEPAIREVIKERLESDGLTAKKAFTTGRLKKNPLLFNDRPIETVACYERIFVIRKPLDETVKIEKVLDKGLQRILQARLEEFDNNKKKAFTNLENNPVWADRSKTKALKRITIQAHTKTAKPLRRNASDDNIDFVDYQNNHHLALYLDDESGKPYSEVVSLMDAVHREQEGGTAIRKVDSRGNKLLSTLAGDEYVLFDIEAESKEEILGLSSSEISPHLFRVQNLGYSNNDKKIGVDCSFRHHLETSINHQSQLTLQRIRSINNLPSWKVRINVLGQIVHIESTGI

SEQ ID NO: 7905 - protein, 1033 aa, synthetic construct
  REGION 1..1033: note = Synthetic
MGRGCFFQTNIAHNMIILGLDLGAASLGWALSNDSRPDNRLVDCGVIIFKEGVNIDAKSGKEESRTVRRRMMRQARRQIQRRTQRRRQLLQYLRHIGLVPPHHTAHHFDSRRDVYVLRAAALRRALLPAELAQVLYHFAKRRGFKSSRKSGSTSDSSDLFKGDPKVGLLGFNDTETAMKEGNFATFGEYLASLNPHQQRRRNRYTLRKWYEHEVESILQVQKAHHPTLQDEEVTRRIKEILFFQRPLRSQKQLLGKCELEPRRPRTPKASLHFEVFRAWQTINNLKLWGKNVYGEELTLEQKQQLWKDLFSQRDEITPEQILKNLKGKDAPLWSINSDEKKFKGCGVAAKLRKIFGAAWDSFDAKKQEQIWHVLYENDSEESIIQYAQKKWGVNEAQAAELAQIKMPQGYVNLSRHAIERVLPELQKGLRYHTACEAAGYRHARAQRAPADAPEYTLRQLPPVPNLRNPIVQKALGELRRLINALIQRYGTIDLIRIEMLRELRISKEQREEKRKDQKQREARNEADRERLKRDFGIQTEGRGSTLREDIIKMRLYDECKGVCPYSGDKIEPYQLFNGEFEIEHILPYSRTLDDSSTNKTLCRKDINIAKGDKTPREFFSSTDFDEAMERLRSIDFPKNKINKFATKEFNEDFIQRQVNDSQYLAAAAADYVRKLGDVEVQTVMGGATAELRHLWGLNSVLHPLGFDSKNREDHRHHALDAIVVANTTVKMLQTLSRRHSGEYNGANNNIKFRLSPPYANFREQAEFALSNVLVVHRHQAQKTAGQLHEETFYGEIKDHQGKRRGFAVRKKLQDLTAAMVEKIIDPIVQEAVVERIKAFGGNIGDKELWKQPLYMPNPKGGKPTVIKKVRILQQSSNAVRLQEHINKWVEPGSNHHIAIYRLPNGKIKGPIVSFFEANRRQRLGEPLIDKRGEIAGSEFLFSLSKDEMVLLYCSPELLAQQSEEQYSALSAHLYRVVKLTEGSICLALHNASNVKADKDPAPKVLKVPPTKLIDELKALKVTLNAEGRIAAAE

SEQ ID NO: 7906 - protein, 1051 aa, synthetic construct
  REGION 1..1051: note = Synthetic
MGSDIAYRIGLDVGANSIGWCVLALDKSGQPTNVIDLGTRILTASAEAGRDPQTGTSLSVDRRVARGMRRRRDRYLLRRSDLMSALVKHGLMPTDEAARKALEEVDPYEVRARALDEKVPIHHFGRALFHMHQRRGFKSNRKSDRANAEAGLIRQGIESLKEKMLSESARTVGEFLARRHAERRTVRARMVGTGKDAHFPIYLERILIEEEFSALWSAQSSEHPELSNAIREDLHAIMFRQRPLRPVKPGKCSLYPDTDHRAARALPVAQRFRILKELANLRLRHPGNAERPITIAERNILAEKLLGAAKLSFDQMRRALKLDSDVLFNLESERRKDLKGDETAAKLGAKKVMHKEWRDLDLANQTEIIEALLDEEDESRLTERLHAQVGDRPDVIESLTGALLPEGHMRFGIRALNELVAIMNEAVREFADPETGEIIERPIREDEAIAEMGLHHSDRRPDAQMDRLPYYGRVLTDSVVGTGDPAAPTEARYGRLPNPTVHIALNQLRQLVNSIIARYGPPTEIALEMARELKQSREEKAETEKRQTANQKANEKRRERLAELKQPDTGLNRLLLRLYDELPADDKLCVYSGRPIAVAQLFSSAVEIDHILPFSKTLDDGIGNKVLCFRDTNRSKRNRTPAEAFQGDTLVAMQERAARLLPAPKATRFASDAMSRFEDDGFQLPRRLIDTQYIARLAREYMTHVCPPNKVWATNGRLTAMLRGKWGLNSLLPDHNFAEVGHPKNRRDHRHHAIDAFVIAVTDRSLVQRLAHAAGRAELDQMERILADMPAPFPEFRAILDTRLKNTVVSHRPDRGVQGKLHEATAYGPASEAEKADGWTVVYRKPADALNKNEISRIRDPLLRTTCMRLEQDKGEEAVKTYLAAEGIRRVRLLKREDPSGLIQIGHGKDGRHMKAYAAGDNHHVDIVETPDGKWHGEGTSVFHANQPDHEPVWLKNLPGASLKIRLHKGDLIQVEHNGVRTIMRVYWLEPSNNRIRLAGNTEAGSLDKRHKDPDDPFRWFMAGYSTLKKSNARPVRVDVLGQVHSIEPRP

SEQ ID NO: 7907 - protein, 1288 aa, synthetic construct
  REGION 1..1288: note = Synthetic
MARFILGLDIGTNSIGWVLFKDNKIFDKGVIIFPIGTNIDKNGIETTKNKERGTYRRVSRTNFRYKLRRKNLKNLLVSLDMLPTFSNTFEVKENYQASDLYKLRAKALDDKIPIDELGRIFLLINKHRGFKSNSKTLTEAKEEDGKVKGEISELTISMKKNNARTIGEYFHKMYQKAANLYNDGKWHNLDEPFDERALIDEEGNFSLLNSRGIRREGRFVDREMYATEFDLIWDKQQKYYPQLTGSRKEFDEICKLPVDEKRASLKLFRESFYWKIKHQTIFYQRPLKSQKKFIGKCQFEKNKRTAPASSLLFQEFRIWKQLADIRYTDKANDAYNQPLPREWKLKVFDYLQTHLSLSLRPKKDNSDILELLGIANKKNFEFNYDSNEDDKTFQGNKTLYAIYTTCGEDKFNQLKEENKLEKLWHILYMAKDDEWLYDTLTWKWKFEPSVATKLVEMGLEEGFANYSSKVLAKILPFLKEGKDEHDALILSNYIKAPDKYKETQALQKKIKPLHNNELRNPVVEKAVGETIRLVNAILKSHEIDQEDFTIRVESTREFKKPKKERESIRRKNLDTEKRREEYAKFLNEKKEKGELTFSRHIQKNDSIINKFELWLELGADKNDPEFKEFEKIVERRDREKHSLWLDCNRVCPYTGNTITLSKLFSSEIEIEHIIPYSWSLDDSFTNKTLTFNYVNKEKANRSAYDYMQSKGKDAFNEFKERVKVFQKEKAEGKFLNAKPEQTFTNAQGRNASYIAVYVRKKLQEVCRDVQFTNGFATSELRKNDWRLGNLLDKVRYQEETGIDVDKYTREFVNYKRDFEQYRKRKANSTDIAKTDWRNLTKEMTAEYEAETKNPIYDWWEELQKFDAFRGAKGKKDRSDHRHHLLDAIIIGMCSLSIIQKLSTLNQLREKQGISLYDEKGELTRERIDLPIPYLEIKEALESVLIYHKAEQHLITSKQNRIHKKKHSETDSKVIKQRTTAPRGSLVGDNFYGKLKTPHLQGFTKSDVYVKRVPLNGENFKDKKNLEKVYDKNIKKILELRLNKYEGKGEKAFSEEALLKDPIYVYSTKEYPNGIPNNPSSKEGNTLPVIKKVRVANKNSRNLIQLVARDEQKNIVNTNRYSEADGNYVMALYESKEVDKKGKVKIKRDFEIVSFFKAVERSRNGEKLFADEKEQKDGTFLPLMKSCPHLKAGDFVVMYENEPEEINWESKKDLMKRIYKVTQLSSKIVSKIYEFGDLFFTKHNISSSNAKYESKGYSNIKEYKYLQNSHIQLKAIKVQIDRLGNISKA

SEQ ID NO: 7908 - protein, 1291 aa, synthetic construct
  REGION 1..1291: note = Synthetic
MTMAKYILGLDIGTNSIGWTLFKDNEIIDGGVLIFPIGTNVDKNGIEATKNMERRKYRGASRNHFRYKLRRKKLKKFLEKLGMLPDFSKTYKIKEKYQASELYKLRTDALDKPIPREEIGRLFLLINKHRGFKSNSKILSNENKEEGTVNEGIGQLQKFIEHNNARTIGEYFHKMYAKANSLSHKGKWHNTDEPFDERAEVDGKFIQHNNRGIRRENGRYVGREMYELEFDLIWKEQKKQYTQLTGSKEEYEQIRQLPVATKREKLKVFRETVYWQLKYQTIFYQRSLRSQKKYIGKCQFIKNKRTAPASSLSFQEFRIWKQLADVKYTDKGNDIYRQSLPNDLKQKVFDYLQIHPKLNLREGGKKKDGSKNTDIMDVLGIANKKNFEFNFDNDEDDKTFEGNKTLYAIYTACGEEKYNELKTSNKLEKLWHILYMAKDDEWLKDTLTSKWQFNDVTAIRLVEMGLEDGYASYSSKVIEKSLPYLRDGKDEYDSLILAGFIKSPDEVKEEIVLNKKIKQLANNELRNPVVEKAVSETIRLVNTLLRSKDIDQNDFTIRIESTRELKKPKKERENIRRGNSDTDKKREEYVRFLNEKRKNGDLIFAREIQKYDSIIHKFELWLELGADKNDASFRDFEKIVQKKDREKHSLWLESNRICPYTGRIIALSKLFSSEIEIEHIIPYSRSLDDSFMNKTITFTEINKEKGNQTAFEYIQAKGKNALKDFKERVKIFSKEKQESRFLKEKVDVGFTNEQLTNTSYIAKYVRKKLQEVCKDVQFTNGAATAELRKNDWRLSNLLDKIRYEEESGIEIDQYLKEFSLYKKDFQTYRKKKANSTDILPINWKNLTQDITANYEAETKNPIYEWWQEIQKFDAFRGIKGKKDRSDHRHHLLDAIIIAMCSPKIIQQLSRFNAIREQQGIGMYDEKGELTRERIECPIKYEQIKKAIKDVLIYHRANQKLITTKINRIQKKKANNKDLRIIKQKTISPRGSLHADNYFGKLKNPLNQGFDKKDVYVKRIPVEPEKFKDINSLEKVIDCRVRKILERRLIKYEGKGEKAFSEEALLSDPLFLYSIDKYPEGVPDNPLSSNGKLLPIIKKVRVANKNSRNLIQLAAKDENKNIVNNNRYAETDGNYVMALYERKEKDKKGKVKIKRDFEIVSFFKAVEKRRLGQQLFPDEKMQKDGTYLPLMSCCPYLKQDDFLVMYENDEKEIDWKNNNDLKKRLYKVSEIGRQVNTDGGEFGVIKLIRHNSQKTTKDKYITEGNFIKILHSGIKCVKIVINNLGEIIKHRE

SEQ ID NO: 7909 - protein, 1298 aa, synthetic construct
  REGION 1..1298: note = Synthetic
MQNNISKETDPSSVQRILALDLGIGSYGIALQERSGQGENKQYTFPIVRSCTLPGDWAELKEERTRRRMWRTRLAHIERETWLRQVFERCGLKDAVLWGRRLKKITVEETGPGGVKVTKKRWTLDADNPPDYRLEREFPPQPGKKARDKAPSDEQGARTIYSGAALRCLLLLGEKAQIAAQGHTLEPWQIFKALHSAIQKRGYDAKVPWSRTPTAKPAMSDDAASKRSRKGKKAEAVEAATEADSEPALSEAEAKERNEEKGSLERALTMRGIVEGLSSDTRFQHPCFWEAYRMGLWDTKEPEVILARQSHNARSCKWADQEDPANKFKNANERDPYSLLPAIFPRQMVEAELIALCEAAAQQLPALSVSAYEIAYGPTGLPYPNIPRRDPAQQEIETQRREALKALSPELREKFVRGKAAEWQGALSQKAPTFDNRGPAPCALIPRFNVAKCELRFDKDALVPDSALAAEVSFLLQLKNFRFVPEVKDDSKPGGLRDYFSPQELKQLHADHFTATVLQRMASGMKGGAMTKKMLCGWMGERIGPKTTPKPGQDGKGKEIIEMPKATGRARFSRPALRLVKELLLSGLSPAEFKAALLDLNNHAYDALRQAVKLVGDDSSEMNTQEMRGMIATDLDFLDNIGASWDKISIRDERLEAISELTQAEKAARQAAITRMISMEINPKIRHRLTLLDHILDEITADGRLPDRVVLEFAREEWLGPKRKKELEDFQKERKEQNITARMKLGGEVTQKAVLKHQLLTEQGGRCLFCGKNFSNPETSSVAHGELSFENGHLSHIVADSKGGPRAYVNLVLACDGCNRAQDNRFHADAFAQNRFPLGWDAFVGIVSGCAGMRPFKKKILCTKSEDEAAQMVQNKTALQETAWIAKLARVLVCLKFGWKLDAEGEQRRIVVVTGSVTNRVATKFGIYSLLGGPERVKKLADAKMAIEAAMKNVEKASEDELGNLCDDFPKEWKMKKRKGADHWDKDFTLWLLRRLRIANEDAINEKDRNDDRHHALDAMVLSFLPHWAGNPGKSLYFGLPPGKNWKEEFRHYLEGLYPEVLISARPELEQSFYGARRVGMTSAATKRYVLREIAYSGITPKFSNSTLSKQARRIFDKHIQSAVSTFADQNPKEAEWLAFCERLAKGGLKTGGPRITHVRRIVSDELTEYADFSKDGTGAWRKGDKNQGWFVCEKKVREGEYAIEPVYVHQSKSKLEQRILKEGKYSRVVGFFIRDEVVTLDHEITGIMDPLPAGSFVIRTMKLNGQVELSNNAGYQYKPVNIKTLMGVGFKKGEQLS

SEQ ID NO: 7910 - protein, 1036 aa, synthetic construct
  REGION 1..1036: note = Synthetic
MSVTPSADPHLVFGFDLGSNSIGWAVLEENPAGQAQALRDMGVRIFPKAVEEKTPTPKNHKRRQMRLARRVLERRARRRRRLQNYLILLGLLPDSVHDVRERERVLNTLGDPYALRAQALDQALSAHQLGRVIAHLGMRRGFQSNRKTLLSDMLDDPDVQDMLAELEQEDPQGHAASERERIKEEGQFKQAISALQADIHQAGCRTLGQYLASLPSAQRKRGRRIGRDMIRDELRAILAAQRPHHAGLDDAVCEEIERIIFHQRPLRWDRASIGACSLEKHRQRAAMARLEYQEFRLLQDINHLRYDRPCSHPDTGEILGLNLALTEQDRTRLLDKLASQQDMSWSAVKKLLGLDKTITLNLEAGSKKGLPGNRTASKLANTLGADAWRALGASGQAELVEDLLKFEKKSALKKRLMTHWALPARTAIALATLELEPGHANLSLKAIRRLLPFMRQGMRYDQAREAAGYGYSRTPSDGLERLPRPDDLRNPVVNRALHEFRRVCNALLAEYGRPHAIRIELPRELAMGGKRKAEYEKQQKRNQKANEDANTQYQTIRQANPQLGLAERVGRLEQLKYRLWRDQNERCLYSDKPISMTELFSAEVEVDHILPYSRTVDDSYMNKALVMASENRFKGNRTPYEAYSGQPERWERMVQCARQQPPAKRERLLRQELSGVDDFINNQLTDTAYLSRQVLAYVQLLGSAVDVSVSKGVLTAWLRRRWGLNPLLGGGEKNRADHRHHAVDAAVIACVNRSLYQKLVKLMREPGARLERIALDAPFAHYRDSLAAHLDRLCVSHAPLRKLSGALHEETVYAVQRGPQGEPRVVYRKPLDASLKLDKLVDDGLRRQLQDHLARFNNHAKQAFAPENLPVLHPGHGPVRRVRVVAANSFNPRSFLSLPDRQGQLRKHLPFGSNHHVEILRDRASGKVESVFVTMWEAAQRAHQHQQALVQTKHGADKVFLMALHINDLVLIQQGERQVIYRVQNLDPGGKRLMLRHHCAATLDNKQEELLISLSRLVDECAGKPLYLNVLGKPLP

SEQ ID NO: 7911 - protein, 750 aa, synthetic construct
  REGION 1..750: note = Synthetic
MARLEYQEFRLLQDINHLRYDRPCSHPDTGEILGLNLALTEQDRTRLLDKLASQQDMSWSAVKKLLGLDKTITLNLEAGSKKGLPGNRTASKLANTLGADAWRALGASGQAELVEDLLKFEKKSALKKRLMTHWALPARTAIALATLELEPGHANLSLKAIRRLLPFMRQGMRYDQAREAAGYGYSRTPSDGLERLPRPDDLRNPVVNRALHEFRRVCNALLAEYGRPHAIRIELPRELAMGGKRKAEYEKQQKRNQKANEDANTQYQTIRQANPQLGLAERVGRLEQLKYRLWRDQNERCLYSDKPISMTELFSAEVEVDHILPYSRTVDDSYMNKALVMASENRFKGNRTPYEAYSGQPERWERMVQCARQQPPAKRERLLRQELSGVDDFINNQLTDTAYLSRQVLAYVQLLGSAVDVSVSKGVLTAWLRRRWGLNPLLGGGEKNRADHRHHAVDAAVIACVNRSLYQKLVKLMREPGARLERIALDAPFAHYRDSLAAHLDRLCVSHAPLRKLSGALHEETVYAVQRGPQGEPRVVYRKPLDASLKLDKLVDDGLRRQLQDHLARFNNHAKQAFAPENLPVLHPGHGPVRRVRVVAANSFNPRSFLSLPDRQGQLRKHLPFGSNHHVEILRDRASGKVESVFVTMWEAAQRAHQHQQALVQTKHGADKVFLMALHINDLVLIQQGERQVIYRVQNLDPKDKRVVLRHHRAATLDDDTQKVRASISQLVDQHGMQPLQLNVLGKPLP

SEQ ID NO: 7912 - protein, 1153 aa, synthetic construct
  REGION 1..1153: note = Synthetic
MQGVFMALRYILGIDLGISSIETALFKILPDATDLNDIHSFEKILDAGVRICPVSEGAANRRNFRSQRNAKKHRKARKKALIALLQEYKLLPLDRSELELGLRSQPYALRAKAMQEPLSNAYELGYCIMNIAKLRGAGFIDEAEENEDEKKKSKTANRYQILEQELKTKNITLSEFLADHLAKNNCVRQRLDFIAEKVPFSVPRYLVKRDYYALMEKQAKHFGISDAQVKAIYSTIFQDFPKAPYANAPCSLLPETGSRLPKMHRLAEELRIYQQCNNIRYNTVEHTDIYQGLTRQMRDALAEKLMQGEGLNKTSIKKILQTFCKEKIKSINCYAQDEEITAIKPFAHVKAFAGIPTFWKLPQQKQDELIEFIADPLDVKAKSAKPVLYDEEKFLQICMEKLQLSGLEGEQKLYAALNLLPKDRTMLGKEASKQILQKLVDGIEVDGEWKAPTYYDAVTACNFTRASAEQKEYDFLPYYGEVLVNDILPIHPWHLERTAEEEKIGRIANPVVHSMLNQLRKVVNEIIALYGKPEMIKLEIARDFGLSKIKRDKLEKQRQANEKYNRTIDAELLRFGYASTPKNRLKYRLWKEQNGKDIYSRQEFKIADFNRYQIDHIIPQEAGGTNSFCNLVLTDKNNVKGNTFAYDFIQAKFPDCWESIKKEMEEMPKHKAWRFTAEAKTRYALYGDETDEDYADRRLQDTRYMAKAALRYLSCICKNILAIRGGMTAQLRHLWGFDGIEYELMGLNVPKERIDTETGEVSVDSNGDAAINPDWEAKPRIDHRHHAVDAMVLCAITRSLAQKMYRADNRNKKIDESIADMPFRKSPKNSELKSFRELVLEMLKTIKISHKPEHDTNTQLHNETAIRILDYDEKDQLYIANYMRSLSNIDSFSKLETIAVAENLGTSPTVRKMRERCAHIINDVSAQRFAAEKSLKQKNTDNAAQGLKEVKITDQALVQEAIRLAKVGNKYPRLEKFTLVNIRKKQQCGYEPASNHRVDFFVYTDGKKKDEIGWECIKSIDAANPNFKPKWQEYGELVWSVCKGDILELHFDKETLLKEKIPMAFVRQNEQQEYCMLAKVLKFTATYIVFVSAFDARADQKNALKENPEPFMRWKSGNCGLSFYCKAKARKVLLSPFGKVNKKLQRLWHGKKV

SEQ ID NO: 7913 - protein, 1146 aa, synthetic construct
  REGION 1..1146: note = Synthetic
MALRYILGIDLGISSIGTALIKIAPEAKDLNDINSYEKILDAGVRICSCPEGAEKRRILRSQRKSKKHRKARKKQLIQLLQEYNLLPKERSALELGLRSAPYALRAKAMQEPLNSAHELGFCIMHTAKLRGAGFIEETDEEEKSEKSLNRYQLLEQALNKEKTTLSEYIYKHLQENGCIRQRKEFIADKVPFSVPRYLVKRDYCDLMSRQAPHFNISDEQIKKIYDCIFMDFPRAPYANAPCSLLPETGGRLPKMHRLAEQLRIYQQCNNIRYKTENSTQKLTKEMRDKLAAMLMQGESLNKTLIKKTLQTYTNEKILSINVYAEDEEIKAVKPFAHIKAFADIPAFWRLPEEEQDSLMEFIADPVNPKANPAKPVLYDEEDFLHICMEKLNLSEIEDERKLYACLNSLPKDRTMLGKEASRQILEKLIEGYEENGIWQAPTYYEAVKACGFTRENQEQKRYDELPYYGEILHDEILPIHPWHLERTAKEEKIGRIANPVVHSILNQLRKVINEIIRLYGKPEMIKLEVARDFGMSKKKRDKLEKQRLANEKYNKIIDEELLKNGYAVTDKNRKKYKLLKEQGYKDIYTQANLRISDLNAYEIDHIIPQTAGGTNSFCNLVLTTVNNVKSDTFAYDFIRQNFADREEAIKKHLETLPENKAWRFTAEAKDRFILLGDEKDEDYADRRLQDSRYMAKAALRYLHCICPDILAIRGGMTAKLRHLWGFDGMEFELMGLDIPRYLTNNETGEVYCDENGELSKNSDWEKKPRIDHRHHAIDAMVLCAVTRSLALKMYKARKQGKEIDESIINMPFRLSPKNPDHKSFRELVLETLKEIRISHKVEHDTNTQLHNDTAIRILDYDEKKGLHTATYMRSLGNIDSFGKLEKIAVAENLGTSPEVQKIRKRCAEIIKAVNAQKFAAEQSLMEKNAENRLQGLKETAMTEQNLVQEAIRLAHVGKKYPVGKKFTLVNIREKQQCGYEPDSNHHVDFYVHTEGKQKGKIGWECIKSIDAANPNFKPGWRQENAKLIWSVCKDDILELRFTEQQLQEYNVPKAFVSKISKHGQQEYTMLAKILKFSPGILVFVSIYDARTGTKNALKEHPENFLLWTSGGLGLNSYCELQARKVSLSPFGKINGKHKKLWNGKKI

SEQ ID NO: 7914 - protein, 1144 aa, synthetic construct
  REGION 1..1144: note = Synthetic
MSIVTIQQNVKDYFKADRPMLRILGLDIGIASIGFALIEMEEKGGETGAILCCNSHIFSKAEQPKTGESLAAPRRLARITRRRLSRRSQRIEQLRRLLQEHGWTDLGMYDDKITEPERSKINPWALRVKGLSQPLEKGELATVLGHLCKYRGFRSTAKASEEEKALKEESKKKSKEGKSEDDEERHKMLEATAALFKELEKHGITYGQYIARKMEEGEKKGGERIRNTTGNYHHTPLREKMILVELKKIWTAQKETFNNHALTDDLYRKVHALIWEQRPIKGVSKMVGPCVFYPKEKRAAKHAPSAEEFVAWSSMNNHKIRQDDGGERDITLDERLALYEKAITSKSGIVTYAQARRILDMEENDQFNLLNYRQKPKRKKKDEKKGQEEVEGVEDFQTTVKRLEEKPLVSLKGTVTMRALFETHAPSLWHKVHEEDPQALDTIASILAFEKDEAKREDKLKKQPCLADQSSLVQALGEEIDDFTGTINLSGKACRELIPRLREGLTYKEACEEAGMTEAHKKRDKTDDGKRIPPFDPTRNPVVDRALAETRKVIHAIVRCYCDNKISNIDRIHIELARDIHSAKERREIEIQNRKNEARNKQAREKAEEIFGPLHENDPRIYKYRLWDEQQRRCLYSGDTISGEDLKNEGRTEIDHALPLSQSFDNSHSNKVLCFTKANQDKGNRTPYEWLGGEDDSEEWQKFTHLVSRCVKAGLMSIHKKKKLLTKHVDRDGWLERSLNNTRYMARVLSQHLRDYLPRREGNKDRVQVRKGYHTSLLRQRWGLNFDKKDKQTDKKQRDDNRHHAIDALVVAASTQSMVQRVAEWKRRARKDDPLRFAHPPWPRFREDTKAQREKMLVHHRPERKYTGEIHEETIKSIRHDKESGTTYTVERRPLHKLTEKSLKHIVGVRMEGDKVKGHNAWLYELLKERLEAHRDPTTKKVDLKKAFGDPKNPLYLQKKNGSQGPIIRSVRLRTDEKTWIPVRRGKGDNIKEGAAQHGAMVRVDVYHGKDEGYRLCPVYLWDVTQGQLPTKLIINGKEEKDWDSIDPQKHTFLFSLHSRDFVRITKKTGEVVQGYYCGTDRATGVIALLDPKASTQTTTKGDDQTVYRVGVKTLLRIQKFHVDYFGNMVEEKEREGKKPRDLA

SEQ ID NO: 7915 - protein, 1098 aa, synthetic construct
  REGION 1..1098: note = Synthetic
MRKKIRYVLGLDIGIASVGWAVLLLDGEDNVCGIVRAGVHTFDEVTVGKEKITATANRRGYRSGRRLVRRKAHRIQRVKSLLQEMNIVSKKDMDEYYSGAVEDVYFLRWAAIQDEPVYILNNRELAQLLIYFAKHRGYKSTAVHEQEDEDDKKVLSAISENKKYMHEHGYRTAGEMIYKDAKFRQKRCGSSEENELLVARNSEGNYSNSISRDLLVEEVRIIFEKQRELGNTLATKELEERFLSIMQSQRNYDEGPGEGSPYGGNLIEKMVGECTFEKGEKRACKASYTSERFVLLEKINHLRICTADGDERPLNEDEKSAVIKLAYKTKVVKYNAIRKELKLDLEERFGGLTYSKVNNGDFKQRILDTEKKSDFISLKYWHEVKDILNLSYKDLTEEQKQLMDSVGKVLTYYKSEEKRREELSDLSVNQAQIEKMLKLNYAKFHNLSFKAMKKLMPELEAGYSYMESCLRVGYDSLSTDGVKTKYISKELLNEAVDKIMNPTVKRAVRRTVRILNEIVKLYGSPVEIHIEMARDLPHSGEVKKKIATAQKNNNKEKKEAIKFISENFGKIESDIRRKDILRYRLWKNQSQMDLYSEKLIPVEDILDYEKYEVDHIIPYSRSFNDSFNNKVLVKKKDNQDKKNHTPHEYIGHDDEAWNKFVKMVNNYVLSPGKRKNALTKSSDSDEWRSRNLNDTRYTTKVVADLIRRHLVFEPYFNGARNKHVYPLNGGITARLRHEWGLEKDREKSDKHHAQDAIVIACCTEKMIWKMSNIYKQEELGGVVRKGNKLVDRRTGEILETTALPWKWFREEVEMVMADHPEDYIERAKDRGYMGDIPKPIFVSRLPVKKKTGVISENTIRAVDEASSRTVEKTSLDKLKLIAVNGKKQIKDYYRPEDDVLLYNKLLDRLIRYGNAKDAFAEPFYKPKKDGSDGPIVKKVKLYVGVADDQVKVRGRGEDIDREGVKDRGGMYRCDIFRKDGKYYMIPVYYKDLYLHRMPTKAVVAHKETADWKKMDDKDFLFSLYPDDLIKVQKKNKEIENGYYKTSDRYSAGISYVQHDLGAKTYVRLCIQNLAIFEKLNVDILGNIYSCSKEEREWL

SEQ ID NO: 7916 - protein, 1071 aa, synthetic construct
  REGION 1..1071: note = Synthetic
MSCRKDWEASMQQFRYRLGLDLGTNSLGWAMILLDEDNKPCKVLRLGVRLFDTGREPKAGSSLAVNRRGARQMRRRLDRVKKRRYRFLKELIRAGLLPENEQDRKELLSLNPLRLRAEAVTKELSAYEVGRALFHLQQRRGFKSGRKIAIKDVENEEGKIKSAISETRSMLDGRTIGQELWRRVQNGEPARARLVGEGQTASYTYYIERDMIAEEFDRIWEYQRQFNPEKFTAESAERLRDVLLFQRDLLPAVPGKCFYHPQEDRLPLATNTAQEFRLYQEVNNLRLLDKRTLETRPLTLEERDRLIAILQIQTEVSFSAMRREILGKESRAFVFTVEQLGRRTKLLGNTTAAALAADTAFGERWWNFTAEEKDYVAELIARERKERVAIQKLSGEFGVSELVAHTLLVNGLEEEFLRIGKTAATKILAALKTGWNAAADAPLTYDKAVAIAGYGSHTVGGAAGVIFDMLPYYGEVLPLHTAPRPKSQVPDERQYGKIANPTVHLGLNQIRKVVNAIIERYGTPEQIVVEVGRELKNGEYVKTQIKAEQDKNAKANQELNDELEAFGVKVNAENRTRLRLYRELAGKEDHKTATIRCVYSGKVISYAKLFSNEYQVDHVLPFSRTLNNSFANKVLVHNSANRYKGNKTPFEAFGSSQDEYDWDKILDLIKVLPGNKQRLFAPDVQVEPQGFLERQLGDTQYLSRVAVQYLQSLDGVDVWSVRGALTSMLRREWGLNSLISFNNQKNREDHRHHAIDAAVVALTDRSTLQQASRAAQRAETQQSQRVMLEFPNPWQGFRAEMQEKVNSIVVSIKPDHGVAGKLHNDTAYGIERLGEGGKPSVVRHRVPLTTLKAADLGTLKPEFGSLPIIDVDSAFYAQIADAIEGYADKEEWKRNLSALAQKTGRRYVRKREVLSVIPIFERGSENDPQRKPYKGLKGDANYCMEIFADSKGNWKSEIISRFTANTAEYKSYLAGAEAQRVTFSGKPLVMRLLINDCVVLGDSPTVYKVQKVSGAAITLCPVHEGNADARNRDKQDPFSFVTKTANSLRTSGGRKVLVTELGTVLDPGPLE

SEQ ID NO: 7917 - protein, 1211 aa, synthetic construct
  REGION 1..1211: note = Synthetic
MTHKHASDDPSDKPSPNSGRFSAPKDATSYRVGIDVGLNSVGLSAIEIAPKGSLENPDYFPLYSPPLRLLSTQSVIHDSGVDPYENKTGTSRKATAGVARRSHRLRKQYRRRLRALDLTLTELGYPIARLDSTDPYVVWRVRRELLGHFIEDDNERLEKIALALRHIARHRGWRNPYLLPNHLLELAKRPSDHYATLREKLLLRFDNSYQQLLSQRNELSAPPENKSDTNSLLKDQIKAVENQLSIRRHDILLAAGWHDEEQYDRKGNLKVDKETGEIETKLESPQTWSNQPYISQIACSLLFDPSHSSAPQHVSLRRAPKEDNTVQPIDARLGKLGQEENLAEILAIFAMQRVSQSDVTPLLFGNRQYPVQRNGKEWVNTLGGVFSSVNPRDVGAAADYIAHDDLPGQERFVRASRASIAFQQYRIVASIQNLRIGSERLSNEQLNTLLHGRRDEKGTHLNGLFELSSKEIDAITWKYVTTLLNVDRGLLRGMGKPLTYSEYNSTSGHWETRELDESVSAKVPPTITTEALLSSSKIPAITEFWSDLTRDEHSDDAQLSRKALIFKERFIDSLQSSGRTPPSNDLENDADREIDELIATKLNENELNELENLGMSLPSGRAAYSVDSLQKLTGTMITHNVDLHTARGIAFFGWNPNIPVGTDKENDRKRVANDRWTPSAAPLDEPTGSPSVDRTIKVVSRFLKACERRWGKPETVGIEIARDGFMSVSAARDAETQNQRMYESRKKAAQRILDSTSNRTGYSGRVEDVSNSDIRRIQAIQRQNGKCVYCGESISLTNCQMDHIVPRKGVGSTNTRANLVATCQACNLDKSNTLFSVWSTPGNNHRQINLTSVIKRINKEWQRDSQEFNARQWKKYTSDVIGRLKATEEDDPIDNRSIESVAWMGRELKARLERRYQYTIGDLSTNPDEELHQRIFVQQGIITARARRIGHIENNLPWFGGTEGKTRLDRRHHAVDASVIALMTPAVAGVIYKGDNLRKEQRDFMIPIAWVKESVPDDYVLPENTARVSIAMSEEIFNAAIRHNPNIIGIVGQCYWRRYQGNNIEQREDGSRKQTDSNSKYQRWLDLMNTNHNQGGLVRLLRDGFIDGSIKVIRPVRRRLQNSKVHDDTVGRFIRKPLSDAWTLQELLRVGNYVWIDKKPFKITSADIYQTLPNMRTITPTIYMTRTINGYLKRVGQRVPGSYQTTRADAS

SEQ ID NO: 7918 - protein, 987 aa, synthetic construct
  REGION 1..987: note = Synthetic
  SITE 894: note = misc_feature - Xaa can be any naturally occurring amino acid
MSKIVLGLDLGITSIGWALVNVDDKNLQNNKIIESGVRIFTIAEHPKDGKSLALPRREARGARRTTKRKTQKLRAIKRLLIKNKILTQDELDNLFIGNKKQKDVWDLRKEALDRGLDNKELSRIMIHLAKHRGYFSNRKSEKPDKSDKEATAVLGGISINKKVLEDTKYLTIGEYISTKNKKRNGKDKEGKLKYENSVERYMLIDEITTIFSKQKEFANKVVNKELLKSYKDIAFEQRALKSVAHMVANCPFETDEKRASKSTYTFEYFRALQKLKNLRIIKNGDEVELTIQEIHQAINKAKNIGVFKYQTLKTLFNFDKDATFKGLVYFDNKTGKKAIKNPELQKLLDFTAYNKIRKVIQEVDSIYWEKIKNDNDTLDSIAKILTTEKNDNESIKRLNNIIENKKVCDSLVSLSFSQFGHLSSKALGKIIPFLEEGLDYDKACDKAGYDFQAIFKGDKAKFLPPLSRQENLEMTNPVVKRAISQMRLVYNAVARKYGAIDAVHIEFTRDIKNSHDDRRKIEKAQGEFRDTKEKAREQAVDKLGKEPNAKELLKFRLWEEQNHRCIYSGDYINPNILSDPYATEVDHILPYSRSLDDSLNNKVLCLTKENQDKGNKTPNEYIDSSKWGEFVVRLEGLKNLKFAKKGRLLKTNFDENSENAFKERNKNDTSYISKFVKNYIEAHIGFKESKMKRHVYTMNGMLTAQLRYKWGVGDKNRDNHLHHAEDAIILAFSTQFMVKALSTVSARKETEGFKYKSKEDKAKYLRFIVPIDEFHKQVKDSLKNIFVSHMPRRKVGGAAHKATIYSKKTLSMKKENGKIDTLKGGSVINNVKLKHGIALNDAMPRVDLFQNKKTNKFYLVPIYVNDFVKDKLPNKAIVAGNKLWIEMDEDYEFXFSYYKRDLIQIKTKKTATKESVQILGYYDSTDSGTAKIMFKEHDGSIEYGRGVQNSLSIKKYQVDALGNYVEVKSEKRQGTIKEGRKSKKSNK

SEQ ID NO: 7919 - protein, 978 aa, synthetic construct
  REGION 1..978: note = Synthetic
MSKLVLGLDIGITSIGWALVQTDNEEQQNNKIIESGVRIFQIAEHPKNGKSLALPRREARSARRTTKRKAKRIKALKRLLQKYNIITLQELENLFIGNKKQKDVWQLRRDALYRELDNKELSHILIHIAKHRGYFSNRKSDQVKKQDKEGKAVLSGISQNEKILQEKGYLTIGEYLSTKTKKRNAHGHYENSIARSMLISEIELVFAKQKEFGSPYISDTLLEEYKKIAFTQRPLKSVKGMVANCPFEVSKKRAPKASISFETFRALQKLKNLRIITQNGEEALSQEQILQVINKAKTVSSLSYKQLKKFLALNAEAQFKGLTYFDVKTGEIKDPEKTKFLEFGAFVKIKKEIQSVKHLYWSEIENDNDLLDQIATILSTEKDDSKMLEQLRKIIPYEEVSQALLGLSFSGFGHLSTKALQNINPHLARGLNYDKACEEAGYDFQAIFQGEKTLLLPPLSQQENSEMTNPVVKRAISQMRLVYNALARKYGALDAIHIEMTREIKKSHKDRKEIEDAQKEFQTQKAEAKKHAIELLGKEPNAKELLKFRLWREQNEHCIYSGAYIDPYMLSDPYATEVDHILPYSRSLDDSLNNKVLCLTKENQNKGNKTPFEYFGSDKDLEKWQEFVGRIEGLKNLKQAKKSRLLKTNFDQSSENSFKERNKNDTSYIAKFIKNYIEAHIAFRESKNKQHVFTRNGMLTSQLRYKWGVGDKNRQTHLHHAEDAIIVAFATQAQVQKFSEISAKREGFIYETKEQKAKKVKFEPPMENFGAKVQESVQQIFVSFMPRRKVTGAAHQATIYSPKTLQVKKGDGKIEKLKGNSINNNVKLKHGIALNESMPRVDLFQHKKTKKYYLVPIYVSDFVKETLPNKAIVPGNKPWLEMDENYEFMFSFYKNDLMEIKTKKTAKKESVQILGYYDSTHSSTANLTLKSHDGKKEFSYGSQNLVFIKKYQVDPLGNYVAVKQEKRQGTKKQNKRKR

SEQ ID NO: 7920 - protein, 730 aa, synthetic construct
  REGION 680..688: note = misc_feature - Xaa can be any naturally occurring amino acid
  REGION 1..730: note = Synthetic
MANTILGLDLGITSIGWALANVDDANPTNNRIIESGIRIFTIAEHPKDGKSLALPRREARSARRTTKRKAQKLRAVKRLLISEKIITTDELENLFIGNKKQIDIWELRKDALYRLLDNKELSRIMIHLVKHRGYASNRKSEEPTDSEGKAVLGGIEKNEKIVQESAYLTIGEYIATKVKKRNGKDSEGKLNYENSISRAMLIKEIETIFEKQKGFENKFVNNELLNNYKDIAFTQRPLKSVEGMVANCPFETDQKRAPKAAYTFEKFRALQKLKNLRIITQDGEVALTKEQINQAIYKAKTTSKFTYKSLKTLFSFDKAVQFKGLTYFDHKTGEIKEPEAAKFLDFSAYQKIQKAFESADNLYWSKIENSDTLLDDIARVLSTQKDDKKSFEELQKIIDNEAVSNALVGVSFSGFSHISTKALRKINPFLEDGLDYDKACEMAGYDFKAIFKGDKSLFLPPLTEQENLEMTNPVVKRAVAQMRLVYNAIARKYGAVDTVHVEFTRDIKKSHKDRNDIKKAQNEFQALKEEAKIHAIEILGKEPSAKELLKFRLWQEQNNECIYSGEKIRPEHLMDDLATQVDHILPYSRSLDDSFNNKVLCFTKQNQDKGNKTPFEYFGANKESKEWQEFSIRVECSKNLKSAKKGRLTKTNFDESSENSFKERNKSDTSYISKFVKNYXXXXXXXXXCTMQKMRLFWLFLHSRRYKNSQPYLLQERDLALKLKKKKPKI

SEQ ID NO: 7921 - protein, 978 aa, synthetic construct
  REGION 1..978: note = Synthetic
MSKMILGLDLGITSIGWALVNVDDEDAQNNKIIDSGVRIFTIAEHPKDGKSLALPRREARGARRTTKRKAQKIKAVKRLLIKEKVVTANELNNLFIGNKKQKDVWDLRREALYRELNNKEFARIMVHLAKHRGYASNRKSEEPTDSEGKAVLSGITHNKTILQEKSYLTIGEYISTKTKKRNGKDTEGKLNYENSVSREMLINEITTIFERQKEFSNPHAKEELLEEYKNIAFTQRALKSVEGMVANCPFETNKKRAPKASSTFETFRALQKLKNLRMISNEGESALTKEQILQAIQKAKTAKSFTYKTLKTLFALPKEVQFKGLTYFDHKTGEAKEPESAKLLDFSAYQKIKDAIQSSDNLYWNKIEESVNLLDEIAKILSTHKDDKKSLEELNKIIDNPSVCNALISLSFSGFGHISVEAMRKINPYLLEGIDYDKACEMAGYDFKAIFKGDKSTLLPPLSEQENLEMTNPVVKRAIAQMRLVYNAITRKYGAIDAVHVEFTRDIKKSHKDRNDIKKSQEEFQALKEEAKAEAIKILGKEPSAKELLKFRLWKEQNGECIYSGAYISPSILADPYATEVDHILPYSRSLDDSLNNKVLCLTKQNQDKGNKTPFEYFGADKDSKEWQEFTGRVEGLKNIKGAKKGRLTKTNFDESSENAFKERNKNDTSYISKFVKNYIESHVEFKESKMKRHVYTMNGMLTSQLRYKWGVGDKNRENHLHHAEDAIILAFATQAQVQKLSTTSAKREGFSFKNKEEKAKELRFEPPMENFNEKVKESIENIFVSHMPRRKVSGSAHKETVYSNKTHSVKKADGKVEYLKGNSVNNNVKLKHGIALNDSMPRVDLFQNKKTNKYYLVPIYVSDFVQETLPNKAIVAGNKPWLEMDEEYEFKFSFYKSDLIEVKTKKTATKESVQVLGYFNTAVSSTAQVVIDTHDGNEEYRYGTQNLIFVKKYQVDALGNYIEVKNEKRQGTKKQNR

SEQ ID NO: 7922 - protein, 968 aa, synthetic construct
  REGION 1..968: note = Synthetic
  SITE 869: note = misc_feature - Xaa can be any naturally occurring amino acid
  SITE 954: note = misc_feature - Xaa can be any naturally occurring amino acid
MSKIVLGLDLGITSIGWALVNVDDKNIENNKIIDSGVRIFTIAEHPKDGKSLALPRREARSARRTTKRKAQKLRAIKRLLLRNKILTQNDLNTLFIANKGQKDVWDLRREALYRELDNKELSRVMIHLAKHRGYYSNRKSDEVTDNEGKAVLSGIGHNKTILESSKFLTAGEYISTKKKKRNGKDSEGKLNYENSVARSMLVDEIEIIFGKQKEFGNSFVSDELLETYKELAFEQRPLKSVAHMVANCPFEVDEKHASKSSYSFEYFRALQKLKNLRVIDETGYEMPLIFEQIAQVIHKAKTTTKFTYKSFKKLFPQYKEMKVKGLTYHDHKTGEIKDPEGVKFLDFSAFQKIQKAIQNADNLYWNTIENDYEVLDAIAKVLTTEKDDNESLKQLKEIVESQKVCEALLGLSFSGFGHLSNKALRNIIPFLEEGEDYDKACQKAGYDFKAIFEGEKTLLLPPLSKQENIEMTNPVVKRAVAQMRLVYNAIARKYGAIDTIYVEFTRDIKKSHKDRNDIKKAQGEFRDKKEEARVHATEILGHEPSAKELLKFRLWKEQNGECIYSGKEISPDVLNDPYATEVDHILPYSRSLDDSLNNKVLCFTKENQEKGSQTPYEYMSQEKFNEFEQRVKGYKNIRQAKQGRLLKTNFDESSELAFKDRNKNDTSYISKFIKNYMEAHIAFKESKGKRHIFTMNGMLTSQLRYKWGVGDKNRENHLHHAEDAIILAFSTQSMVQKLSSVSAKREGYIYESKEKKSKALRFVTPLEDFGVRVKESLGEIFVSHMPSRKVGGNAHKATIYSKNKKSKGVVEINNGLAENGEVKRIDIFEKNGKYHFVYLYSIDFVKDEIKNISIKSKIIDDTYSFKFSXFKNDLIELEFKDKKVFGYLKFAEGDGRFNIIPQSQGELDKKTDRHSTGSMKLIRKYQVNPLGNFVEVKSEKRQMTIKYNWNEKIXKRAIKRAERKKYKS

SEQ ID NO: 7923 - protein, 979 aa, synthetic construct
  REGION 1..979: note = Synthetic
MGKIILGLDLGITSIGWALANVDDENSQNSKIIDSGVRIFTIAEHPKDGKSLALPRREARGARRTTKRKAQKIRAIKRLLISEKIVTKDELENLFIGNKNQKDVWQLRRDALYRLLDNKELTRIMIHLAKHRGYASNRKSEESMDNEGKAVLSGITANQKIIQEKAYITIGEYISTKTKKRNGKDSEGKLNYDNSISRDMLINEITTIFEKQKEFNHPFINEKLLNNYKEIAFTQRPLKSVEDMVANCPFETDQKRAPKASLTFETFRALQKLKNLRIITQDGEMALSKEQMKQAIQKAKNTKTFTYKTLKTLFSLDKEAEFKGLTYFDHKTGEATKDPEGAKLLDFSAYQKIQKAIEGADHLFWSKIENDDALLDAIAKILTTEKDDKKSLEKLHKIIENETVCNTLISVSFSGFGHLSTKALAKIIPHLEDGLDYDKACEEAGYDFKAIFKGDKSLFLPPLSEQENLEMTNPVVKRAIAQMRLVYNAIARKYGAIDAVHVEFTRDIKNSHEDRNKIKKEQEKFRDIKEEAKAHAIEVLGKEPNAKELLKFRLWKEQNGECIYSGEKIRPEHLMDNFATEVDHILPYSRSLDDSQNNKVLCFTKENQNKGNKTPFEYFGADKESVIWQNFVGRVEGLKNLKYAKKSRLAKTNFDESSEIAFKDRNKNDTSYISKFVKNYIEAHAEFKESKMNRHVFTMNGMLTSQLRYKWGVGDKNRETHLHHAEDAIILAFATQSQVQKLSTVSAKREEFSYKNKEEKAKNLKFEPPMEEFGAKVQESLSEIFVSHMPRRKIGGAAHKDTVYSNKTLSVKKADGKVESLKGNSVNNNVKLKHGIALNDAMPRVDLFQHKKSKKYYLVPIYVSDFVKPKLPNQAIVQGNKPWIEMDENYEFRFSFYKRDLIEIQTKKTATKEALRVLGYYDGTDSSTANIAIFSHDDKDTYRMGIQNSTYIKKYQVDALGNYVEAKNEKRQGTKKEKK

SEQ ID NO: 7924 - protein, 1021 aa, synthetic construct
  REGION 1..1021: note = Synthetic
MKYTLGLDVGIASVGWAVIDKDNNKIIDLGVRCFDKAEESKTGESLATARRIARGMRRRISRRSQRLRLVKKLFVQYEIIKDSSEFNRIFDTSRDGWKDPWELRYNALSRILKPYELVQVLTHITKRRGFKSNRKEDLSTTKEGVVITSIKNNSEMLRTKNYRTIGEMIFMETPENSNKRNKVDEYIHTIAREDLLNEIKYIFSIQRKLGSPFVTEKLEHDFLNIWEFQRPFASGDSILSKVGKCTLLKEELRAPTSCYTSEYFGLLQSINNLVLVEDNNTLTLNNDQRAKIIEYAHFKNEIKYSEIRKLLDIEPEILFKAHNLTHKNPSGNNESKKFYEMKSYHKLKSTLPTDIWGKLHSNKESLDNLFYCLTVYKNDNEIKDYLQANNLDYLIEYIAKLPTFNKFKHLSLVAMKRIIPFMEKGYKYSDACNMAELDFTGSSKLEKCNKLTVEPIIENVTNPVVIRALTQARKVINAIIQKYGLPYMVNIELAREAGMTRQDRDNLKKEHENNRKAREKISDLIRQNGRVASGLDILKWRLWEDQGGRCAYSGKPIPVCDLLNDSLTQIDHIYPYSRSMDDSYMNKVLVLTDENQNKRSYTPYEVWGSTEKWEDFEARIYSMHLPQSKEKRLLNRNFITKDLDSFISRNLNDTRYISRFLKNYIESYLQFSNDSPKSCVVCVNGQCTAQLRSRWGLNKNREESDLHHALDAAVIACADRKIIKEITNYYNERENHNYKVKYPLPWHSFRQDLMETLAGVFISRAPRRKITGPAHDETIRSPKHFNKGLTSVKIPLTTVTLEKLETMVKNTKGGISDKAVYNVLKNRLIEHNNKPLKAFAEKIYKPLKNGTNGAIIRSIRVETPSYTGVFRNEGKGISDNSLMVRVDVFKKKDKYYLVPIYVAHMIKKELPSKAIVPLKPESQWELIDSTHEFLFSLYQNDYLVIKTKKGITEGYYRSCHRGTGSLSLMPHFANNKNVKIDIGVRTAISIEKYNVDILGNKSIVKGEPRRGMEKYNSFKSN

SEQ ID NO: 7925 - protein, 1081 aa, synthetic construct
  REGION 1..1081: note = Synthetic
MRYRLGLDLGTNSIGWWMVKLDKAGRACGSLGGGVRIFSDGRNPKDGTSLAVQRRVPRSMRRRRDRYLGRRSDLMNHLIAFGLMPSDESERKALEALDPYELRAAALDHPLLPHELGRALFHLNQRRGFKSNRKTDSDDKETGVVKERISELRTRIEKSGARTLGEFLHKRRLKGRIVRARPEAGFYPERAMYEDEFDLIRQQQNSHHSLTAEQWDALKDIIFFQRPLKPVDPGWCLFETGEKRAHRALPLTQEFRMVQEANNLRVTSPGEPTRRLTLEERDKVLGHLRKKKELKLDAMLKLLKLSSGSTVNLFDDHRSTIKGEETAARLGHKEIFGDAWFNLSTEERTGIVRTLLDTEKPEEIERIAQQQWGLSEAAAKKLAGKSLPDGHSRLSEKAIAKLLPIMEDQGLNYAEAVEQVPEYGHHSDFRPDEARDTLPYYGEVLARHCVGADPSAPKKNEVAHWGRLANPTVHIGLNQIRRVVNRLIEIHGKPEEIVIELARELKMSKEDKDKARRTNSEHETSNRRREEQIRAAGVAPSPHLLRKLRLWEEQKVGSANLCPFTGQPISFEMAISAATEIEHILPFSKTLDDSMANKVVCLIEANRAKRDRSPFDAFHTNPTIAGRKYVYDDILFRADNLPANKRWRFHPDAMDRFVNDERDFLDRQLNETKYLSRIARSYLSNLYNEKAEGRMRVRAIPGRLTAMLRGKWGLSALLPGHNMAGGEDAPKKNRNDHRHHALDAFVIANTTQGLLKRVADLNADADRKRLVDEVPDPWDNFDREELRSQLARLTVAHKADHGTPGRKGKTTGALHNDTAYGIVGPGKNGNTIVVSRTPLARFATPKDMDKGLTGIRDKALRDALIVAWDAFKEAPLETSSPDDEDSRRKPKNPAMAFAEMVATQGIELNRRKVKVRRVRMCEELGVVAIKDRKTGKPYKAYKPDGNAFNEIYELPNGNWVSVVIRRFDANQTDFNSANFRPHPAARKVMRLHIDDLVAIDEGEQRRVLRVVKMSGQTITLADHFEGGALKSRDSDKEDPFRYLGKSANVLKSMGLRRVGVDEIGRLTDPGPRRVEDGGKAA

SEQ ID NO: 7926 - protein, 858 aa, synthetic construct
  REGION 1..858: note = Synthetic
MNQPYRLGLDVGTNSIGWAALTLDPTGRPSDILALGARIYSDGRNPKDGTSLAVARRMPRGMRRRRDRYLRRRDDLMEALIALDLMPADEAERQALVTLDPYVLRAKAARVPLPPNELGRALFHLDQRRGFKSNRKTDTSDDNKLTDKIEALDRLIGDRTLGEYLHRRRLKGKMVRARPEAAFYPHRALYEKEFDKIQETQAPHHTLRPEQWAHLRDIMFFQRPLRPVDPGWCLLEEGEQRAHRALPCAQEFRMVQEANNLRILVPGESGRPLNRDQRDRVLKELRTKKELKLDGLLKLLKLPSGARVNLFDENRKALKGDETAARLSHKDSFGRLWHALPFARRTDIVRKLIETESADEIERIARAEWKLDTAAAKKLAATSLPEGYARLSEKAIGKLVPVMEEQGLNYAEAVAEIPEYRHHSDFRPDRELDELPYYGAILTRQVVGTDPTKPKEDEVGHYGRIANPTVHIGLGQLRRLVNRVITAYGKPAEIVVELARDLKMNKEEKEAERKRNRENEQANRIREEQIKSAHRVSSPHLLRKLRLWEEQNYGSCKVCPFTGQTISFEMATDHRTEIEHILPFSKTLDDSMANKVLALKAANDAKGDRSPYEAFHTSPRIGTIEYDYPNILRYADALPPNKRWRFLPDAMERFENEKEFLDRQLNETKYLSRTTRLYLAHLYNERAEARQRVRAIPGKLTAMLRGKWGLSALLRDHNRTGGDGDDGPARKNRDDHRHHAIDAFVIAMTDQGLLKRISDLNSDPERTRLIEKMDPPWPDFSYEQFRERSTVWSCRISRITQNASRSARRLGRQARFQASRARRPARCTTTPHTALSKIATATLPPARTAHGRSSHVRP

SEQ ID NO: 7927 - protein, 1087 aa, synthetic construct
  REGION 1..1087: note = Synthetic
MSSSVVNYRLGLDMGTNSIGWAAIKLDEQGKPCGILDLGVRIFPDGRSNPKDSTSASNAVQRRLARGGRRVRDRYLMRRSKLLNALVQYGLMPSDPEGRKRITADEKLDPYELRARALDRPLNPFELGRAIFHLNQRRGFKSNRNASGDNDNEAKQTRDAISELHRRIEESRSRTLGEYLHRRRKKRKPVRARPDLGLYPDRALYEQEFDAIRAVQQLHHAMNDVQWENLRETIFCQRPLKPVKPGWCTFEEGEHRAARALPLFQEFRMLQELANLTLHVGAESERRLSDKQRACTLERLQAGDDLNLDADKHKRIKNTLGFPSDTNFNLVAGIRTILKGDETTAKLRKPEMFDRKWLVLSLEERNDIVKFLIKTDDPEVVREKAVVEWGLTEEQAVAVSNVSLTSGYGNLSEKAIRKILPHLEIGKGYSEAVQAAGYDHHSDFRSEEAHDNLPYYGEILPRAVVGANPDKDPKSDGEAAHYGRIANPTVHIGLNQLRRVVNALIKTYGKPEDIVVELARDLKTNREQKRRDDQRRREGVDRNERLTEMLKSAEQSVSGEILRKLRLWDEQKKGSLHICPYTGRNISFEMAVSAQTEIDHILPFSRTLDDSMANKVVCIAAANRAKGNRTPYRAFGDNPPGYDYERIKENVANFPHNKRWRFQPDAMNRFEGENDFLGRQLSETRYLSRTARTYVAYLYDQRGEGKQRVRVIPGHMTALLRRGWGLEGMLSDNPDGEPVRKQRDDHRHHAIDAFVVANTTQGLFQEFSRAAGSSYQNAEERLASLIPPPWNGFDINELKQLLDNIVVSYRPDHGTRGAEARGATTGQLHNDTAYGIVELVEDGQSAIVVRKPLSSISRKALNDVRDTHLRAALINLWDEVGGNKARFAERAWSEGVEVNGRRQKVRSVRVKGNLRIIPIRDRVGNAYKGYLPGGNEFADVWQMRDGSWTLVVVPTFDANQPDFDIEKFRPTTSRGQYKGKPDPAAKRLMRLQIDDMGALGEGTERRIVRVRKITNNARQGGLVVLDDHNEANVPERVTRDARIRKDSGIDIGMKEEVYPASKLRRFGFRKIHVDEIGRVRDPGPKSS

SEQ ID NO: 7928 - protein, 1087 aa, synthetic construct
  REGION 1..1087: note = Synthetic
MFGLPLGPNQSANGRRWCPAGHHHNSPEGWMAYRLGLDIGTNSIGWTAVTVDTHGQPNGVLGQGVRIYSDGRNPKDGSSLAVQRRVPRGMRRRRDRYLGRRSELMEALIALGLMPPDEAGRKGLETLDPYELRAKAVHAPLTPHELGRALFHLNQRRGFKSNRKTDKAEDNKLTEKIGELKRRIDESQAKTLGEYLHKRRLKGKMVRARPEAGFYPDRALYEDEYEEVRKVQAPHHLLRTSQWDDLKDIIFYQRPLKPVDPGWCLLEDGEQRAHRALPLAQEFRMVQEANNLRILILGEPAKRLTQQQRDKVLNDLRTKKELKLEQLVKLLKLPSGARINLFDENRKALKGDETASRLSHKDLFGKAWASMPIERRSEIVRKLIETEKLEEIERVAQSDWGLDAASAKKLAATPLPEGYARLSEKAIAKLLPIMEEQGLNYAEAVAEVPEYGHHSDFRPDTALDALPYYGAILTRQVVGGDAVKPKEDTVAHYGRIANPTVHIGLGQLRRVVNALVKAYGKPEEIIVELARDLKMNKEDKDNARKTNRENEVKNRRREEQIRASGGVPSAHLLRKLRLWEEQAFGSINVCPFTGDAISFAMAISDITEIEHILPFAKTLDDSMANKVLCLRDANRAKRDRSPFDAFHANPKIGKYQYDYAAILLRAETLPPNKRWRFHADAMERFANEQEFLDRQLNETKYLSRIARTYLAHLYNEKTEGRLRVRAIPGKLTAMLRGKWGLNALLGDHNRLGGETDDGPARKNRDDHRHHAIDAFVIAMTDQRLLKAISDLNSEADRKRLIEAVPLPWDDFTPDVLRPHLEHIVISHKPDHGTFGDKGRTSGSLHNDTAYGLIAPGKGGNWKVVSRSALKGVTKKSELESVRDAALRVALEALWDEVEKSGGKPGDFAKRAEEEGVVLGGRKMKVRRARMTEELNVVQIKDRKTGLPYKAYKPDGNAFADIYQLPNRRWTAVVVQRFHANQPDFNPGELRPHPAAKKIMRLHIDDMVAMEDGGRRRILRVVKMSGQTITMADHLEGGALKARDADRDDIFKYVSKSASSLKDVGFRKVGVDEIGRLTDPGPRRASAG

SEQ ID NO: 7929 - protein, 581 aa, synthetic construct
  REGION 1..581: note = Synthetic
MNYRLGLDLGTNSIGWAVVRLDENGDACGILDMGVRIFPDGRENSQSLDPLGQSLAVNRRIPRGQRRRRDRYLKRRSDLLDKLTACELMPQDLETRAAIAALDPYPIRKRALEEPLSPYDLGRALFHLNQRRGFKSNRKAQPKDDEKQSRENLSALDIALKESGQTLGEFLAPRHEQSEPVRFRPGVGLYPDRAMYEAEFEAIRKAQELHHHLHPGQWDSLRDIIFFQRPLKPVDPGWCLLEDGERRAARAMPSAQEFRMTQEVNNLRIRVDIEPERSLNDAERERVLQRLREGKDIDLQKPTKSLQLEGSFNLARGGRKKLQGDQTTARLAKPELFGKRWFDLPLEERDAVAARLLDTEDPKTIRQVAVNEWRLNKEQAARVADVTLPDGHTHLSLKAIRNILPHLENGMRYDEAVQARYPHHSDFRNAEAHDRLPYYGVVLERDVVGADPNAPDGDEPRRYGRFPNPTVHLGLNQLRRVVNRLIDVYGKPAETVVELARDLKSNKEQRERYVRQQRSNEHENDRRREELRECGVEPNGYVMEKLRLCNYKPHRALIVISLSDGRSGRNRNPSCCSSRSP

SEQ ID NO: 7930 - protein, 1051 aa, synthetic construct
  REGION 1..1051: note = Synthetic
MVTNRANYRLGLDLGTNSIGWAAVQLDDNGEPCGLLDLGVRIFPDGRDRQSKQSNAVERRVARGQRRRRDRYLMRRNDLMQSLIEFGLMPDDEALRKQLEKVDPYALRSKALDEPLRPFELGRALFHLNQRRGFKSNRKASADEKEDGQVKAAISELRRRITVSGARTLGEFLARRHGKGEAVRARPEKGLRADRAMYEDEFDAIRCAQETHQSLSADQWESLRDIIFFQRDLRPVEPGWCQFEFESQERRAAKALPIFQEFRMMQEVNNLRVRVGLEPERRLRAEERDRAMKRLRSGNRIDLNKPPRDLGLPSGAIFNLSAGGRKSIKGDETAVRLASTGKKATAKKPEEPALFGKRWFDFSPDERNEIVRFLLDTEEQELVRQRAVAEWGMNAEQADSVANVSLPSGYGNLSEKAIRKILPHLENGLVFSDAVREAGYRHHSALGNAEEHDTLPYYGQALPRDAVGGNLNKDAKLHGEPVVYGRIANPTVHIGLGQLRKVVNWLTEAYGKPDEIVVELARDLKMNPEQKRNHEQQQRAGGKRNDDFRKMLEESGRNVTADALRKLRLWEEQKLGAVKVCPYTGNPLSFEMVMSAQTEVDHILPFSRTLDNSMGNLVVCLADANRIKGSQTPYEAHGDQCLEYVKDFPSNKRWRFQENAMERFEGEHDFLDRQLNETQYLSRTARTYLAYLYDERGEHRQRVSVVPGRMTALLRRGWGLEGLLNGTAEGEIPRKTRDDHRHHAVDAFVVANTTQGLLKRFADAAGSGLRAAEERLASLVPPPWPYFDRRQVKERLDRIVVSHKPDHGTHGATGSTSGRLHEATAYGIVEPIADGRHRVVLRKDLSAFTEKDLDQVTDSALQEGLRRLWKQHGGKPAEFAKHAADTGVCLNDRLQRVRRVRIYSERRVIPVKDAEGKAYKGYLPGGNEFADIWRLPDENWQTVVVSTFDANQVGSDPNAFRPHPAARRLMRVQIDDMGALGEGANRRIVRVRKINNRSGRPPTIVLDDHNEANAAEGKDIEFSAKQMKEQDFRCVRVDEAGRVFDRGPFNP

SEQ ID NO: 7931 - protein, 1090 aa, synthetic construct
  REGION 1..1090: note = Synthetic
MALGGSPMRYRLGLDLGTNSIGWWMVQLDSDGHACGSLGGGVRIFSDGRNPKDGTSLAVQRRVPRGMRRRRDRYLGRRSDLMNHLIAFGLMPGDEAGRKALEALDPYALRAAALDRPLLPHELGRALFHLNQRRGFKSNRKTDSGDDDKETGVVKERIGELRRLIDKSGARTLGEFLHKRHRKGRMVRARPEAGFYPERAMYEDEFRLIREQQQTHQTLTDEQWEALQDIVFFQRPLKPVDPGWCLFEAGEKRAHRALPLTQEFRMVQEANNLRVTSPGEPARRLTMEERDKILGHLRKKKELKLDSMLKLLKLPSGSSVNLFDDHRTTIKGEETAARLSHKDIFGEAWFSFSFEKRTEIVRTLLDIEKPEEIERIALAEWGLSEAAAKKLAGKSLPEGYSRLSEKAIAKLLPIMEDQGLNYAEAVQEVPDYAHHSDFRPDEARDALPYYGEVLARHCVGADPSKPKEDEVAHWGRLANPTVHIGLNQIRRVVNRLIEVYGKPEEIVIELARDLKMNKEEKDKARKANSENEAANRRREEQLRSAGTAPSPHLLRKLRLWEEQKVGTAHLCPFTGDPISFEMAISEATEIEHILPFSKTLDDSMANKVVCLREANRAKRDRAPHDAFHTDPAIGGRKYVYNDILFRADNLPANKRWRFHPDAMDRFENEERDFLDRQLNETKYLSRIARSYLANLYNEKAEGRMRVRAIPGKLTAMLRGKWGLAALLPGHNMAGGEDAPRKNRNDHRHHALDAFVIANTTQGLLKRVAELNADADRKRLVDAVPDPWEGFDREELRTQLARLTVAHKADHGTPGHKGKTTGALHNDTAYGIVGPGKNGNTIVVSRTPLSRFANPKDMDRGLTAIRDKALREALTAAWEAFKAAPPELSNPDDEDSRRKPKNPAMAFAEMAATQGIELGGRRVKVRRARMCEELGVVPIKDRKTGKAYKAYKPDGNAFNEVYELPNGNWVSVVIRRFDANQAGFNSGDFRPHPAARKVMRLHIDDMVAVDDGGQRRVLRVVKLSGQKITLADHFEGGALKTRDADKEDPFKYLEKSANVLKGMGLRKVGVNEIGRLIDHGAPRIEPSGNAG

SEQ ID NO: 7932 - protein, 1146 aa, synthetic construct
  REGION 1..1146: note = Synthetic
MFHPLIPILLIWASKRKRRAVARLLIFCKSLLTETPRSPIGYKATATNSWSNLATLKLYHNPLLHAKRNTMRATNHRKYRLGLDLGTNSIGWAAITLDDQGRLCGILDMGVRIYPDGRNPTDKTSNAVARRVARGQRRRRDRYLARRGELMQALIEFGLMPPDPEAREELQRLDPYSLRARALAEPLHPFELGRALFHLNQRRGFKSNRKSGGEEEEDQKKLGAAIEGLRLRIQESGSRTLGEFLARRHAQKETVRAREALGLYPERAMYEEEFDSIRQEQGEHHNLSSEQWNKLRNIIFHQRPLKPVDPGWCQFEFENRESRAARALPVFQEFRILQEVNNLRVQVGSGQERPLAREEREGALKRLRSGKDIDFRKPTRDLRLPSDVSFNLARGGRQKIKGDEVTGRLSKQGLFGSLWHRLSLEERNTTVTFLLDTEDPESVKHKAMEEWGLTESQAKAVAAVSLPSGYGDLSEKAIRKIMPHLERGRLYSDAVREAGYSHHSDFRSDTALDRLPYYGEILQRDAVGAAPEKDPLEDGEEARYGRFPNPTVHIGLNQLRRVVNRLIEVYGKPEEIAVELARDLKSNHEQRRTYQRRQREGRERNQRFTEMLESAAQESSPDILRKLRLWEEQGPPQARVCPYTGRNLSFGMVVSSQTEVDHILPFSKTLDNSMANKVVCIAAANRDKGDRAPYEAFGHSPPGYDYRKILDVTAKFPPNKRWRFREDAMDRYEDEAIFLDRQLNETRYLSRSARAYLAHLYDEKGEGRRRVMATPGHLTALLRQAWGLEGMLRAAPDTGEIIRKQRDDHRHHAIDAFVVANTTEGLLQRFARAATNHHFDVERLGSLVPDPWEGFHGEHLRSVLDRLVVSYKPDHGIRGVQGKTTGQLHNDTAYGLVELSEEGPSRVVRRKKLSTLKRRSELDAVRDCDMRKALIELWEQVESELGAKDGKRSEAPARFAERAASEGVLLGGRRQIVRRVRVLEKETVIPIRDRSGRPYKGYKRGGNEFADVWRMRDGSWKMVIVPTFEANQPDLDLEKFRPGDRSGRKDPTAKRLMRLHRDDMGAIGDGPGRRIVRIRKMWTERGGRSLVVMDAHNEANVDKRARDKGDKMKESKYSARQLQHSGFRKVGVDEIGRVLDPGQLRS

SEQ ID NO: 7933 - protein, 1102 aa, synthetic construct
  REGION 1..1102: note = Synthetic
VPRLVNGSPRSPIGYNTVESPWPLKNTSSGIAWQCWSSMTNPNYSKYRLGLDLGTNSIGWAAISLDTNGNPCGVLDMGVRIFPYGRKLTDKTSKAVDRRLARGQRRRRDRYLKRRSELMDTLVEYGLMPPDKDERKALERLDPYTLRARALDEPLSPSELGRALFHLNQRRGFKSNRKAAADDENEAKKTRADISMLRQSIEESGARTLGEFLARRHEERETVRARPDMGLYPDRAMYEAEFDAIRESQESHHNLTSEQWERLRDITYFQRPLKPVEPGWCQFEFQSREKRASRALPVFQEFRMLQEVNNLRLWEGNGPDRPLDDDERSRVLKRLRSGLDLNLQKPPMRALRLPSGVTFNLSRGGRTKINGDQTTKRLKNRSLFGNRWLSLPLDQRNEIVKFLLETDDPEMVHQEAVQKWGLDAENAAAVANVSLVSGYGNLSEKAIRKLIPHMENRLGYSDAVVAAGYGHHSDFGSAEARERLPYYGEVLQRDVVGANPKKDPAEHGEVAHYGRIPNPTVHISLNQLCRVVNRLIEAYGKPEHIVVELARDLKMNRKQKQNYERQQGKGKQRNQRFKEMLESAKVSEVTPSLLYKLRLWEEQGPPQARVCPYTGAILSFEEVVSAKTEIDHILPFSKTWDDSPANKVVCIAEANRYKGDRSPYEAFGHSPAEYDYQEILDRAAELPGNKRWRFQPDAMQKFEDEDHFLDRQLNETRYLSRTARAYLAHLYDESAEGRQRVRVIPGRMTALLRCGWGLEGILRVTETGEIARKQRDDHRHHAIDAFVVANTTQGLLQRFAHASGSHHDPERKLTAIAGQVRPWEGFDRSQLQPFLDRMVVSYKPDHGTRGRAGSATTGQLHNETAYGLVKLAESGPSQVVVRKNLDDLKRSDLKPAQDSGPQKGVRDVALRAALLELWDEVGGKPAEFAQQAAAKGIMLNGRRQIVRRVRVLDRQTVIPIKDRYGKPYKGYKLDSNAFADVWRMPDGRWKIVAVPTFHANQGEKFYINRFRPHPAAKRLMRIYKDDMGVLDEGTNQRFVRVRKFGDGYVVLDDHNEADVDGRERRKEMKRNNGHSATRLRQQRFRKVSVDEIGRVRDPGPRT

SEQ ID NO: 7934 - protein, 1077 aa, synthetic construct
  REGION 1..1077: note = Synthetic
MGTNSIGWAAIKLDDDGQPCGILDMGVRNFPDGRNPTDKQSNAVNRRLARGQRRRRDRYLKRREDLINALVEYGLMPEDAEERKKIANDNKLFDPYKLRAKALDEPLDPFELGRAIFHLDQRRGFKSNRKSDGDNENEAQKTRSDINELRRRMDESGARTLGEFLVRRRRRGKSVRARPDMGLYPDRAMYEKEFDKIRAAQEPHQDLSTEQWDRLRNYIIFYQRDLRPVDPGWCLFEDGEKRAAKALPLFQEFRMLQEVNNLKIQVGREDRALKPDERERVLNRLRSGSDVNLKKPVRALGLPSGAEFNLAQAGRTMVKGDEATARLTALPKKATANRPATPGLFGKKWLDFSLDERNEIARFLIETESPEIVRERALTEWGLSEAQADALSNVSLVSGYGNLSEKAIAKILPHMERGLRYSDAVIAAGYPHHSDLRNDEAHERLPYYGQVLTSDAVGANREKNPEIDGEPARYGRIANPTVHIGLGQLRRVVNRIIEVHGKPEEMVIELARDLKMNKEDKLNYQRSQRDGAERNERFRKDLESAEEEVSPEILRKLRLWEEQGPPQARICPYTGRQLSFEMVISARTEIDHILPFSRTLHNSMNNLVVCMAEANRAKGDRSPYEAFGHNPPGYDYDDILANVERFPYNKRRRFQPDAMEWFENDDAFLDRQLNETQYLSRTARTYLSHLYNEKAEGSKQRVRAIPGRMTALLRRGWGLNGILSESGEDQTERKQRDDHRHHAIDAFIVANTTQRLLHRFARAAGSSWQDAAENLARLTPKPWDGFDRNDLKPFLEKIVVSYKTDRGTRGVKGKTTGQLHNDTAYGIIELVEGGPSKLKRRKVLSGIDKVGPLEKTLNDILDPPLKKALIDLWDRVKAEGGKSAEFASQAAKGVMVNGRPQKVRSVRVEEAETIAPIKDSAGKVYKGYKLDGNEFVDVWQMGDKNKSWKIVVVPTFYANQSDFNIEDFRPKTSRGRYRGKPDPNAKHLIRLYKDDMGALGKGDDLRIVRVRKFGDGYVVLDDHNEADVDGRERLNTDDPRKIKRNNGHSGIRLHEQDFRKIRVDEIGRVHDPGPFKP

SEQ ID NO: 7935 - protein, 1134 aa, synthetic construct
  REGION 1..1134: note = Synthetic
MSTDMKNYRIGVDVGDRSVGLAAIEFDDAGLPIKKLALVTFRHDGGLDPTKNKTPMSRKETRGIARRTMRMTRRRKQRLRDLDKVLEKLGYTVPEGPEPETYEAWTSRALLASIKLASADELNEHLVRAVRHMARHRGWANPWWSLDQLEKASQEPSETFEIILARARELFGEKVPANPTLGMLGALAANNEVLLRPRAEKKRKTGYVRGTPLMDAQVRQGDQLAELRRICEVQGIEDHYEVLRMAVFYHKPPYVPKDRVGKDPLNPDEIRASRASLEFQEFRILDSVANLRVRTGSRTKRKLSESEYDTAVDFLMSYTGKEQPSWADVAEEIGVPGNRLIAPVLEEVQQKTAPFDRSSAAFEKAMKAKTEARKWWESNDDDQLRSLFIMFLADATDDTTAAAEQAGLYDLFASWPEEERETLSNIAFESGRAGYSATTLSKLSEYMHEYRVGLHEARKAVFGVDDTWRPPLDKLEEPTGQPAVDRVLTILRRFVLDCERQWGRPHAITVEHARTGLMGPTQRQKILNEQKKNRADNERIRGELRESGVDNPSRAEVRRHLIVQEQECQCLYCGTMITTTTSELDHIVSRAGGGSSRRENLAAVCRRCNGKKNRELFYRWAGPVRLQETIDRVRQLKAFKDPKKAKMFKNQIRRLKQTEADEPIDERSLASTSYAAVAVRERLEQHFNEGLAPDDKSRVVLDVYAGSVTRESRRAGDIDERILLRGERDKNRFDVRHHAIDAAVMTLLNRSVALTLEQRSQLRRAFYEQGLDKLDRDQLKPEEDWRDFIGLYPASQEKFLEWRKAATVLGDLLAEAIEDDSIAVVSPLRLRPQNGAVHKDTIAAVQKQTLGSAWSADAVKRIVDPEIYLAMKDALGKLKKLPEDSARTLELPDGRFAEADDEVLFFPKNAASILTPRGVAEIGESIHHARLYGWLTKKGELKVGMLRVYGAEFPWLMRESGSRNVLSMPIHRGSQSFRDMQDTTRKAVESGEAVEFAWITQNDELEFDPDDYIAHGGKDELRQFLEFMPERRWRVDGFKKNYQIRIRPAMLSREQLPSDIQRRLESKTLTEDESLLLKALDTGLVVAIGGLLPLETLKVIRRNNLGFPRWRGNGSLPTSFEVRSSALRALGAEG

SEQ ID NO: 7936 - protein, 1134 aa, synthetic construct
  REGION 1..1134: note = Synthetic
MSTDPKNYRIGVDVGDRSVGLAAIEFDDAGFPIQKLALVTFRHDGGLDPTKNKTPVSRKKTRGDARRTMRMNRRRKQRLRDLDMMLTNLGYTVPEGPEPETYEAWTSRALLASIKLANVDELNEHLVRAVRHMARHRGWANPWWSIDRLENASREPSETFEIILARARELFGEKVPADPTLGMLGALAANNEVLLRPRDGKKKKTGYVRGTPLLVAKVRQEDQLAELRRICEIQGIEGQYDALRSAIFTHKMAYVPTERVGKDPLNPSKNRTIRASLEFQEFRILDSVANLRVRTDSRSKRELTEAEYDVAVEFLMSYTANEQPSWADVAEVIGVPGNRLIAPVLEDVQQKTAPFDRSSAAFEKAMGKKTEARQWWESTDDDQLRSLFISFLVDATDDTEEAAAEAGLPELYMSWPAEEREVLSDIDFEKGRVAYSQETLSKLSEYMHEYRVGLHEARKAVFGVDDTWRPPLDKLDEQTGQPTVDRVLTILRRFVLDCERQWGRPRAITVEHARTGLVGPAQRQEILNEQKKNRENNELIRGDLRKSGVENPSRAEVRRHLIVQEQESQCLYCGAVIRTDTSELDHIVPRAGGGSSRRENMAAVCHYCNSKKKRTLFYDWAGPVKLQETVDRVRQLEAFKDSKKAKMFKNQIRRLKQTEADVPIDERSLASTSYAAVAVRERLEQHFNEGLAPDDKSRVVLDVYAGAVTRESRRAGGIDERILLRGERDKNRFDVRHHAIDAAVMTLLNRSVALTLEQRSQLRRAFYELELDKLDRDQLKPGEDWRNFTGLYEASQNKFSEWKKAATVLGDLLAEAIEDDAIAVASPLRLRPQNGSVHDDTINAVKKLTLGSAWPADAVKRIVDPEIYLAMKDVLGKLKELPEDSARSLELSDGRYIEADDEVLFFPKKAASILTPRGAAEIGNSIHHARLYSWLTKKSELKFGMLRVYGAEFPWLMRESGSRDVLHMPIHPGSQSFRGMQDGVRKAVESGEAVEFGWITQDDELEFDPEDYIAHGGDDELNRLLRVMPERRWRVDGFYNAGTLRIRPALLSAEQLPSELQKKVADKTLSDVEVILLRAVQRGLFVAISGFLPLESLKVIRRNNLGFPRWRGNGNLPTSFEVRSSALRALGVEG

SEQ ID NO: 7937 - protein, 1133 aa, synthetic construct
  REGION 1..1133: note = Synthetic
MSTDMKNYRIGVDVGDRSVGLAAIEFDDAGFPIQKLALVTFRHDGGLDPTDNPKSRKETRGEARRRMRMTRRRKQRLCDLDKVLENLGYTVPEGPEPETYEAWTSRALLASIKLASADELNEHLVRAVRHMARHRGWANPWWSLDQLERASQEPSETFEIILARARELFGEKVPANPTLGMLGALAANNEVLLRPRAEKKKKTGYVRGTPLLAAQVRQIDQVAELRRICEVQDIEEQYETLRNAIFAHKVAYVPTERVGKDPLAPSKNRTIRASLEFQEFRILDSVANLRVRTDSRAKRELTEGEYDAAVEFLMGYTAKEQPSWADVAEEIGVPGNRLIAPVLEDVQQKTAPFDRSSAAFEKAMSKKTEARQWWESNDDDQLRSLFIMFLADATNDTEEAAAVAGLPELYMSWPAEEREALSNIDFEKGRVAYSHETLSKLSEYMHEYRVGLHEARKAVFGVDDTWRPPLAKLEEPTSQPTVDRVLTILRRFVLDCERQWGRPQAITVEHARIGLMGPVQRQKILNEQKKNRGENERIRNELRESGVENPNRAEVRRHLIVQEQECQCLYCGTMITTTTSELDHIVPRAGGGSSRRENLAAVCRYCNGKKNRKLFYEWAGPVKMQETIDRVRQLRAFKDSKKAKMFKNQIRRLKQTEADEPIDERSLASTSYAAVAVRERLEQHFNEGLTLDDKSRVVLDVYAGAVTRESRRAGGIDERILLRGERDKNRFDVRHHAVDAAVMTLLNRSVALTLEQRSQLRRAFYEQGLDKLDRDQLKPEEDWRDFIGLYPASKEKFLEWKKTATVLGDVLAEAIEEDSIAVVSPLRLRPQNGSVHKETIAAVKKQTLGSSWSADAVKRIVDPEIYLAMKDALGKLKELPEDSARSLELSDGRYIEADDEVLFFPENAASILTPRGVAEIGGSIHHARLYSWLTKKGDLKVNVLRVYGAEFPWLMRESGSSDVLRMPIHPGSQSFRDVQEETIEMIEGGFAKEIAWITQNDELEFDPVEYINLPGRSDKLTRFLIYMPETRWRVDGFPESRNLRIRPLMLSQEDLPSEIKKHKEEKQLSDEEKLLVEALEKGLIITSSKLLGLKSIKVIRRNNLGFPRWRGNGNLPTSFEVRSSALRALGVEG

SEQ ID NO: 7938 - protein, 1132 aa, synthetic construct
  REGION 1..1132: note = Synthetic
MSADSLNYRIGVDVGDRSVGLAAIEFDDDGFPLKKLAMVTFRHDGGMDPATGKTPKSRKETAGVARRTMRMRRRKKKRLKDLDKKLRDLGYFVPRDEEPQTYEAWSSRARLAESRFEDPHERGEHLVRAVRHMARHRGWRNPWWSFSQLEEASQEPSETFGRILERAQHEWGERVSDNATLGMLGALAANNNILLRPRRYEHNPKTGKNAEKLNVRGQEPILLDKVRQEDVLAELRRICKVQGIEDQYPELAHAVFTQVRPYVPTERVGKDPLQPMKIRASRASLEFQEFRIRDTVANLRIRVGGSERRPLTEEEYDRAVDYLMEYSDTTPPTWGEVADELEIAENTLIAPVIDDVRLNVAPYDRSSAIVEAKLKRKTQARQWWDDDANLDLRSQLILLVSDATDDTARVAENSGLLEVFESWSDEEKQTLQDLKFDSGRAAYSIDTLNKLNAYMHEHRVGLHEARQNVFGVSDTWRPPRDRLDEPTGQPTVDRVLTIVRRFILDCERAWGRPQKIVVEHARTGLMGPSQRADVLKEIARNRNANERIRQELREGGIEAPNRADIRRNSIIQDQESQCLYCGKEIGVLTAELDHIVPRAGGGSSKRENLAAVCRACNASKGSRPFAVWAGPARLERTIQRLRELQAFKTKSKRRTLNAIIRRLKQREEDEPIDERSLASTSYAATSIRERLEQHFNDDLPDGFAPVAVDVYGGSLTRESRRAGGIDKSIMLRGQRDKNRFDVRHHAIDAAVMTLLNPSVAVTLEQRRMLKQENDYSSPRGQHDNGWRDFIGRGEASQSKFLHWKKTAVVLADLISEAVEQDTIPVVNPLRLRPQNGSVHKDTVEAVLERTVGDSWTDKQVSRIVDPNTYIAFLSLLGKKKELEADHQRLVSVSAGVKLLADERVQIFPEEAASILTPRGVVKIGDSIHHARLYGWKNQRGYIQVGMLRVFGAEFPWFMRESGVKDILRVPIPQGSQSYRDLAATTRKFIENGQATEFGWITQNDEIEISAEEYLATDKGDILSDFLTVLPENRWKVVGIGDNRRFKIRPLLLSNEIIPDTLNGRSIKSEERDLIVSVLDKGVRVVASTLLTLPSTKIIRRNNLGIPRWRGNSHLPTSLDIQRAATQALEGRD

SEQ ID NO: 7939 - protein, 1131 aa, synthetic construct
  REGION 1..1131: note = Synthetic
MSEHTKYRIGIDVGDRSVGLAAIEFDDDGFPLSNLVMVTYRHDGGLDPTTNKSPKSRKETRGVALRTMRMRRRKKSRLKDLDKTLRALGYVVPACEEPQTYEAWKSRALLATTKVEGAQELGEHLVRAVRHMARHRGWRNPWWTLNQLEIASTAPSDTFAKIRERAEKEWPGMVPEEATLGMIGALAASNNVLLRPRTYRKDQPRHSKKLNVLGQEPILVDKVRQEDLLAELRTICKRQNIEDQYEKLAQAVFEQTRPYVPLDRVGKDPLQPNKSRASRASLEFQRFRILDAVAHLRVRVGVSDRRALTDEEHDKAVHFLMGYSKKDVPTWGDVADEIGVEPAHLIAPVIDDVRLNKAPYDRSSTEFEQKMKKKTRARQWWDEANLESRSQLILLVSDPTDETTRLAEVSGLYEVFESWPDEEKEALEGLKVESGRAAYSTDTLNKLSDHMRLKRIDLHEARKIAFGVDDMWHPPLDRIDEPTGQPTVDRVLTIVRRFIFDCERAWGRPENVVIEHARTGLMGPAQRADVLHEIAKNRKKNDKIREDLRAGGINNPTRADIRRNAIVQDQESQCLYCGATIGVSYSELDHIVPRAGGGSSRRENLAAVCRACNDSKKDTPFAVWAKNTSRPVTLEGTTQRLRELKAFKRPKDRRMLDLIIRRLKQTEKDDPIDERSLASTSYAATAIRERIEQYFNEKAEKLDLAKVHIDVYSGSLTRESRRAGGIDKMVLLRGQSDKNRFDVRHHAIDAAVLTLLNRSVAVTLEQRRLIKQQREYSLEKSRRERDNVWRDFMGLGPAAQEKFAKWKKTAYVLADIIKEAISNDAIPVVSPLRLRPQNGSVHLDTVDAVLERTIGDAWTVDQVHRIVNPQIYLAFAGYLGNQKALEPDPSRVLALNDGRKLTAEDVIYVFPEKAASILTPRGVVKIGESVHHVRLYAWKNRKGKAEVGMLRVFGAEFPWLMRESGVKDVLRVPIHTGSQSYRDLSFTVRKNIEKGEAVEIGWLTQNEELEFNPESYLQEGGKDKLAKFLAFLPETRWRVDGFPMPDKLRIRPALLSREEIPEGVFGTEEQSLLEEALTKGLIIATKGLLSLPDVKVLRRNNLGIPRWRGGSYRPVSLDIQRAALAALDEQE

SEQ ID NO: 7940 - protein, 1125 aa, synthetic construct
  REGION 1..1125: note = Synthetic
MKYRIGIDVGDRSVGLAAIEFDDVGFPIQKLALVTYRHDGGLDPTTGKNPQSRKATAGVARRTRRMRKQRRKRLNKLDSVLKHLGYPVPDQEEPQTYEAWHSRALLTGKKLENEAELQEHLVRAIRHIARHRGWRNPWWRFHQLQNAPVPSPSMLKMIEAADERWPGRVPHDATVGELGALVAEPSTLLRPRTYDAKKHPNTLNNKGESAVLSEKVRQEDLYAEVKKIWARQHLPEDHFLPIVEALFNQVRPYVPQENVGKDPLPGQTKKNRAVKSSLEFTEFRIVQAVANLTVIDRGGKRLLKDDEFDKAVHYLVNFSEEAAPTWGDVAEEIGVPANRLITPEIDGVKLNSAPFDRSSQKILNSKLRKNSEVLKWWDTADWEQRSELIRFLSDATDETIISAEQSGLSDIYEAWPENEREILEGLDFEPGRAAYSTDSLIKLTAYMREHHVGLHEARKEVFNVPDTWQPPRESLDSNTGQPTVDRVLSIVRKFVLACERKWGAPEKIIVEHVRTGLMGPAARYEILREIAKNRNNNDRVRQELIDGGFSAPTRADIRRYRIVQNQDCRCLYCGTTVTVETAELDHIVPRAGGGSSRVDNLVAVCRTCNSEKGKIPFAQWANSSKRSGVSVEEAVERLWSFDKVGVFKGVSGKRLKQQIARRLRQTEEDEPIDERSLASTSYAAVELRQRLETYFNKGKAYGEESWFSVDVYSGSMTRGSRRAGGIDERLLLRGQRDKNRFDVRHHAIDAAVLTLLNRSVARTLEQRKLMQEEARLGSRDTGWKDFQGLGITAVQKFKEWRKTCLVLSDILAEAIEADQIPVITPLRLTPKNGSVHKDTISAMGRKFLGEAWSKDEIQRVQDPELYLLLLDELGKARGLEADEERSCTLPTGSQLSADSEVLVFPEKAASILVGTGAAKIGDSLHHARLYAWKDKKGKLNIGMLRVFGAELPWLMRISGNKDALTAPIHRGAQSYRDMQDKTRKAIEAGLAQEIGWITQGDEIEISPEEFSKLGGELGEFLKILPETRWRIDGFYDAGRLRVRPILLSQEDLPNTVYAQELSKEQFSLLELALTRGLLPSLSNVFEQNSTKVIRRNSLGIPRWKSNGFLPVSLDIARVANEKLGE

SEQ ID NO: 7941 - protein, 1134 aa, synthetic construct
  REGION 1..1134: note = Synthetic
MSTDMKNYRIGVDVGDRSVGLAAIEFDDAGLPIKKLALVTFRHDGGLDPTKNKTPMSRKETRGVARRTMRMTRRRKQRLRDLDKVLEKLGYTVPEGPEPETYEAWTSRALLASIKLASADELNEHLVRAVRHMARHRGWANPWWSLDQLEKASQEPSETFEIILARARELFGEKVPANPTLGMLGALAANNEVLLRPRDEKKRKTGYVRGTPLMVAQVRQGDQLAELRRICEVQGIEDQYEALRLGVFHHKHPYVPKERVGKDPLNPSTNRTIRASLEFQEFRILDSVANLRVRTGSRAKRELTEAEYDAAVEFLMNYTDKEQPSWADVAEKIGVPGNRLVAPVLEDIQQKTAPFDRSSAAFEKAMGKKTEARQWWESTDDDQLRSLLIAFLVDATNDTEEAAAEAGLSELYKSWPAEEREALSNIDFEKGRVAYSQETLSKLSEYMHEYRVGLHEARKAVFGVDDTWRPPLDKLEEPTGQPAVDRVLTILRRFVLDCERQWGRPRAITVEHARTGLMGPTQRQKILNEQKKNRADNERIRGELRESGVDNPSRAEVRRHLIVQEQECQCLYCGTMITTTTSELDHIVPRAGGGSSRRENLAAVCRDCNAKKKRKLFYAWAGPVKSQETIERVRQLKAFKDPKKAKMFKNQIRRLRQTEADEPIDERSLASTSYAAVAVRERLEQHFNEGLAPDDESRVVLDVYAGSVTRESRRAGGIDERILLRGERDKNRFDVRHHAVDAAVMTLLNRSVALTLEQRSQLRRTFYEQGLDKLDRDQLHPGEDWRNFTGLYPASQKKFLEWKDAATALGNVLAEAIEDDSIAVVSPLRLRPQNGSVHDETIDPVKKLTLGSAWSADDVKRIVDPEIYLAMKDALGKLKKLPEDSARSLELSDGRFVEADDEVLFFSKKAASILTPRGAAEIGASIHHARLYSWLTKKGELKVGMLRVYGAEFPWLMRESGSRNVLSMPIHRGSQSFRDMQDTTRKAVESGEAVEFAWITQNDELEFDPADYITNGGKDELKQFLEFMPERRWRVDGFKDSGRLRMRPALLSREQLPSEIQARLDTKSLSKGETVLVKALDDGLYISIGGLLPLESMKVIRRNNLGFPRWRGNGNLPTSFEVRSSALRALGVEG

SEQ ID NO: 7942 - protein, 1130 aa, synthetic construct
  REGION 1..1130: note = Synthetic
MKNYGIGIDVGYRSVGCAAIEFDDDGFPIKTLSLVSFRHDGGLDMKGDKPKIRKATRGVARRRMSMNRRRKRRLRNLDKVLSNLGYTVPEDSGSETYEAWTSRALLASIKLASADELNEHLVRAVRHMARHRGWANPWWSLDQLEKASQEPSETFKIILARARELFGEKVPVNPTLGMLGALAANNEVLLRPRRSYKAEEANNPKKAEKYLADYGTQPLMAAKVCQEDQLAELRRICEVQGIEAQYENLREAVFTHVRPYVPKDRVGKDPLNPSEIRASRASLEFQEFRILDSVANLRVRTDSRTKRELSESEYDAAVDFLMSYTGKEQLSWADVAEEIGVPGNRLIAPVLEDVQQKTAPFDRSSAAFEKAMKAKTEARKWWESNDDDQLRSLFIMFLADATDDTAEAAVEAGLHELFASWPEEEREVLSNISFESGRAAYSAKTLSKLSEYMHEHRVGVHEARKAVFGVDDTWRPPLAKLEEPIGHPTVDRVLTILRRFVLDCERQWGRPHAITVEHARTGLVSPAVRRKILKEQEDNRKNNERIRGELRKSGVENPSRTEVRRHLVVHDQESQCLYCGAVIRTDTSELDHIVPRAGGGSSRRENLAAVCRYCNAMKSNTPFYRWASPEKLKETIDRVHQLKAFKDPKKAKMLKNQIRRLKQSEADDPIDERSLASTSYAAVAVRERLEQHFNEGLAPDDKSRVALDVYTGAVTRESRRAGGIDERILLRGEHDKNRFDVRHHAIDAAVMTLLNRSVALTLEQRHQLKREFNETKRENGWRDFIGLYPASKEKFLKWKKAATVLGDLLAEAIEDDSIAVVSPLRLRPQNGAVHDETIHAVKKQTLGSAWSAEAVKRIVDPEIYLEMKDALGKLKELPEDSARTLELPDGRFVEADDEVLFFPKKAASILTPRGAAEIGDSIHHARLYGWMTKEGELKFGMLRVYGAEFPWLMRESGSRDILHMPIHRGSQSFRGMQVGVREAVESGEAVEFGWITQDDELEFDPEDYIAHGGDDELNRLLRVMPERRWRVDGFYNAGTLRIRPALLSAEQLPSELQKKVASKTLSDVELILLRAVQRGLFVATSGFLPLESLKVIRRNNLGFPRWRGNGSLPTSFEVRSSALRALGVEG

SEQ ID NO: 7943 - protein, 1145 aa, synthetic construct
  REGION 1..1145: note = Synthetic
MSTDMKNYRIGVDVGDRSVGLAAIEFDDAGLPIKKLALVTFRHDGGLDPTKNKTPMSRKETRGIARRTMRMNRRRKQRLRDLDKVLEKLGYTVPEGPEPETYEAWTSRALLASIKLASADELNEHLVRAVRHMARHRGWANPWWSLDQLEKASQEPSETFEIILARARELFGEKVPVNPTLGMLGALAANNEVLMRPRRNYNAKEANNPKKAGKYLADYGTQPLMAAKVRQEDQLAELRRICEVQGIEDQYEALREAVFTHVRPYVPKDRVGKDPLSPSEIRASRASLEFQEFRILDSVANLRVRTDSHSKRELSESEYDTAVDFLMSYTGKEQPSWADVAEEIGVPGNRLIAPVLEDVQQKTAPFDRSSAAFEKAMNKKTEARQWWESNDDDQLRSLFIMFLADATDDTAEAAVEAGLYELFESWSEEEREALSNIAFESGRAGYSATTLSKLSEYMHEHRVGLHEARKAVFGVDDTWRPPLAKLEEQTGQPTVDRVLTILRRFVLDCERQWGRPQAITVEHARTGLMGPAQRQDILREQKKNREENERIRNELRESGVENPKRVDVRRHLVIQEQECQCLYCGTMITTTTSELDHIVPRAGGGSSRRENLAAVCSYCNGKKSNTPFYRWASPERFKETIDRVRQLKAFKDPKKAKMFKNQIRRLKQTEADEPIDERSLASTSYAAVAVRERLEQHFNEGLAPDDKSRVVLDVYAGSVTRESRRAGGIDERILLRGEHDKNRFDVRHHAIDAAVMTLLNRSVALTLEQRSQLRRAFYERGLDKRDRDQLKPEEDWRNFTGQYKASQRKFSEWKKAATKLGDLLAGAIEDDSIAVVSPLRLRPQNGAVHKDTIAAVKKQALGSAWPADAVKRIVDPEIYLAMKDALGKLKELPEDSARSLELPDGRYIEADDEVLFFPKNGASILTPRGVAEIGESIHHVRLYSWLTKKGELKFGMLRVYGAEFPWLMRESGSRDVLRMPIHPGSQSFRGMQDGVRKAVESGEAVEFAWITQNDELEFDPEDYIAHGGNDELNRLLRVMPERHWRVDGFYNAGTLRIRPALLSAEQLPSELQKKVDSKTLSDDEAVLLKAVERGLFVAISSFLPLESLKVIRRNNLGFPRWRGNGNLPTSFEVRSSALRALGVEG

SEQ ID NO: 7944 - protein, 1132 aa, synthetic construct
  REGION 1..1132: note = Synthetic
MTQEATKYRIGIDVGDRSVGLAAFEFDDAGFPLRKLAMVTYRHDGGLDPTQNKSPKSRKETAGVARRVRRLRKRRKERLKKLDLKLLELGYPLPEGEEAQTYQAWKSRALLTSQKIEDKAEQADHLVRALRHMARHRGWRNPWWQFGQLDSAPVPSETMVENLNHARLLWPGYITDQTTVGELGSLAASPDILLRPRTRDIKKKPNGLHHQEGVRAVLGSKVRQEDLLAEVKKIWQVQGLPVSHYEELARALFEQVRPYVPAQNVGRDPLPGRHHLPRAPRASLEFTEFRIRQAVANLRVREGREKVPLTSGQHIAAVNYLMNYADKQPPTWGDVAEQIGVEPTRLVAPVIDDVRLNKAPYNHSTSVFTRALPKKSEAMQWWNSADVSLRSLLIIFLSDPTEEATAAADESGLSAIFESWPEKEREKLEGLDFESGRAAYSIQSLNDLNQYMEEHQSDLHTARKEVFGVDDSWQPPRENLHEPTGQPAVDRVLTIVRRFVMACERKWGKPDRIVIEHARTALMGPTQRHEVLREIQRNRDANERIREELRADGITSPTRADVRRHRVVQNQDCKCLYCGTMITTATAELDHIVPRAGGGSSKIDNLVAVCRGCNADKGRKTFAVWAEQTSREGVSLDDVLNRLWSFDKVVYKGVAGRKLKAQIARRLRQTEEDEPIDEQSLESTAYSAVAIRHRLETYFNTSRGLVRGDDDFTFIDVYAGALTREARRAGGIDEQILLRGQRDKNRFDVRHHAVDAAVMTVLDLSVARTLAQRNLIYREDRLKRRENQDDTRWREFTGLGGEAQEKFLVWKQKSYVLADLLAEAIAEDSIPVINPLRLTPRNGSVHKDTLSSLDMMYLGGSWSSKEIARVVDPDIYLGLLDLLGRSKTLEEDPQRSLTVEGKVLQADQEIKLFPEAAASILAGTGAVKIGDSLHHARLYTWPTKKGTEIGMLRVFGAEFPWLFRTYGTKNALTVPIHPGSQSYRDMKDTLRKKIESGEAREIGWITQGDEIEIKIESYLQENDELGRFINLIPENRWRVDGFYDNRRLRLRPILLSYEEIPESYSEEALGLENYQLIRKVLEKGAFVTVGKILGAEGTKVLRRNYLGAPVWRGQQEARSLDISRAIVEKLEG

SEQ ID NO: 7945 - protein, 1146 aa, synthetic construct
  REGION 1..1146: note = Synthetic
MSTDMKNYRIGVDVGDRSVGLAAIEFDDAGLPIKKLALVTFRHDGGLDPTKNKTPMSRKETRGIARRTMRMTRRRKQRLRDLDKVLEKLGYTVPEGPEPETYEAWTSRALLASIKLASADELNEHLVRAVRHMARHRGWANPWWSLDQLEKASQEPSETFEIILARARDLFGEKVPANPTLGMLGALAANNEVLLRPRRNYKAKEANNPKKAEKYLADYGTQPLMAAKVRQEDQLAELRRICEVQGIEDQYEALREAVFTHVRPYVPKDRVGKDPLNPDEIRASRASLEFQEFRILDSVANLRVRTDSRTRRELSESEYDTAVDFLMSYTGKEQPSWADVAEEIGVPGNRLIAPVLEDVQQKTAPFDRSSAAFEKAMKAKTEARKWWESNDDDQLRSLFIMFLADATDDTTAAAEQAGLYDLFASWPEEERETLSNIAFESGRAGYSATTLSKLSEYMHEHRVGLHEARKAVFGVDDTWRPPLAKLEEQTGQPTVDRVLTILRRFVLDCERQWGRPQAITVEHARTGLMGPAQRQDILREQKKNREENERIRNELRESGVENPKRVDVRRHLIVQEQECQCLYCGTMITTTTSELDHIVPRAGGGSSRRENLAAVCSYCNGQKNNTPFYRWASPERFKETIDRVRQLKAFKDPKKAKMFKNQIRRLKQTEADEPIDERSLASTSYAAVAVRERLEQHFNEGLAPDDKSRVVLDVYAGSVTRESRRAGDIDERILLRGERDKNRFDVRHHAVDAAVMTLLNRSVALTLEQRSQLRRAFYEQGLDKLDRDQLKPEEDWRDFTGLYPASQEKFLEWKNAATELGDLLAEAIEEDSIAVVSPLRLRPQNGSVHLETISAVKKQTLGSVWSADAVKRIVDPEIYLAMKEALGKLKELPEDSARTLELPDGRCIEADDEVLFFPENAASILTPRGVAEIGGSIHHARLYGWLTKKGELKVGMLRVYGAEFPWLMRESGSRNVLSMPIHRGSQSFRSMQEETIEMIEGGFAEEIAWITQNDELEFDPVEYINLSGRSDKLTRFLTYMPETRWRVDGFPESRNIRIRPLMLSQEDLPSDVKKHKDDRQLSVEEKLLVEALETGLIITSNKILGLKSIKILRRNNLGFPRWRGNGSLPTSFEVRSSALRALGVEG

SEQ ID NO: 7946 - protein, 1135 aa, synthetic construct
  REGION 1..1135: note = Synthetic
MSTDMKNYRIGVDVGDRSVGLAAIEFDDAGFPIQKLALVTFRHDGGLDPTENKSPKSRKETRGVARRTMRMNRRRKQRLRDLDTVLENLGYTVPEGPEPETYEAWTSRALLASIKLASADELNEHLVRAVRHMARHRGWANPWWSLDQLEKASQELSETFEIILARARELFGEKVPANPTLGMLGALAANNEVLLRPRRSYNAKEANNPKKAEKYLADYGTQPLMAAKVRQEDQLAELRRICEVQGIEDQYEALREAVFTHVRPYVPKDRVGKDPLNPAEIRASRASLEFQEFRILDSVANLRVRTDSRTKRELSESEYDTAVDFLMSYTGKEQPSWADVAEEIGVPGNRLIAPVLEDVQQKTAPFDRSSAAFEKAMKTKTEARKWWESNDDDQLRSLFIMFLADATDDTTAAAEQAGLYDLFASWPEEEREALSNIAFEAGRAGYSATTLSKLSEYMHEHRVGLHEARKAVFGVDDTWRPPLAKLEEQTGQPTVDRVLTILRRFVLDCERQWGRPQAITVEHARTGLMGPAQRQDILREQKKNREENERIRNELRESGVENPKRVDVRRHLIVQEQECQCLYCGTMITTTTSELDHIVPRAGGGSSRRENLAAVCRYCNAMKSNTPFYRWASPEKLKETIDRVRQLKAFKDPKKAKMLKNQIRRLKQTEADDPIDERSLASTSYAAVAVRERLEQHFNEGLAPDDKSRVALDVYAGAVTRESRRAGGIDERILLRGEHDKNRFDVRHHAIDAAVMTLLNRSVALTLEQRHQLKREFNETKRENGWRDFTGLYPASKEKFLEWRKAATVLGDLLTEAIEDDSIAVVSPLRLRPQNGAVHKDTIAAVKKQTLGSAWSADAVKRIVDPEIYLAMKDALGKLKELPEDSARSLELPDGRFAEADDEVLFFPKNAASILTPRGVAEIGESIHHARLYGWLTKKGELKVGMLRVYGAEFPWLMRESGSRNVLSMPIHRGSQSFRDMQDTTRKAVESGEAVEFAWITQNDELEFDPDDYIAHGGKDELRQFLEFMPERRWRVDGFKKNYQIRIRPAMLSREQLPSDIQRRLESKTLTEDESLLLKALDTGLVVAIGGLLPLETLKVIRRNNLGFPRWRGNGSLPTSFEVRSSALRALGAEG

SEQ ID NO: 7947 - protein, 1132 aa, synthetic construct
  REGION 1..1132: note = Synthetic
MSTDMKNYRIGVDVGDRSVGLAAIEFDDAGFPIQKLALVTFRHDGGLDPTDNPKSRKETRGEARRRMRMTRRRKQRLRDLDKVLENLGYTVPEGPEPETYEAWTSRALLASIKLASADELNEHLVRAVRHIARHRGWVNPWWSLDQLERASQEPSETFEIILARARELFGERVPANPTLGMLGALAANNEVLLRPRAEKKKKTGYVRGTPLLAAQVRQIDQVAELRRICEVQGIEEQYETLRNAIFAHKVAYVPTERVGKDPLAPSKNRTIRASLEFQEFRILDSVANLRVRTDSRAKRELTEGEYDAAVEFLMGYTAKEQPSWADVAEEIGVPGNRLIAPVLEDVQQKTAPFDRSSAAFEKAMSKRTEARQWWEANDDDQLRSLFIMFLADATNDTEEAAAVAGLPELYMSWPAEEREALSNIDFEKGRVAYSHETLSKLSEYMHEHRVGLHEARKAVFGVDDTWRPPLAKLEEPTGQPTVDRVLTILRRFVLDCERQWGRPRAITVEHARIGLVGPAQRQNILKEQEDNRKNNECIRDELRKSGVENPSRTEVRRHLVVQDQESQCLYCGAVIRTDTSELDHIVPRAGGGSSRRENLAAVCRYCNSKKDRTLFYDWAGSVRLQETIDRVRQLKAFKDSKKAKMFKNQIRRLRQTEADEPIDERSLASTSYAAVAVRERLEQHFNEGLAPDDKNRVVLDVYAGSVTRESRRAGGIDERILLRGERDKNRFDVRHHAIDAAVMTLLNRSVALTLEQRSQLRRAFYEQGLDKLDRDQLKPEEDWRNFIGLSLASQEKFLEWKKVTTVLGDLLAEAIEDDSIAVVSPLRLRPQNGRVHKDTIAAVKKQTLGSAWSADAVKRIVDPEIYLAMKDALGKSKVLPEDSARTLELSDGRYLEADDEVLFFPKNAASILTPRGVAEIGGSIHHARLYSWLTKKGELKIGMLRVYGAEFPWLMRESGSHDVLRMPIHPGSQSFRDMQDTTRKAVESSEAVEFAWITQNDELEFEPEDYIAHGGKDELRQFLEFMPECRWRVDGFKKNYQIRIRPAMLSREQLPSDIQRRLESKTLTENESLLLKALDTGLVVAIGGLLPLGTLKVIRRNNLGFPRWRGNGNLPTSFEVRSSALRALGVEG

SEQ ID NO: 7948 - protein, 1140 aa, synthetic construct
  REGION 1..1140: note = Synthetic
MKNYGIGIDVGYRSVGCAAIEFDDDGFPIKTLSLVSFRHDGGLDMKGEKPKIRKATRGVARRTMRMNRRRKRRLRNLDKVLSNLGYTVPENPGPETYEAWTSRALLASIKLASADELNEHLVRVVRHMARHRGWANPWWSLDQLEKASQEPSETFEIILARARELFDEKVPANPTLGMLGALAANNEVLLRPRRSYKAKEANNPKKAEKYLADYGTQPLMAAKVRQEDQLAELRRICEVQGIEDQYEALREAVFTHVRPYVPKDRVGKDPLNPSEIRASRASLEFQEFRILDAVANLRVRTDSRSKRELSEGEYDAAVDFLMSYTGMEQPSWADVAEEIGVPGNRLIAPVLEDVQQKTAPFDRSSAAFEKAMKAKTEARKWWESNDDDQLRSLFIMFLADATDDTAEAAVEAGLYELFASWPEEERKELSNISFESGRAAYSAETLSKLSEYMHEHRVGVHEARKAVFGVDDTWRPPLAKLEEPIDHPTVDRVLTILRRFVLDCERQWGRPRAITVEHARTGLVSPAVRQKILREQEKNREENERIRGELRKSGVENPSRTEVRRHLVVQDQESQCLYCGAVIRTDTSELDHIVPRAGGGSSRRENLAAVCRYCNAMKSNTPFYRWASPEKLKETIDRVRQLKAFKDPKKAKMLKNQIRRLKQTEADDPIDERSLASTSYAAVAVRERLEQHFNEGLAPDDKSRVALDVYAGAVTRESRRAGGIDERILLRGEHDKNRFDVRHHAIDAAVMTLLNRSVALTLEQRSQLRRAFYEQGLDKLDCDQLKPEEDWRSFTGLYEASKEKFLKWKKAATVLGNLLAEAIEDDSIAVVSPLRLRPQNGAVHDETIHAVKKLTLGSAWSADAVKRIVDPEIYLVMKDALGKLKELPEDSARSLELSDGRFVEADDEVLLFPAKAASILTPRGAAEIGGSIHHARLYGWMTKKGELKFGMLRVYGAEFPWLMRESGSRDILHMPIHPGSQSFRDMRDSTCEAVESGGAVEFAWITQNDELEFEPADYIAHMRQNALRKFLEFMPENRWRIDGFNDAGRLKIRPALLSWEQLPYEIQVKVKTGTLNEAEKNLIKIVKDGTLVSIGDFFQLETLKVIRRNNLGFPRWRGNGSLPTSFEVRSSALRALGVEG

SEQ ID NO: 7949 - protein, 819 aa, synthetic construct
  REGION 1..819: note = Synthetic
MNYTDKEQPSWADVAEKIGVPGNRLVAPVLEDIQQKTAPFDRSSAAFEKAMGKKTEARQWWESTDDDQLRSLLIAFLVDATNDTEEAAAEAGLSELYKSWPAEEREALSNIDFEKGRVAYSQETLSKLSEYMHEYRVGLHEARKAVFGVDDTWRPPLDKLEEPTGQPAVDRVLTILRRFVLDCERQWGRPRAITVEHARTGLMGPTQRQKILNEQKKNRADNERIRGELRESGVDNPSRAEVRRHLIVQEQECQCLYCGTMITTTTSELDHIVPRAGGGSSRRENLAAVCRDCNAKKKRKLFYAWAGPVKSQETIERVRQLKAFKDPKKAKMFKNQIRRLRQTEADEPIDERSLASTSYAAVAVRERLEQHFNEGLAPDDESRVVLDVYAGSVTRESRRAGGIDERILLRGERDKNRFDVRHHAVDAAVMTLLNRSVALTLEQRSQLRRTFYEQGLDKLDRDQLHPGEDWRNFTGLYPASQKKFLEWKDAATALGNVLAEAIEDDSIAVVSPLRLRPQNGSVHDETIDPVKKLTLGSAWSADDVKRIVDPEIYLAMKDALGKLKKLPEDSARSLELSDGRFVEADDEVLFFSKKAASILTPRGAAEIGASIHHARLYSWLTKKGELKVGMLRVYGAEFPWLMRESGSRNVLSMPIHRGSQSFRDMQDTTRKAVESGEAVEFAWITQNDELEFDPADYITNGGKDELKQFLEFMPERRWRVDGFKDSGRLRMRPALLSREQLPSEIQARLDTKSLSKGETVLVKALDDGLYISIGGLLPLESMKVIRRNNLGFPRWRGNGNLPTSFEVRSSALRALGVEG

SEQ ID NO: 7950 - protein, 1124 aa, synthetic construct
  REGION 1..1124: note = Synthetic
VSRTISECGGLARISESVRRRPVDLGQRGVLLAHRKHGICLCQTVPAICKAACRLGSGGLMGIHVGLDIGIASVGWAVLDPEAERIEGLGVRTFPRAENPKNGASLALPRRLARSSRRRLRRRRNRMQDFRGLLVSTGMISADDMDAAFTPTAGDPTPYQLRAEGLDRKLTEVEWARVLSQICKRRGYRSMKMAAESASSKDEDGVVKAAIALNEAHMIEHHYRTAGEMLWLDERFQESRRNKGDYKAVLSRELVLDEVAHLFEAQRIHGNSHATPAIEAAYLEILQRQATILEGDELRARVGLCSIDHVNRRIPIACPTFERFRMVDKLHNVRYTVSPSGSRVNLSVPQRDAVIEKAFGKTARLTYADIRTLCSLPDNARFVGVRYGREEGDLAAEKKETIPLPRAWHEMRKALASLPPELWATLSSDIDLLDSVAEVLTYYKYETSIARELSGLGLPEAAVAALTQLRFSGNAHLSRSTLRAILPHMEAGLSYSEACEAAGLHHSKRTGGERHAKLPPIPTDDLRNPVVLRALTQTRKVLNAIIDEFGSIEELHVELARDVARSYEDRRQIEKMQKDNRARNDGVLEDLASEYGIENPRPLDIVKFKLWKEQGGRCAYSGDYIDPKRMLNGEPGVAEVDHILPHSRSFDDGYMNKVLVTASENRKKRERTPFEYLGGDDQRWHEFEERVLAMHLRRPKLERLLRRDFDERASNEFRERNLIDTQYIARFFKNFVEENLRFAGEGKAPVVTVNGRATAYLRTAWQLQKVRADGDLHHALDAAVIAATTRSMVQKVSRFFSVRPLRNPDGVYVDATTGEIIAAKHVPEPWVGFAADLKDRLSARFSDDPFGELTDGMREPVPILVSRMPNRTVRGEVHKETVKRVEGQDAKGRIVTSKNVRLTDLTPKLLEKMVGREQDRALYEALGSRLAQFGGDATKAFAEPFYKPTRAGRAAPRVKSIRVYDEPSSGGTVVRGGFADNGEMVRTDVFERDGKYYLVPVYLKDTVTKELPSRAIVGGKPESEWRLMDESYRFAFSLCLNDPIRLVRRTGDQTVAVSGYFRGSDRSTGAIHIEAADSSWLKRGQGVAQNVVTFEKWGVDVLGRAAHRVKQEKRCGFSNGGDKQ

SEQ ID NO: 7951 - protein, 1082 aa, synthetic construct
  REGION 1..1082: note = Synthetic
MSDPWVNLSTSMSPRLGGLMGTHVGLDIGIASVGWAVLDPESCEIKGLGVRTFRKAEDPKTGASLALPRRLARSSRRRLHRRRARMQDFRELLTSSGMIAPDDLSTVFTPIAGDTTPYQLRAEGLDRLLTEIEWARVLSQICKRRGYRSMKQTTKESAKDDDGVVKAAIAQNAAHMSEHKYRTAGEMLWLDERFQESRRNKGDYRAVVSRELVLDEVAQLFAAQRTLGNAFATPQIEETYLEILQTQASILEGDALRDKVGRCSIDRTNRRIPLACPTFERFRLVDKLHNVRYTLGTSGSRISLDAEQREVVIDKAFNRVTKLTYANIRKLCELPTDARFVGVRYSRDPDDLTAETKETIPAPKAWHEMHKALSECPPEVWSALSSDTQLLDAVAEILTYFKYDESIGRELKMLGLSDEAVDALAQLRFSGNGHLSQNTLRAILPHMEDGLPYSEACEAAGFHHSQRSDSERHSKLPAIPTEELRNPVVLRALTQTRKVLNAIIDEYGPIEQLHIELARDVARSSDDRKQIEKMQKENRSRNDSILDQLADDYGIERPRPLDIVKFKLWKEQGGRCAYSGAYIDPERMLSGEPGIAEVDHILPHSRSFDDGYMNKVLVTTAENRNKRERTPFEYLGGDADRLHEYEERVLSMHLRRPKQERLLRKDFDERASDEFRERNLIDTQYIARFFKSFVEDNLQFSGDSKAPVMTVNGRATAYLRTAWQLQKVRAEGDLHHALDAAVIAATTRSMVQKVSRFFSVRPLRNKNGEYFDPATGEIVPAKHVPEPWEGFASSLGERLSARFGEDPFGEIAASEFELQPILVSRMPNRTVRGEVHGETVKRIEGEDAKGRTVTSKKVRLVDLTAKTLELMVGRVQDRTLYEALKSRLAEFDGDAAKAFAEPFHKPTRLGRKAPLVRSVRISDKPSSGGTAVRGGLAKNGKMVRTDVFVCDGKYYLIPTYVKHTVADELPNMAIKAHKPESQWRKMDESYQFVFSLHQDDPIRLVRESCGMIVALSGYFGGTDRAAGAISIEATDSSWTKSGLGVAQSIVCLEKYQVDLLGRSVHVVKREKRCGFSDGGDKQ

SEQ ID NO: 7952 - protein, 1064 aa, synthetic construct
  REGION 1..1064: note = Synthetic
MESTMGLHVGLDIGIASVGWCVVDADAGKIAGAGVRIFAEAEDPKTGASLALPRRLARSARRRNRRRKERMSRLRELLTAQGILSPDSSEGAFVTQTGDPTPYELRVAGLDRRLTEREWSRVLTQMCKRRGYRSMRISETEDDEAGAVKQAIAENESLMREKGYRTVGEMLLKDEKFAESKRNRGDYRGVVSRELLLDEIHKLFEAQRNHGSPFASPDFEESYIETLSMQAPITEGDALAARVGLCSLDRTNPRIPLACPTFERFRILDKLHNIRYTLEPGGARHTLTQDQMTAVSNEAFRATALSLTHVRKLCGLPDEARFVGVRYDPRSPADTSVESKEKLPHPKKWNQMRKAVSDVSPDAWENLAADFELLDSIATVLTYYKYPESVARELEALGLEAPVRDALGDLRFSGHAHLSRNTLLAILPYMEAGQSYSEACASAGFDHSAPMQVKRQDKLPPIPPDEIRNPVVLRALSQTRKVVNAIIDTWGPIEELHVELGREVAQAHEDRQKIEKSQKENQARNESVKESICQELQVSDPRGHDIIKYKLWTEQDGRCAYSGKPLDPTRVLREPGYAEVDHILPHGRSFDDSYMNKVLVSATENQRKRHRTPYEYMGGDPERWHHFEELVASMHLPRPKRDRLLRKEFDERAAEEFRERNLNDTRYIARYFKNYVESHLRFASDKKRPVICVNGRATAYLRKAWQLHKVREDGDLHHALDAAVVAVTSPGIVQSISRFFSVRPLRNPNGVYVDTSTGEIIDAKHVPEPWEGFADELRTVLETPLPPDPLELLRDPARGPAPILVSRMPTRSIQGQAHEETIRRIEGTDEAGRITTSKRVRLEEITLPILDRMVGKNQDRELYLALKARLEAHGGKAAAAFAEPFYKPTKAGRTAPRVRGIRVHVNPTSGGTEIRGGLARNGKMVRTDVFEKDGRYYLVPVYLKDVAAGILPNRAIIQGKAEKDWREIDDTYRFVFSLYSNDLVRLVKKRGEVADTWFGYFVGTSRSTGSITIRAHDRTWERPSIGVAQGVMTFEKLDVDVLGRSVYRIHRERRRGFPNGRDRE

SEQ ID NO: 7953 - protein, 1069 aa, synthetic construct
  REGION 1..1069: note = Synthetic
LGVIMGLHVGLDIGIASVGWAVLDPDEHRIVDLGVRTFQKAENPKDGSSLALPRRLARSSRRRLSRRRARMSDFRDFLAESGIVASDQLEITFIPAPDEPTPYQLRYEGLDRQLSAREWARVLSQLCKRRGYKSMKLAVDSSGKNDDEGRVKSAIAENAARMTERGYRTFGEMLWLDERFKESRRNRGDYKGVASRNQIIEEIRLLFEAQRSHGNPFAAASLEDRYLEILQQQQVILEGDAIRAKVGKCSIDRVNPRIPAACPTFERFRLVDKLHNVRYTLPGAGTRVPLDKDQRDLVIEKALGRTAKLTYADVRKICALPEQARFVGVRYGSDATDVSAEGKERIPLPRAWHDIRRALSDLPADTWENLSGDIDRLDDIAEVLTYYKYEESVIRELRSLGLSDEVACALSGLRFSGHGHLSRQTLRSILPFMEEGLPYSEACAAAGFHHSQRVHGERQEKLPPIPVEDVRNPVVLRALAQTRKVLNAIIREFGSIEELHIEFGRDVARSHEDRRKIEKAQKENRARNESVLEDIEKEFGITSPRPLDIVKYKLWKEQLHSCVYSGDYIDPARMLSGEPGIAEVDHILPHSRSFDDGFMNKVLATTTENRRKRERTPYEYLGGDPQRWHEFEERVLSMHLPRPKRERLLRADFDERASEEFRERNLNDTRYIARQFKSFVEENLIFVGDRKAPVVTVNGRATAYLRTAWRLQKVRADGDLHHALDAAVIAATNRSMIQQVSRFFSVRPLRNPHGEYIDAATGEIVPAKHVPEPWEGFAGELRERMGARWGTDPFGELQHIDREAPRPILVSRMPSRAVRGEIHKETVRRIEGLDEKGLIRTSKRVRIEDLTPRMLDNMVGRTRDRELHEALAERLAAFGGDGKKAFAEPFYKPSKPGRKAPRVRAVRVYDSPSSGGTEVRGGLADNSTMARTDVFERDGRFYLVPVYLKDTIKDELPMRAIVQGKPESEWREIDDSYRFVFSLHLNDPIRLVRKSGGSSVAIGGYYKGVNRSNACIDIEAHDASWKKQGQGVAMGVESFEKYSIDPLGRTAHLVRQEKRRGFSNGSGKQ

SEQ ID NO: 7954 - protein, 1072 aa, synthetic construct
  REGION 1..1072: note = Synthetic
MGVHVGLDIGIASVGWAVVDPERRQILGMGVRTFPRAEDAKTGAPLAEPRRLARSVRRRLARRQQRMEALRELLVRHGLATAEELDGDPASDASLYRVLPGDPTPFELRAAGLDRRLDRREWVRVLTQLCKRRGFKSMRLSRRAEEEREEGVLLQAIEENRRRLEEKGYRTAGEMLARDPEFAEAKRNRRGEYRAVLSRDMVLDEVAKLFDAQRTHGNPFASPELEADYVAILETQAPILEGPDLMCKVGRCSLDGEHPRTPLASPTFERFRLLQHLLTLRIVEGAGAPERRLTPDELRRVLDKAQSRKTALTVKDVRKVLGLLEDAAILGLRSRDDGAESERLPGLPAWHAMREAVSAAAPELWEALAADEELLHRTACVLTYYKTDESVRRELAGLGHRPRVVDALAGLRFSGHAHLSRETILRILPHMEQGLPYDEACEAAGIRHYLRAVPGTRARRLPPLPADDIRNPVVLRALSQARKVLNAIIDRWGPIEALHIELARDVGRSAKERRRIEFEQRRNRERNEQVRAQLKEDYGLAEPRPLEVLKYRLWREQHGRCVYSGEYIEPERMLREPYYTQVDHILPMRRSFDDSYMNKVLVLSEANQEKRDRTPYEWLGGDERRWHEFSERVLALHLPLRKRQRLLRKDFKGKEEEEFRERNLNDTRWAAREFKNFVEANLEFASESARPVIVLSGRVTNYLHKAWRLEKVRSEGDLHHAMDAAVAAVTSPGMVQKVSRFFSARRLTSVDDVYVDAETGEVVDLKHIPEPWEGFVAEVREWLAARFSDDPAGDLAAPDGQPRPILVSRMPRRGLSGEAHKETVRRLEGAATDGRLRTSKVVPLSELDSRSLERMVGRERGDHALYELLRARLEEAGDDPKKAFSEPVYKPSRNGRGPRVKAVRVWDDDASGGVPVRGGLADHGRMVRTDVFERGGRYVLVPVYVADVAARRLPTKAIRVGKPETEWHDVSDGSWRFCFSLYENDFVRIVRRRRDGRQEVVWGYYKGCDRNTARITIEPHDSSRDGAAKPPRVSVYEGIAKFEKYHVDVLGRQLSRVRGEARLGFSRGGGRE

SEQ ID NO: 7955 - protein, 1065 aa, synthetic construct
  REGION 1..1065: note = Synthetic
MGLHVGLDIGIASVGWAVLDPDEHRIVDLGVRTFQKAENPKDGSPLALPRRLARSSRRRLKRRRARMRDFRDFLTESGIVSPDQLETAFTPASGEPTPYQLRYEGLDRQLSAREWARVLSQLCKRRGYKSMKLAQDSPDKDKDEGRVKAAIAENAARMAERGYRTFGEMLWLDERFAESRRNRGDYKGVASREQVLDEVRLLFEAQRAYGNPFASTALEDRYIEILQQQQPILEGDAIRAKVGRCSIDRTNPRISAACPTFERFRLVDKLLNVRYTLPGSGRRIPLDKGQRDLIIEKALGRTAKLTYADIRKICGLPEAARFVGVRYGSNPTDVSAEAKEKIPLPRAWHEMRRALSGLPAEAWENLSNDIDRLDDIAEILTYYKYDESVLRELRGLGLPEDVVFALSGLRFSGHGHLSRQTLRAILPFMEDGLPYSDACAAAGLHHSQHVRGEKRTKLPPIPVDDVRNPVVLRALAQTRKVLNAIIREFGHIEELHIEFARDVAQSYEDRRRIEKTQKENRARNESVLEDIEKEFGITNPRPLDIVKYKLWKEQGGRCVYSGTYIDPARMLSGEPGVAEVDHILPHSRSFDDSFMNKVLVTTTENRNKRERTPYEYLGGDPQRWHEFEERVLSMHLPRPKRERLLRIDFDERASEEFRERNLNDTRYIARYFKSFVAENLSFAGDSKAPVVTVNGRATAYLRTAWQLQKVRAEGDLHHALDAAVIAATTRSMIQQVSRFFSVKPLRNHHGEYIDATTGEIVPAKHVPEPWDGFGDQLRQRMSARWGQDPFGELQTIDEGAPRPILVSRMPSRAVRGEIHKETVRRIEGVDDKGLIRTSKRVRLEDLTMNTLDNMVGRSRDRELYEALAERLAAFGGDGKKAFAEPFYKPSKPGREAPRVKAIRVYDPPSSGGIEIRGGFADNSTMVRTDVFERDGRFYLVPVYLKDTVEDELPMRAIVQGKPESEWREIDDSYRFVFSLHLNDPIRLVRKSGGSSIAMGGYFKGVDRSSACINLEAHDSSWKKHGQGVAMGIESFEKYSIDPLGRTAHLVKQEKRRGFSDGSGKQ

SEQ ID NO: 7956 - protein, 1031 aa, synthetic construct
  REGION 1..1031: note = Synthetic
MQTANKQRVLGLDLGTTSVGFALIDYDQSLHSGSIVHMGVRIFPDTRDNKTEVPLNQQRRAKRLVRRQVRRRRKRRRELNEFLNLHGLLPKYGTEEWHSLMRLDPYELRRRGLHEELSPFEFGRALYHLSKRRHFLGRAIETQDFDEPDGEDNKTREDRENVLRELKEHEMTLGEWLATRTAPDKKRNVKASRDVVRQEFQRLIDHQEQFHKETIQDYSSLKSHLEQIIFEQKPVFWRLNTLGQCRFFPESELCHSGSWLAHQRRMLEMFNNLLVVGNLQPLDDEQREAILEHLGSRSHMTWTQVRKALAPIYETRSDEGYEKTIKFNLEEGGARHLLGNPVEKDLKEIFGDDWDSFPLKQEVRDQIHTDLWNCDYKKIKNQRVVINSQEIRQSKRQALAIELQERYGITTAKAEALTKLSLKTGWEPYSVEATKIFVEMLEKGYGMGSLLNSPDWAEWRNSNFPHENEGSTEQFDRLPSPKHPSEQARLRAIRNPTVVRAQNELRKVVNNLIDTYGKPDRIRIELARGLKLPKAVRSKIQKRNKENESLREAARKNLEENHIVNPSRRDVDKWVLWKECHEECPYTGSHIGFESLFGANPSFDIEHIWPRSRSFDDSLANKTLCLSSENQIKGNKTPYEYLGSNRDRWFHVEKRLEKMRAKGNNIGMSVQKIRRFRSPEIPDDFANRQLTDTSYVSTEAVASLKRLWTNEENARNVLVQAVSGRGTSILRKLWGMNNILSGTDAKTRDDHRHHAVDALVVACMHPSIHKQLSEYWSRKESHYSRPLALDPPWPTLRQDAAIHLESIVVSHRVRRRVSGALHEETVYRRTGNVSGKGNVEEFDIRKPIVNLTSTEKKNVRDAKLREVVLKSDKTSEIRLGHGPEVKRARVIKNKDPKLLRNVSNGYVESGENHHMAVYRDEHGRTKYEVVTRFDAAKRLSQREPVVQRTRPNSEFINSFSIGEAIQIDAGEYIGVWIVKMLRADGRVYLIKHDDARPKPSAIGLAINQLITKHKIRKISVDPIGRVRPSND

SEQ ID NO: 7957 - protein, 1446 aa, synthetic construct
  REGION 1..1446: note = Synthetic
MKNILGLDIGTNSIGWALIAHDFANKEGKILGMGSRILPMDQKEIGDFNSGKLKSAVSERTRYRGVRRLIERRRLRRNRLIKVLKSAGFINQDYSINNKRSFAYTFDKNRREFKFQSSYKEMLFEFRKYHGSEFKVPHDWTIYYLRKKALTEKITKEELAWVIMQFNAKRGYYQLRGDNTTATASGKYFVSDKVVRVELISKGQFEIELDSGIIGEYKAKEKPMWGNDRVEFIVTERQTKSGFKVTLSTPGEDDWTLRKKKSEQSIKEQNKTVGAYIYDSLLHDPKIKIRGKEVHTIDRDFYKTELDQILSTQEKYHDELSSREILRTASTVLYKNNESRQKDLSARSMKYLIIEDIIFYQRPLKSKKHLIADCKYEKYTYRKGGQVFEKPIKAIAKSHPLFQEFRIWSLIHNLKVYKRNHRDDQNILRIDVDFTESILTNDMKYRLYSLFDNLSEVSEKQILKLLSLDIKEYRINYEEGVKIKGNDTKSTLLKALVKKQKEESKKESKNVALIKDIEDTISKLNSLDILIPIWHALYSIDSDNEVINALKHPQIGLSQQVAEIIANNVDPFQKEYGALSKKAIETLLSLMRCGDAWSSDAIAPKVKKRINKIIDGEWDEEIADIVRDKLNNNSLKEYQKIEDFSGVPEWLASYIIYDRHSEYADVAIYNTPDEIDVQKLIPQHSLRNPTVEKILRESMLVVRDIWKTYGKPDEIHVEMARSLKLPNDKRNQLTNRRNENRRTNERVKALLRELKNESEYINPYSVGQQEMLKLYEEGAISIQSEIDDDIKAIRRKDDPTTSELQRYKLWLDQKYISPYTGQPIPLSRLFSPEYEIEHVIPRSLYYDNSLNNKIICERDANQLKDNRTAYKFVIEEGGAILKSGHTILLKDEYEALVNRMFWKNKRKLQTLMSYDVPQSFISSQLNNTRYISKKLIQLLDPIVRDEKDTNNQSRHILPLAGAITHQLKRDWGLHDIWKQILAPRFERMNEKTQTEDYYEKRNGKIHLSGNETEIKRLDHRHHALDALIIACTTRHHIQYISSLNNQTIKYELEPKIIRKRQQGAQNKTFIKPWASITTDAKSALEDIVVSFKQNMRIINKTTNYYQKYVKQADDSLKKQYVRQAKSQSNWSIRKPLHKDTVYGRSSIKEYKKAVPLSRALNDIDNIAKGIIKKVVNKRLKQCNNDIKALKKDIKKNPLMVQGQAIEKVDMIKVSDGYASVRKSIDSSFSQKVIQKVIDQDTRNRLSQHLKEYGNDPAVAFSPNGLVEFNKKLKTPMYKVKLYEDMGKKFAIHDEVDLNPKYVEAQKGTNLFFVIYVNNETQEYLITKDSSIPLYQVIYAMKNGQDIAPPVENHSWFTLSPLDLVYVPDEGEDINLPNSIDTERIYKCVSFTKQQAFFIQQTVASPIVDKKEFSALNKEEKSWDNIMIKRHCVKLKVDRLGRISQGA

SEQ ID NO: 7958 - protein, 1011 aa, synthetic construct
  REGION 1..1011: note = Synthetic
MSITLGLDIGTASIGWALIDENKKEIIRTGVRIFPEGVDKTKDKSGVSKNIKRRTARGLRRQIARRARRKTLVKKILIESKLLPSDSKEFLLALQTDPYFLRKKALDEKLPPYEFGRVLFNLSERRGFKSNRKTDRNNEKENSEMLAEISQLENTIQESGCRTLGEYLFKIRSENQFERIRGKHTRRSMYENEFNLVWDTQLKHNKQLTEDLKSRIYRAIFFQREIYWKKSTIGRCSLETNLPRASLKDRAAQLARLYQEVGNLQIIEPDGEIRGLKADESAKLHAYLASSNERTFENIRKEMGWTNCEFNLSAGGREKLLGMPIDKEMEKKHLFGKAWSKKSEEEKTKIVRTVILFAERGKEEEEEEFIKKAINDWSISKETAENLLKFNPGTGRARFCFKALDKLIPFLQKGYPMMSEDGKESAFSLAGYQRPDQKVPNQRDNLPIPLAEITNPIVKQALYETRLLVNAIIREYGIPSEIHVELAREAKGNKTQRENAIKTINKNKVEREEAVERIEENGLLPGRGSIEFYRLWKEQDGVCIYTGQAISLKQLLAGEVNVDHIWPFSRCLDDSFSNKVVCLRNENAKKANMTPREWLEKKEPQRWEEVLQRVRSLPYPSKVKKLERFIAKEVKLDDFINRQLTDTAYISKQVTSYLRCLGCKVVCGRGGVTAELRHQWGLNGILNPDKEGGKTREDHRHHAVDALVIAATNPSRLQALSKRKKDSVITPPWDTFRKQAEEKVLAILVSHKPNRKIKGQLHEETIYGGTIKTKPNGEHRPWAQKWIEEDGTYCYRKQLVGLTMPMVLKIRDLTIRSLVLDRLKQYGVNPDENSKIPKEVWENPLYLPNKNNPQGVVINKVRILKNDKSLVSMRKGSFQVYVKPGNTHHIVIFERKDEVGETIRFMESITLLEAYKRKIEGRPIILRSSSEFPDAVFLMSLCSGDTVNLKHKNTELLCRYVTSASTQGQIYFAELNDSKGSKYEKIVKNANTLVGKKVTIGILGEMRDSGD

SEQ ID NO: 7959 - protein, 1085 aa, synthetic construct
  REGION 1..1085: note = Synthetic
MDRMVDIVLRRNHCAIFLRGALKMAEMQYRWGLDIGTNSIGWAVIALIDGRPAGLVVTGSRIFSDGRNPKDGSSLAVERRGPRQMRRRRDRYLRRRDRFMQALIDAGLMPGDAAARKALVTENPYVLRQRGLDQALTLPEFGRALFHLNQRRGFQSNRKTDRASAQESGKVKSAIAAFRASMGSARTVGEALARRLEDGRPVRARMVGQGKDEHYELYIAREWIAQEFDALWASQQRFHAEVLTDAVRDRLRAILLFQRKLLPVPVGKCFLEPNQPRVAAALPSAQRFRLMQELNHLRVMTLADKQERPLSFQERNDLLAQFAARPKCGFDMLRKIVFGANKEAYRFTIESERRKELKGCDTAAKLAKASALGARWQALSLDEQDRLVCLLLDGENDAVLAAALREHYGLTDAQIDTLLGLSFEDGHMRLGRPALRRVLDELERGRDEQGLPLSYDKAVVAAGYPAHTADLENGERDALPYYGEVLWRYTQDAPTAKNDAERKFGKIANPTVHIGLNQLRKLVNALIQRYGKPAQIVVELARNLKAGLEEKERIKKQQTADLERNERIRQKLQDAGVPDNRENRLRMRLFEELGQGNGLGTSCIYSGRQISLQRLFSNDVQVDHILPFSKTLDDSFANKVLAQHDANRYKGNRGPFEAFGANRDGYVWDEIRARAAVLPRNKRNRFAETAMQDWLHNEADFLARQLTDTAYLSRVARQYLTAICPKDDVYASPGRLTAMLRAKWGLNRVLDGVAEAQGRLAVKNRDDHRHHAIDAVVIGATDRAMLQQVATLAARAREQDAERLIGDMPTPWPNFLADVRAAVARCVVSHKPDHGPEGGLHKDTAYGIVEGPREDGLYRVQHRVSLFDITPENLSKVDCDAPLRAELDLIFKQDDVKARVAALTVLAERYGQRKVRLVEWMSVLPIRPRGDDGKTLPDSAPYKAYSGGSNYCYELFINERGRWDGELISTFRANQAAYRRFRNDPARFRRYTAGGRPLLMRLCINDYIAVGTAAERTIFRVVKMSENKITLAEHFEGGTLKQRDADKDDPFKYLTKSPGALRDLGARRIFVDLIGRVLDPGIKGD

SEQ ID NO: 7960 - protein, 1066 aa, synthetic construct
  REGION 1..1066: note = Synthetic
MKYRLGLDIGTHSIGWAIVALDDANPPKPASLVRIGSRVFPDGRDPQSGESLAVNRREPRSQRRRRDRFLRRQQAFLDHLIRYGLLPQGEKARKDLQPRDPYTLRKKGLDGALSLHEFGRALFHLNQRRGFKSNRKADRKAGESGKIKQAADRFAAEELSRYRTVGEALYHRLAEGKGSRARLQGSGVKAAYDFYITREMIGDEFDALWAKQRSYHPEQLHDQARATLRDILLRQRPLKSPPVGKCWLEPSETRAPLALPSSQRFRLYQELNHLRLIDLSTGEERSLSRRERDDLATYLASRAKAKYQALRQHLFGKENRDAFVFTIEQGGLRKELYGDTSAHRLAHKKGFGKAWFDLPPAEQDAIVERLLETEEEAALTDWLKQRYGLDQAAADYLAGVPLDEGHLRFGRTAIGRVLPHLIEGWNQAEDQPLTYDQAVKAAGYEDHRAAAGNALLERLPYYGEILWRHTQEMPNATDPDEKEYGRITNPTVHIGLNQLRKLVNAVIDRYGPPAQISVELARELKLSREQKRRVNRDNVENRERNELLNKELIEEWKQRPTAANRLRLRLFKELGPLAPRCPYTGELIKPTLLFSNHYQVDHILPFSKTLDDSYNNKILATREGNAAKGNRDPYSYAAETPGVDREAMQARAEALPYEKRKRFKESAYTKWLGNFDEFAGEDGKGFLARQLTDTAYLSRVSRHYLQSVCGRVDVTPGRLTALLRGKWGLNALLNEGNRKNRDDHRHHAIDAAVVAVTDRGLLQRIATRAGRAESRGDERIFADLDREMPWPDFRQALEKALTRCVVSHKPDHNPQSQLHEETAYGIVDGPTDKGVYTARHRVSLASLKGPKDLALLESARLARKLEKQLAGLDGKAFQARLAELQGREDYPNKVRLLRKISGVTVPLRGTAISPDPRRRPAYPAKLYKGGANYCYELFVNEKGRWDGALITSFTANQPAYRAFMGSDKQFRQETFNGMPLLMRLIRDDLIAIEESPGNRCIMRIVLLTEGKVVMAEHFEANADARNRDKQSPFKYLTKSPDKLRKLRARRVFVDLLGRVKDPGFKG

SEQ ID NO: 7961 - protein, 1059 aa, synthetic construct
  REGION 1..1059: note = Synthetic
MRYRLALDLGTNSIGWAVVLLDEQNPPQPVRLIRLGSRIYSDGRNPKDGSSLAAERRGPRQMRRRRDRYLKRRDHFMLALIECGLMPPFEAARKSLVPSNPYLLRRDGLDKALQPYELGRALFHLNQRRGFKSNRKTDRSAGKESGKIKLAIAAFREAMGDARTVGEALARRLDAGKSVRARLIGKGKEEHYELYVDRQWIEDEFDALWVSQRRFHPELLTDSARDRLKGILTHQRPLRPVVAGKCFLEPDERRAPAALPSAQLFRLYQEVNHLRVETLVDRRERPLKRDERDSLVKTLAESPKKGFEILRKTLFGANREAFRFTLESENRKELKGCDTACKLARKEAFGAQWHRLSLEEQDELVLLLLDSENEAALQKALMERYGLGEAQARHVVGINLEEGFFRFSLKAIRKVLPPLRALWNDAENAPLTYDKAIIAAGYAAHTIQSPDVLLSALPYYGESLWRYTQDAPTARNPDERKWGRIANPSVHIGLNQLRKLVNALIEKYGPPSQVVVELARELKAGLEEKKRIRQAQAENTERNRKVRARLEELGQRDNAENRLRLKLFEELEKPGSRCIYSGKQISLGRLFSNDCQIDHILPFSKTLDDGFNNKLLVHRDANKYKSNRTPFEAFGKSLDGYDWEQIVDRASRLPKDKRKRFEPDAYESWLRHEADFLARQLTDTAYLARVAKQYLASICSGKQVYVSPGRLTSMLRGKWGLDRILAPYDENGELRSIKNRNDHRHHAIDAAVIGVTDRSLLQRVATLAGRAREVDTERLLANMPWPWDSYRLEVEEAIRRCVVSHKPDHGPEAALHNDTAYGIDEGPREDGKYLVHHRVALTALKPGDESRIRCETQLHEAISVALGQKEPKAREASLDALSARYGQRKVRYVEPMSVVTIRPRGKDGQSLPDSFPYKAYKGDSNYCYELFVNERGRWDGELITTFRANQKAYRKFSENKLRFRRETAAGRPLLMRLCVNDMVALEEGGVRRLMRVAQLSEGKIVLAEHFEGGPLRDRDRSAGDPFKYMTKSPGVLRELKARRVFVTLLGQVLDPGFRG

SEQ ID NO: 7962 - protein, 1027 aa, synthetic construct
  REGION 1..1027: note = Synthetic
VGGSITPARHRPSGGKQILGALLLHVSIIFIGQHTPTMSELSVTSERTTTVEYVIGIDAGIRSLGFSAVQYADGKPVNILEAYTQLHDGGVSPRDEKTKVSRRHNNGLARRARNAKKTRKQRLKALDNLLDRLGLPETDIPGDQFWSVRAQLMERYIDNDTERLGKIRAVVRHMARHRGWRNSYQNVQSIDPLAQTPVSTALADTIYRSISQYAAQNGGIRGSRNCQNVPFNSMRQSDNLAELNTIFATQHFDQDSAREIVQAVFFQKSPRGSHVENVGYDQLPGMTDKPRASKASLAFQEFRILHTLSNLKVKDAHDERSLTLDEIENVSDFLFYEADENVSWSDVEAVIGLGENESLTGYSFKRGFSRPPFNTTFKELRRNDSIFAGQDEDVLEAVVDLLIDQRSSDLAEDFLSRLDDSELSSLDSLRFEIGRSPYSADSLNLINEGLMSGYTLPYTLYRFFGVDPTWKPRPSRLDEKTGNLAVDRVLSYVQSFVDHCTDTYGQPSKVVIESVKDSFTSVAKAQEKASKANRRFQIRQNNHERFTAETGQQPSVRAMKRWEAVKRQKNECVYCGAFIDFHSCQRDHIIPQASDASNSVEENLVAVCAPCNQEKSNTPFAVWAKTTDRKGVSVKAAIKRAKKWKYDKSVETFDSFIAVRSGVIRRLSLTSYAEVDSRQMAPVARMAVEMKTRLMDYLPDTEVVAYSGALTHAAWIEGGFSEKNWLHGGPGKQRGDNRHHALDAIIFTLMNDDIARVFSTQLKWYINSRNTDIGQMKLSKKQLQAIESFKERSAHMITLIDENIGSIDVRTPVRKKLYSGSVHEDTIKPFDRSLKLTDKLSASDIKRAATPQLYDFLTSFASYSPTRGLPADANRRAKKPVAGLHSDGTLDLFGSSSACVAVRGGWALIGAGVHHVRIFKHKDRYIFQRVFTSDLAGKKGSLFYAKLPKSSMTMRQLSTKDALAIHSGDAKRIGALQLGSKAQVNGRTWIVRACNSGKLVLENPYDKSETTIVRCPSVTDLALAVGF

SEQ ID NO: 7963 - protein, 979 aa, synthetic construct
  REGION 1..979: note = Synthetic
MGLVFAFDIGARSIGAAAVRSGNAPATGAVSAGPVWCGVVVHDAHDGARTLDRFRRLRRRQQRRRLMRRRRKRLVEIMRRNGLLPPAGQSCDDAFERDPWLLRAEALDRALAPHEAGRALLHLLRRTGRPSQPAPPEDGDLLGSGPDDEATDRPPASRTFGERLWQRHAGPVRQRFAVIRRAHLSTDSLQGIPERMAHQVRNEFDALWRAQMRFNPEIFTDGLRAAIEAAAFASPRRSAGPGRSSPGGHGEMPALPSQEAVRVLFALSRLRVRQSDGAFRRLSRRERNTLANMALRGEVMTARRAGVALGLDENERISAMTGHSPPVIVSCRISAALRRFPRNGALWATLPLGSRDAILAAALGTQRTPDANLSVPAFAALARCLRMVVDQLPKGPRKALPADLGAALLFAFGGEAGRPAHSPRQAWRIARADLDRLGIVLQEPPRPPWRTHPGQSAFARLLQAMIAGFGQPDEIVFENIHAAASRRTPQRAADVAELLHRIGARATPANRRRAALWLDQRGADGKVTCPYSGLPIHPEALVGPTIEIDHIAPRSQGGSADRANTVLCHAAMNAWKGDRTPVQAFGALPTWPGIVMRAALLDPQRRDAIYGSTEPVSNTARIAETSELLRDAIETAEELAPQARFFLAPVPARPGAKDRRDLRHHGEDALELACRHAAPQREKVPGATACDEKVRADTGRLAGTWGVSLIRGCMAKHRIKLHDETPIGFRRDGRGSERFVVRTALRDLTATDLPRIADRRLRDLALAGGVQALQARCKRVRVERRLHAVDLAVVESKASRMRAHARPRVRFIDVVQMRDGTWRSYPALERDARIAGWRPIWETQRMGAKLVMRLGRGDLVALDHPNFGCELYVVTRLSPSNGVFYLAGHAQGGDLDARHRDPNDPFRWLFASVGRLREWNAFAVDSGPLGETMPRRCNTASDVEMLDRKRRLAAFAASGSPSVSEHRQFRPRPDELIAQ

SEQ ID NO: 7964 - protein, 1459 aa, synthetic construct
  REGION 1..1459: note = Synthetic
MMPYTLGLDLGSSSLGWALVDEEQQNIIKTGVRVFPGAATDIGTGKESYKNQDRRLSRQARRQTLRRKQRRIVLLRTLVDFKMCPLSKDELESYAKYRKGKKQEFPSSSEFNSWLKLNPYELRDRALHEDISRFEFGRILYHIIHHRGFKTGRKSNEDGALYKGNEDTVGVDETKNLLQQYATLGEYLNSLRIKSDGNERLRGRYTLRNWYVDEFNKIWERQAGKLGLENETVHSRNKRYYGPAGSSEHRRKLQAYKKAGISFEIEGDFICREQTVSLKDYLGNPDKGILFYQKPLKSQKHLLSKCRYEKRKSVCQISHPEFEYYRAMQFANQIEYGAGEKLNETDRKDVIILLLSKDKAVKMSDLKKKIQKTGVQFNYADDHKVPGSPTTAFISKVTDTSNVENIDWELFHSIWNDLVFYDKSEKLKEKFQRSYNIDVSIEQLNKYKINTDYSSLSLKAVRNINPFLQMGMLYNDAVIFAGIRRVIGEKSFDANADEIISHVSKLKEKNNRDVNQSFTDALREYVMQTFNISMNQTYKLYHHSQEMSVQNNRYYLSELPNLRNPIVQQALQELRTLVNTLVEQYLPDGEQFSKIKVELARELKLPRDVRRRMHWENNQRAERNNDAKIELQKFGLSPSRENIQKYILYKEIQNSVQGQSVQCPYTGQSLAITDVFGNDNKVQVEHIIPYSISLDDSLSNKTLCIAEENGKKGEKTPYQFYKSDPDHWEVVKARAFTLLPYEKAKRFVSTRDYEPEAFLQRQLNDTRYISKAARDYLSTICDQVYVFPGSLTAKVRRMWGLNSILSPPIKTNFEGNAGMYWAVMNDDGVIIELSEQELPPPAIRASDILISGEMKNGIFKVDRKFTGQSQTREVSVEHRTYDSPGWMVYSLLSVEKYLPLFSKLPSQDTKSIWLKGRAQVKDRESPSLMLNSLPVKLMLPPGEYDDNAPYWVNIPVNGELRWEKRGEKPGKNELLIKRTKHRDGKVEAFIDKRKCLFDIPPQDNKSALIIPLDLQEILQVVRMFTPTPAIAEHQFLIKGKIDQSYRFTAESNFRIALDAPEGTPSGPAFAIANCEPRDMRFYPKKNIKPKNGKGKNVLSGFVFQEDGSLVFNPGKNRMDHRHHAIDALTIALLNTGQLRELSGYFLKIKKRQRYSAPKPQFPLPWDNFRADALNSINSILVVHRQNREIIKRIKKNTRLNGRTYVSQGMSVRGQLHKDTVYGKHYIPGSDEPGYHVRKQITDLTSLSKIADAGTHEILRTFVEENGYSIDEKEKVKGEWFTKGNDYQVIMPSSGKPGNPIKKVRIRENLGNAVQWHTGINQYVNPRNNYAFIIYRDSDGNYKEHPVTFWDAVQARLAGKSVYQLPEPGKIITTLHINDTFLLGLGDEQLQGDLPQELVSRHLYRVQKLSSMYYCFRLHTESTLDRDFEPYYLGIQSFKAWKEQNPLRVKVATTGEVNLE

SEQ ID NO: 7965 - protein, 1050 aa, synthetic construct
  REGION 1..1050: note = Synthetic
LTYIISRSIILLYIIIITWEDKMSKKVFAFDLGTGSLGVTVRKGIEFKEIHSYILPPEFASLKDQRERRRQYRTRLSHKAREDWLKKNCREAGIEILEGQKPRNKKEGTEPKPGDPRLEREFAEKGDDTVYTSCLLRILLLRGEKLEEWQIYKALHSAIQRRGYDPEIPWKHRAEQKKDDDSKTEKQATEYEKKLINITGGREDRIYPCYFDAWKMGLWNPETDKLEFKQKNTADRARKNVAPRKLVEKEIRALVRAASKEYHFFKDKEDYILYGKPKEAYASFFHELRLKYGLREGSDEDQKALLGQKIPRFDNRVVNKCVLIPRNNVCRADDYAVIQFTFLMKLMNLRFYDTTNHERRLLPEDIRKILEEKKEKADKERELMKSEKEQKREIAIKTAKIFSFTITDLKKWLKKNGKNWTPQVFNKKEKPVEPPKTGGRSRFCRPAIKQMRELILSGKSPGKFYTEQLELITNNDPQKGIVWKDIEFLLKLPDSWGKIYIPQRTIAEQYSENAETPDEAIKNLISAEINPVIRHRLGVFDKTLSRLAETHGTPDRVVLEFVREDFLGKDAKSALLKSQQKNRKAREEARQRAKEINATGKDAFTKLRLLKEQKCHCIYTDEALSESDLDLLVIDHIVPRSSKYDGADALWNKVVTTYITNDEKKDRTPYEFLSNTGGWQAYCERVKKSGLSNRKKRLLSSENPEEFNEKYTNLAETAWIARLARKIVCLKFGWQYGEKDVKEKVPVVHGGLTWAIRGKYDLNSLLFDVKDKTPDVIEKKNRDDKRHHALDAMVVSFLTGHEHEKKLPDGVARPLFEKHIKDVLPEPIATEKPVLEETIYGKREFGGKTVAVKRIELVSIGMSGKTFNVRKARNDAENILDDSIRKHILQFLETVPDKDTFLEFCKTVRQSGNKGSIVRKVTVSKGDIAEYKDLGKNVGKGQYRRGAKHRGQFIYRNTQGKVKVRPVYVFESKKDIEDELRESGYETLAFVQAGCRFEINKGVTVGERLIPPGKYIFNTIKTKSGQVVIDGDFPSPRIGKLIEAGFRRLK

SEQ ID NO: 7966 - protein, 1050 aa, synthetic construct
  REGION 1..1050: note = Synthetic
MSKGKIFAFDIGTGSLGIAVRDGDEIIEARSLLIPPDFASTKEQRERRRQWRTRIAHKKREEWLQQICKKAGIEVLEGRKPGYKKKGISSQKGDPRLEREFASPGDDTVYTSCLLRIKLLRGEKLEGWQIYKALHSAIQRRGFDPSIPWKRKAIKKGITNKEDVKNNDMSDDNKDEKENLKKAREYEKTLMEITHGKEDWNYPCYFDAYCMKLWNPETDELRFIQTHEAERARSNEFSPSRRLVEKELRDLINAAAKQCPSLVGKTDYIMYGPTETSYASYYPKLRKQYGIKEGGENDWQGAISQKIPRFDNRMPDKCALIPRYNVCRARDHLTMKFTFLMKLKNMRYKDSFHQEHMLTAEDIRVIFDEKTEKVAKKKKELITKGTGKNIDYEKMSKIYQYTSNQWTNWLKKYKNGYSCVNHEKVDPPKISGRARYCRPAMRIMCDLILSGKSPWEFYNQLLEKMDNENPKKGLVNEDIEFLLKLPDNWEGIYIPQYTLAERFMEGEINRDSAIKKVINKQRDPIIRHRMEIFKNYIDRLTNEYGIPEKVVIELVRQDFLGPKAKRAFEKWQRENRKRNEEARNRAKELGISGHEGRTKLRLFKQQNGYCLYTGENLSENELEQYEIDHIVPRGGGYNGSDSFINKVVTKAKTNHDKGDRTPYEFLSQSGKWDAYLERVKKVTSSLGKKKSALLTSEHPEELDEKYTQLAETAWIARIARDIVCLFYGWQYGEKGELEKALVVDGKLTSNVRAKYGLNTLLAGGNETDPEKRKEKNRDDKRHHALDAMVLSFITRNKPDLPEGVHKELFRKWINKVVPEQIAFEKPQLEETIYGKRTIYERNKEKEIIVKRVDLKDMAYRNGKYDKIKAQKEIQGILDVTLRKRLERFLETNPEKETWNSFIDNLRQQDRWGSRVKKVRIYEGEPDEYANLSKTDDKGQFRRGDKHRGQFVYLSEKKIPKVRPVYVFESVKSVKNELLKEGYEIIDFFKSGFLIEIGKSFDYNGRFIPSGKYLLSSLRSNGQVQLNSTHPNLKNPIGISALLKAGFIRIK

SEQ ID NO: 7967 - protein, 1566 aa, synthetic construct
  REGION 1..1566: note = Synthetic
MIYYNGFIIAENTMTSKQENLGALTFGLDIGIASVGWAVLGENRIIDLGVRCFDAAEDKDGKPNNQTRRGARVSRNRFHMRTWRLKRLTRLFRDVGLLSKEEIKQLFSATRQKNQPQLVSPWSLRAEGLTRKLTQQEWAQVIYYFVKHRGFKFFSKTEDPRSSSADNEATSVEQKERDGLRDGLEYTGKILKKYPQFETIGNAAHHLANAQQGSDGIYRDKDGKLLEATDCEEFQESFRNKSKSYRHAFHRDDLMDELNKLFEAQQQPQFSNPFANLVLREDIDRLREVQISSETRTVGPTFHDQVFALLELQHPPIYTSQMDALIGKCELEKNELRAAKNTFSNERATWLQTINNLRIKRNGKEDTLSPDERALLINLPYTQAKLTFKQARDALRASLGFPAHWREASFTKVTYRNKRKDDGSWINVVAADGSNISLGKYGQDDVRKKANKELKKRLETGTMTFAELRQLFELKEGEAFEHICNEAEIVPASLETTYTIPDGKKTFIKLLPAKSKKPITLKGRAMKALADLSSENLNATLADLRLAIEQADRLEAGWQFEYSRKDSTPIKLENEATTQVPIEYEDAQKAEEETLIELKGWHTFKRALETECSDWWANLQVAYLDPQSDAGQAAAIQLDAIAELLTKAQTDADVEKGFAALALTASQIQALERVRFKQYRNLSLIALRKILPSLEAGKSRTEACKDAGYKTETHQRSKHLPPLETYLYERVRHGKKTKYTELRYKDLTNPVVARAFNQARLILNALIDRYDQSPAYVHVELARDLAKSKEKRIEDKKRQDENRSKRESIRGNFIATYKIDEPTSTQILKERLYHEQGCKCIYTLEELDLNRVVDDPNYAQIDHIWPRSLTFDSSMENLVLVHAHANQDKGNRIPYDFINQKYGKEHWRRVMAYILGCKGIGGNKQNRLITKELDADEFSARNLVDTRYATRLFARMVRDHLLFDGQVEDKIEDIDPSESGKSRLEKFHKTRVRTPQGGLTAFLRRGWLNDIKDRESSDKHHALDACIVATCTPKVINEVNSYFANEEQVPSRFKRLADGKYADKGNGGEIISKQEARERGLYLPPPWDHFRADFFEKYEAIMVSRVVRKKRSGELHDANPLAFRKLSIPLVDLSEDMLTSLSIPKEFRIKHQEILDDLAKKLIHHGGDAKIAFDQPHEIIDRKGNIQHIRSISLPIVGLPAPYLEARLKPLTKKQKQSALLEDNRRNHQRVLLCNLTLEMLDDARLGSGYLNRNKKVIDALKACLKHFDGDSRKAFSDGFVIDGGDGKAIRSIRLPLWSDEVSVQAHKSAPLTSLSLDKLDPKKLGATYYHRNKKVIDALRERLNEFGGNAKKAFSTERRKDGEANVENKPKTRKDRPFDPSDYGKPGPIIRSIRLPESCGLGTDIRNGIAKLGASQKTEVYWTGTNYFFRNRYGLDDEQVRGISEPPSDSKILFILTKNDYVRIVLKDGGIKEGYFVFYPEDGRMQVRRHDLPKIIDYVAHETEEPSEGEEESGETIEPTNGNKKKKVVLAWRIPESQIVKISKFKVGVLGDLTLIADSMPHGLA

SEQ ID NO: 7968 - protein, 1603 aa, synthetic construct
  REGION 1..1603: note = Synthetic
MTSKQKNLGQLTFGLDIGIASVGWAVLGEDRIVDMGVRAFDAAEDKDGKPNNQTRRGARVSRNRYDMRTWRLKKLVRLFRDVGMLSKLEIKHLFSAQHDKNVLHVSPWQLRDEGLSRPLTNQEWAQVIFHLVKHRGFKFFSKSEDPLQSVAEDGNTEDTAAKAERDGLKDGLSYTAKLLKKYRQFQTLGQAAYQLANAQKDRLNTYRDSFGNALDTEDCEGQKEKFDGFQNAYRNKGKSYRHAFQRDDLQAELNALFDAQHKHGNPYSELTLPDSVSHLTEIAVSSENRQVAPTFRAQVFALLELQHPPIGIEQMNAMIGDCELENEARNGKAEKRAAKHTFSNERATWLQTLNNLRIKRDGKETPLTEQERSILLNLPYTQGKLTFKQARELLREQTGFPAHWREAGFTKVSYRNKRKNNGDWLNVVSADGTKTTLNKYIKNEKTRKEINKNLKARLEVGTMTFAELRQLYQLVESEAFEYQSKSDEIIPVALEDQYLIAFDKLDSKKIFIELMPAKGKSTKKFSPKAMNALESLRTHLNPTFADLRIAIEQAEQQESGWQFKTRQKDTRLILLEGEASENVPIEYEDAQEVEDTTLIELKGWHALRRALEDNHPAWWASLQVAWLEPQSEAGMAAARQMDEIAEVLTKAQTDADVRKGFEPLQLDDNQRAALEGIRFKQYRNLSLKALRNILPFLEQGKSYKESCDLAGYQPVTPPARTRHLPPLETYLYERVRHDRATGFKKTGYTEQRYKDLNNPVVARAFNQARLVLNALIDRYDQSPAYVHIELARDIAKPLKGKWSNGKYIEGRQDISKKQEENSKKRQSARNNFVTTYNISDPNSQQILKERLYQEQQCHCVYCLKELFIGDVVRDRDYAQVDHVFPRSLTFDNSMENLVLVHTGCNQNKGNRIPYDYIRSDAMFGGTDAQRAEHWRRVAFYVMSCKGMSDNKQKRLLATELDADEFRARNLVDTRYATRLFARMVRDRLLFDGQTADQTDDIDPDESGKIRLEKFQKTRVRTPQGGVVSFLRGKWLGNIKDREAGDTHHAMDACIIAACTSTMILRVNNWFSNQEKVPNRFKKLDDGKYADKGTGEIISKDEARERGLYLPPPWEGFRNEFLEKYPSVFVSRAIRKKRNVELHSANPMALRYYPVNLCDLTLEMLDEKQLPPNLPVSRLSLIEAVRRHLSVCEGDAVEAFKDGFTMDNKDIIHTVQIPLVSLPQDYLKQVGKQLGKSNNTATRKLPLNQLTLKQLSVEALGETFYHRNSRMIDALVGQLKKFDDKADEAFATSFYPFGKDKSPMKSVRLPADKPHKENFEDTAQKNVSLTQLTLKKLTIAELGATFYHRNSRMIEAIKAQLTKFNDKADAAFAETFYPFGKDKPSIKSIRLPAPCGSGIHVRGGVAGLGDALYTEMYKLEGAFWFRARYKVPSGQAFGLPEVPEGAEHTCNLSKNDYVRIKHPNFTYCYRELSRHKSVSGETLISVEAIFENGIFEGYWNYFEPSNDRPVVQLHDGSPFFLLADGKMLSKKSLVLIERAKAKKKDNAPDEMEYVEFCEAPQKSPLKFSLVTDIKRKVNDAVFIEKVKIDILGSIQLENRKHDLA

SEQ ID NO: 7969 - protein, 1081 aa, synthetic construct
  REGION 1..1081: note = Synthetic
MKKILGLDIGINSIGWALIEEDKKIIDCGVRIFPVGVKEDDYNKSGSEISKNASRRLARSIRRGYFRYKLRRKTLIAILGELNMLPENNLIQLPSKELYALRRKGLDEKLSLEEFGRIILLLNQRRGFKSSKKGKTDEKERSVLKLEMKELERTIVDNNCRTIGEYFYLLFLKNTDNENTYNTQEPTERIRTKHVDRKLYSQEFDLLWGKQKDYYPDVLTENNKKRIKDDCLYYQRKLKSQKHLVGKCWFEPSKKCCPVSKIEFQEFRIWQLINNIRITTGDRYRESLTVEERNKLFYLLNVNESCSVTQIKKVLELTHVTFNEIPEKIKGNTTHARIAIAIGSDYWTFSAEKQHQLWHILFFADDEDWLYHYAIDKLDFTDIQAEKFAAVLLEDGYANISTKALLKGREGDVIENGILFHLKNGMSYSEAATAAGYHHSYNAEDNYPDRVLQDKIVIDSKDLIKNPLVQQCISESARLVNAIIQKYGHPDSIKVEMARSLKKPKNEREQMKRRNDDTNRRRDEYRDFLKKRLGKEYISKSELIKFELFLEMQFAEDELKKINGHIDTDEFKKFARNIKTNDKEKYELWLECGRISPYTGNVINLTKLFSSEIEIEHIIPYSKCMNDSFANKTLCEKDINEDKGNRTPFEYLGHKPEQWKAFKERIKHFNDNKQQQFTRTELPDDFLNSQLNNTAYVAREVVTHFKKVCTSVKVTNGQATSWLRKFWGLNELLNLEGVNEKSRHDHRHHIIDAVVIAFTSERYIQILSKESQFDGLGKMRVEGIKFPYPSFKLEVNERLQNVLVSYRDKKRLLNTKTNKYIHSASHKKYKQKTFQVRGSLHEDTHYGLINNPHTGEQNYVYRKPTNKIETEKHIDKIVDPKIREIIKDHISNNGGKIKQALALPVFMKTKTGKKVPINSVRIIDNAENLIQLRPKENPKLFVSSGNNYCIAIYQGSDGKRDFETVSFYEAVKNKREHKPLIPISKNNKKLLYSLKQKEMVVVYSDHPDEIDWENRRELFNRLYQVVKFNVNGQIALSKHHYSNVNTDKPKEYASGVVINVRHSTIKAVKVKIDTLGNILKI

SEQ ID NO: 7970 - protein, 1074 aa, synthetic construct
  REGION 1..1074: note = Synthetic
MSYILGLDIGSNSIGWALTKEESILDLGVRIFPVGVKEDSYNKSGTEESKNSSRRSARGIRRLYDRYKIRRRQLKKLLLTLDMLPPETMQFTSFRLYELRKRALDEKISLQEFGRVILLLNQRRGFKSNKKGESKSASETAKELEGIKLQMAELESEIKDSNCRTIGEYFYSLFLKQVEHENWRNPDEPIERIRKRFVFRKTYEHEFDELWKAQKQYYPGILTDENYTKIKDNCLYYQRPLKSQKHLVSKCRFEPKKRVAPKSSFEFQEFRIWQFINNLRITGPGRNLDLLTKDERNTLFNEFNRNEDLSPAKMIKALGMSKHFSFQNGIAPKVKGNTTNSRLSKVLGEDAYFALSHEEKFKLWHVLYFAEDEDWLLDYAVNKLNFNHETAGKYAKTNLEADYGSISTKAIHKIIPFMQDGYDYAEACELAGYHHSFDEDKDGKERELLDKIIREKDDDRRNPLVEQAISETVRLVNEIIAENGKPSKIRVEFARQLKMPKDKREKLKSRNDEKEKSRDSYRDFLVKSAGLSNPSRADIIKFELWLEMEFDLKDFDKKKGSIDISEFRKFTKNVKTGDASKYKLWLECGRISPYTGKVIGLSELFSPEIEVEHIIPYSRSLDDSFSNKTLCERLVNADKGNRTPFEYLSGHPQKWEAFLDRVKLFPFGKQLKFQMKEIPSDFISQQLNNTAYIAKHARKKLKLVCRDVQVTNGQATSHLRRMWGLNKVLNPTGANDKSRHDHRHHAIDALVIASTTPDFINTLSRYASFDALGKLRISNFPMPFPEFFSQTEELFSTILISYRNKQRLISSKLNKYKHSKNTAAQTTVSIRGPLHEETFFGRILNPETNKQSYVIRKPLSSFKDAKQLSKIVDPAIRKLVLEHVEKCGSVASAMSTPLFMISKDGKKKIPVNKVRVIDSAEELVQLRPKENPKLFVAPGDNYCIAIYEKDGKRAYNTISFYNAVHKKINKQPLFPLTEGDKPFLMSLSKKDLVVVYNQHPDEINWNDKSSLFKNLYLVRKFDKNGRIALAKHNLSNIDVNNPSAYPLGSALLKGFSTLKAVKVHISLTGKIVKA

SEQ ID NO: 7971 - protein, 1075 aa, synthetic construct
  REGION 1..1075: note = Synthetic
MGYVLGLDIGSNSIGWAIISNYKIIDLGIRIFPVGVKEDSYSKSGTEESKNSSRRSARGIRRLYARYKLRRKQLKKFLFSIEMIPPESSQLTSRQLYQFRKKALDEQIPLQEIGRIFLLLNQRRGFKSNKKGDGKGEQKKELDGIKQEMAELEQKVADADCRTIGEYFALLFEKQSEKENWHNPDEPVERIRKRFVFRKAYEKEFDLIWAKQKTYYPAVLTDENYKKIKDNCIFYQRPLKSQKHLVAKCRFEPSKRVAPKSSFEFQEFRIWQFIGNLRISGGNRFRESLSLDEKTKLGLLFQENELITHQMMKNALNLPKSYTFQKDIPLKIKGNTTNAKLMNALGEKHFNFLSNEEKYKLWHTLYFANDEEWLIKYAETALKLNSEQTKKYASIALEEEYGNVSIKAIRKILPLMKIGFDYAQACEEAGYHHSYDEETDSAKRELSDLIVRDKKDDLRNPLVQQAVSETIRLVNEILKERGKPQSIRVEFARMLKMPKDKRENIKRANDEKEARRESYRGFLSQKLGMNFISRSDILKFELWLEMEFNETDLKNLSQTIDAAEFRKFSKNVKPGDKTKYALWLECGRISPYSGKIISLGKLFSSEIEVEHIIPYSRCLNDSFGNKTLCEKEINADKANKTPYEYFAGRPNEWASFLNRVKHFSEGKQIKFTIKEIPSDFISQQLNNTAYIAKEARKKLKTVCRDVTVTNGQATSKLRHLWGLNTILNQKGENKKSRHDHRHHAVDALVIAATTPAFIKLLSDKAQFDNFGNLTLKDAPPPFPEFRDEAVALLSTVLISYRNKKRLLTTKTNKYIHSRSKIDTTQKSISVRGTLHNETFFGKIFNPETKEHNYVIRTPITNIKTQKNIEDIVDPAIRHLIIEHIAKHNGNITEAMASELFMVSKDGKKKIPVKKVRMIQKAGGLIQLRPTENEKLFVAPGSNYLIALYEKDGKRAYETVSFFEAAQLKLKGQIIYPAEKNGKPFLFSLVQKDLVLVYDKHPDEIDWDDKKKLFESLYLVRKFDTNGNIAFVLHNLTNVDPNKPKEYPKEWVMRKTFNSLKAVKVRISLTGKIIRL

SEQ ID NO: 7972 - protein, 1209 aa, synthetic construct
  REGION 1..1209: note = Synthetic
MGKILGLDVGIGSLGWAVIDEEQHRIVDLGVRIFESGEEGATKAADRASQVRRQYRSTKRLNKRRKHRKQRIKQFLEEQGIISTEDINAYYRTKGTNPDVWKMRAEGLDRKLEPTELAAVLINLSNYRGYQDFYEDTEEDDAGKLSEAKNRINTLFQENKNKYRTIGEMIYKDACFRNNADGKLIIRNKARRENGKAVTDYKYLIDRRYLRDELKRLLNCQHEYGYDQFAPDVIDELSSILFKQRDFEDGPGPKDKATEKKWRESLKGNQTYSGFDELVGNCPFYPEEKRGHKNSQLYDMYVIINTLSQLSFADKESQEQNCPEHLVHEMRQLLFENKGILTKKDVENLCKKNNIEIEIPQELKNKKNLIKATYIQFLSNPEVFPESMVKRFKEESYDDDNALSSQIGYYLAKYATPRRRKEELQKIMSEEDFKLLNYCDKIKVEKSGGGANVSAKYMKEAINAYFNGVKYGDFQAEFNKEHPLEEKGNYMSESGKVLPITDADMVRNPVVYRSLNETRKIVNAARGKHKDINTINIEVAKDVGKSFEQRKETSKYQKENEANNEKLRMELIEKLAAVNMQVMLADKLIERYTLWDAQKGMCMYSGKPIAFADLVGTTIVQVDHIIPQSIVLDETLNNKVLVLTEENQKKKNQLPLEYMDEKQSVDFKNRVHNLYRTGKISRTKKEYLLLPFLDDETIKGFVDRNINDTRTISKYIASYLRVAFNDQVKVQVIKGAVTSRFRKRWLGSKLKRYDYVPSIYGLDKKTRNLHYYHHAIDATVVANLTRPYIELAQDFVKFEAIQKDIVSLQKKGSGNTALKLQEELILEQAKTVDKMHKFYGFNREYTKDLLSSGYVPSICEELRKEIEVRVPLVIGFNAKDYVDMEKAYYDLRPLLNSVKYNFKDVDFENHSDVVDPDTLEEINARLPLLNPNIVCMKSNAQLVYADKDVDEKASAEEVKKELGNFIKKLEQRPVEDYITEIRMVNEEEYSERVHEYYQDDGFADKIEVPYVSFKINRKFRGGMVASDNPISLQKTGFATFKELEADMRTNLKSPYYVRFNKGVGELGNFTIYDARSYYCMEIYIDTEGEYQIRGIRYVDVRKENKTGRLRLLKTLPEGCQHYMYLFKNEYIKAFKKGKLRNNGFGAYRGVENINQSTGKIRLYSNSNLKGRDTIINLAGETTKIEMSILGHIIGERKCGDQSLFITENG

SEQ ID NO: 7973 - protein, 1485 aa, synthetic construct
  REGION 1..1485: note = Synthetic
MILVSASSGMWRLSRRVAAAGWRRARRWPPGPSPGGRDRHLVEHLGHQLVRVGLPHPRLGFQENAMAENGRGHYLDVIGQHIGAALNGRPRLSRAQQAQGSPRARAQREHGVPAGRPHQFHQVLLQGLIYVDALHVLLHREHFVELHHRLDGVDRVLLHLPVQHRHLFLRREIAHVDTHQKAIELGLGQREGAPVLDRVLGGHHEEGPGQQAGGAVHRHLELVHALQQAGLGLGGGAVDLVGEQDIGEDRPLPEGELRRLLVEDVGARDVGRKQVGRELDAPVGGAQRSRERLRQHGLADPRDVLDQDMPVTEETDDRQLHRLALAHDHGLDLVYQGLGPLRHPGRLLPILHCSDSREEIIAGRERGSNDEVPAKKRRPLALPHGRASGRSEERSLAERKSTCCNRGGTIAALVQCDGSLAPHRHYVKGEAGKMPAEFILGLDIGVASIGWALVEQHDGQPAGLKAAGARVFEAGVKGDIAAGLDKSRATARREARSRRRQLSRRRRRLTKLARLLQRAALLPPGELNSPEQLLGYFDSLDHQLFPSEVRHRDPHTMHYRLRARALDERLTAYEIGRAFYHLAHRRGFLSNRKTAPRRSDAEGVVKKEIGQLGQRIEDRDARTLGKYLSGLDPADERLRGRYLGRKEMVQPEFEAIWQAQAAHYPELLTEALKQEVSEAIFFQRPLKTPARFIGYCELERDQRRAPLAVLPAQRFRLLQKVNDLKIKAWGASYDLTDDQRRRLTQELETKEDLSFDDIRKLLPELSEARFNFETFGEEKLIGNRSAARIAKALGKKHPWQQLPSGEQERLVQEVRTRSRDAIARRARQREYDEKTAEKLSRVRLEEGYCRLSRRALASIVPLMESGMRYAAACKQCYPDLGRGQASAVLPPLDDVVEVRNPTVERALTEVRKVVNAVVRTYGTPSLIRIELARDLKRNREQRKSIYERTTKNQRDRAEARAALDAMGYDPSPRDVEKCLLWWECNRQCPYTGLPISEVALFGAFPEFQVEHIIPLPRSLDNTFANKTLCHVSENLRKSNRTPWEAYGHDPDKWREILDRVGRFRGGGRAREVRSRQRSKQRQSLRTKLDRFQLREARDLAGFTDQQLTDTQYAARLAVEYVGQLYGAGADGNDAEGTKRVQAARGQVTSALRGTWGLNFLGAGEKAREDHRQHAVDAVCVALTDAETIKLLSEAAERGLHTAGQRIDRMEPPWPTLRDDVAHAVYAMVVSHRVSRTVRGQMHNEMFWSPRRRDAEGKEWVHQRKALSALSEADLDSIVDDGIRRRVKDRLRGLDLSNPKQAFRTAANLPTLSHQGREVPIRKVRIRRRDKTRTIGQGARAREVMLESNYHIELFAVTDAKGKVKWDSEVVSTYDAMRRARRKEPVVQHDREGFLFSLAQGEAIELDEGADRGRAVYVVAKITKRGEGQRERRTVGIVRHDDARMSTAPEKEKARSLREPSAEVLRKQGCRKVVITPLGEVRNAGD

SEQ ID NO: 7974 - protein, 1078 aa, synthetic construct
  REGION 1..1078: note = Synthetic
MKSDPSVVAEPSTLVLGLDIGAASIGWALVETNNGSPARLRALGVRIFEEGVEGFNSPKEKSRAAPRREARSRRRMTERTRRRLTKLAHCLQRGGLLPPGDLGTPEALHAYFLQLDRSLFPSPVRKADPHRMHYRLRARALAEKLSEYEIGRALYHLAQRRGFKSNRKALGKGREDDRGTVKTGIKTLQQEMEAANAKTLGEYFGGIDPEKARIRDHYLHRETMVRHEFNLIWQSQASHHPNLLTHELRAAVHDPIFFQRPLKTPERFIRLCELEQKERRAAFTDLAAQRFRLLQKVNDLRYISADGSRRLLTPEERAKLVGRLETKEKMPFDAIRKALKLSGGRFNFETFGETGIVGNRTGARLAKPLSAKRWKALSAEERAQVVEEFCALDSEQALREWGVTRLGLDDRAVAKLLEVGLESGHCNLSRKALDRVLPHMEKGVAYSCAVASCYPDRARAAQRSLLAPLRDVVDVRNPAVERALTELRKVVNAIIRQYGKPGFVRIELARDLKRNRKQRQAITVDIKENEKQRQVAIADLERMGYPPTGWNIEKWLLWEECNHQCPYTGSMISPVDLFGDPPQFQVEHIIPPELCPALGNSFFNKTLCHVRKNQEKGNRTPWQAFGDNPGEWDLMIGRVSKFRGRGTRQVQTQRAGKGGRGKPKPFVHPKLELLQLKDPQDLDDFTRRQLTDTQYAARLGVRYVGQLYGAGVDGVGGDNRKRVEARRAGLTGQLRRGWLLEREEGKRRSDHRQHAVDAVCIALADSARVKQLSDAWHRGWCTPGQRPQRLDAPWPDFRGDVANAVDKIIVSHRVARKLSAALHDELPWSPRRSDPDGRTWAHQRKPVHKLSAKEVADIVDCKVRRCVQDKLRELGKSDPKEAFKSQQDHPRLLTRKGRSIPIHKVRVRKPDPTVTIGAGSRQREVVLGSNHHMEVIKTSDRKGREMWKGLVVSRYEASQRVRAARKSGGKSNAAVETDPAGGGEFLFSLAQGETVELDENESGKRRFYVVTKITKRVPKKGAEVHTVGIVEVNDARPSTGKDKANVRALEEPSAEVLRKRHCRKVVVTPLGEVRRAND

SEQ ID NO: 7975 - protein, 1187 aa, synthetic construct
  REGION 1..1187: note = Synthetic
LRAGDSRIFAFGIGWPGATIRPADRAVRCVAQRFHKRTAPMETRAVARVPMWCSVELVSRSTAISECWQETMVWRIRQAQCQPSEIAVQRNIRIPANSLATWATASYRPVSIAKKMVSNMLTRLALDIGSSSIGWLLYEIVDNRPVRILDGGVRIFGDGREAKTGQSLAVGRRNARAMRRRRDRYLRRRAMLMKRMAEAGLMPQDPDEAAALTVLDPYALRATGLDQALPLTHLGRALFHLNQRRGFKSNRRTDKGDNEGGLIADASARLDQAMMAAGARSYGEFLHMRRAGAGDARAVPAVRTRINPHLTGEGGKEQPGYDFYPDRRHLEEEFHKLWQAQAPHHPELTEELRDLFFETIFYQRPLKAPAIGRCLFLPERRLPKAHPLTQQRTLYETVNMLRVTAPGQPRRRLSRDERDKIVTALNGKAPAKSPGANKLTLVALKKVIKLRPDEAFSLETAMRDAIACDPVRMSLAHPDRYGPGWSALSVDDQWEIIQQLRDEQDGERLVDWLVERTGFDRARARAIADAPLPEGFGRLGETATRRILAALIGGTADHAVATYNEAVEFCGWNHSHLGTGEVLDRLPYYGQILDRHVLPGSGEETDDDVTRFGRITNPTVHIGLGQIRRLVNRMIDIHGRPHEIVLELARDLKMSEEQKRDLAQVNAKNQRAAELRSQKLIEELKVEDNGRNRAILRVWEESAMDVLKRCCPYTGERISATMLFDGSCDIDHILPYSRTLDDGFNNRVICLKSANREKRNKTPWEAWGGTSKWPAIEANLKNLPDGKSWRFQPDAMEKFEGQRDFTARALVDTQYLSRLAREYLESLYADALSTGRRPIWVVAGKLTEMLRRHWGLNGLLPDAHRGTAKAKNRQDHRHHMIDAAVIGATDQGMVKRIADIAKANVENGLEELAGSIPPPWEDFRNDLDKQLRMTTVSHRADHGRIDPQAKRQGRDSTAGQLHNDTAYRLTGESVRGVPLVVTRKPFDSLTQAMLDKLRDPHLASLLRQAIGDKSGKELQAALKTFRERPGPYHRIRHVRIIEPVDVIQIRDRQGRPYKGYKGDSNQRYEVWRMPDGKPVHQVVSTFDAHQPGEKKPHPAAKRLMRFHKGDMVRLDNSKFGPVVAVVVKFSSIGTIVMVAHNESNADQRYRRDKEDVFIRFQPSSLMKSGARRVLVDETGRMRDSGAI

SEQ ID NO: 7976 - protein, 1171 aa, synthetic construct
  REGION 1..1171: note = Synthetic
MEQNTDNLTRLGLDIGTNSIGWWLYSTDGNRITDVMDGGVRIFSDGRDPKSGASLAVDRRAARSMRRRRDRYLRRRAALVRKLSKAGLAFSISEEGVKKGVALMRKLSKAGPMQLYPGAEGGAALMRKLSEAGLMPDGPEAAKALEVLEALDGELGDADRGEAAKALEALALLDPYALRAWGLDKKLPLAHLGRALFHLNQRRGFKSNRKTDRGDNESGKIKPATKRLDEEIKKNKARTYGKFLHMRRSGEPEEPGEDGTRPDDRRTKSVRTRSSMARRGDAEKEEEGYDFYPDRRHLEEEFRELWDAQVKHHPDVLTDDLKKALFKTIFHQRPLKKPAVGLCLFSGQHGVPSDERRLPKAHPLTQRRVLHETVNNLRVTADGRAKRSLTLEQRDRIIHALDNRKATKSLKSMKLTLDQLGKVIELAPDERFTLETIARDAIACDPVRASLSHPDRFGPRWSDLDLDAQWEVIRRLREVQSEADHKCLVAWLVKTHGLTKEHASATANAPLPEGYGRLGETASRKILGALEADVVTYDQAVKSCGWHHSDHRTGEVLDELPYYGEILDRHVIPGSGQPGDDDITRFGRITNPTVHIGLNQLRRLVNRIIATYGKPDQIVVELARDLKQSDKQKKDTQNRIKTNTEAARKRSKTLEEELGQADSGANRMLLRLYEELGPAIGPRCCPYTGKPISVTMVFDGSCDVDHILPYSRTLDDSVANRTLCLREANREKGNRTPWEVWGETPRWDMIAANLEHLPKNKRWRFAPDAMERFEGENDFLDRALVDTQYLSRIARSYLDALYTEGGHVWVGLTEMLRRHWGLNSLLPDHNKGAAKAKNRTDHRHHAIDAAVIAATDRGLIKQISDAARRGEGDGLSAEEVARTTPEPWEGFRGDVRNQLNRIIVSHRADHGRIDPSAKKRGQDSTSGQLHNDTAYGIVDEQSVVSRKPLLSLTSDDIARTSMGKRIRDPYLQSLLSEVIKGREDKKDIEAALAAFAASDHLPNGEPNPYRGIRHVRLIESLQSSARVEIRDRKGEPYKAYKGDSNHCYEVWRMPDGKPKAKIVTTFEAHGDAVDRPHPAAKRLLRLFKRDMVAIERNGETLICHVQQFNLSDGVVLAAHFEANADARNRDRDDDFRFIRMGPSSILKARLRRVLVDEIGRVRDPGPTHPMD

SEQ ID NO: 7977 - protein, 1169 aa, synthetic construct
  REGION 1..1169: note = Synthetic
MWCNRMLVNDSTAGFELWAIYRIFSASRARSLRVASRVKIMLRWAGCRGKVPGKMRPGRERMGTRLGLDIGTNSIGWWLYATDGGEIAGVLDGGVRIFSDGRDPKSKASLAVDRRMARGMRRRRDRYLRRRAALMKRMADAGLMPADPQAAKALELLDPYELRARGLDEALPLPHFGRALFHLNQRRGFKSNRKTDRGDNESGKIKDATRRLDQEMAVAIKDESKRTLGAFLHMRRQKTPEKPLTEPKENKDHTRKDYRRTPSVRTRMSVAVRGGPDAKAEEGYDFYPDRRHLSEEFDKLWAVQARFHPEVLTDDLRDEIRLIIFHQRRLKVPKVGLCLFTEEERLPAAHPLNQRRILYETVNALRVTAPGEAVRALTREERDQIIHALDNRKHTKSLSGMALKLKALGKTIGLRSDQHFTLETANRDSIACDPVRASLSDPRRFGPGWSALDDREQWRVVRRVRNVQGERCAQVVVDWLIRQHGLPQSNAWEVLNAPLPEGYGRLGRTATTRILAALEAEVIPYSAAVARCGWHHSDERTGEVLTELPYYGKILERHVIPGTYEEKDDDITRYGRITNPTVHIGLNQLRRLVNRIITVHGRPDEIVVELARDLKRSEDQKREMQREIRENTKEAIRRGEKLDELGVRNTGENRMVLRLWEDLNPEDCLKRFCPYSGQRISASMLFDGSCDVDHILPYSRTLDDSFANRTLCLKEYNRQKSNKTPWEVWGETAQWATIEANLKNLPKNKAWRFAPDAMEKFEGERDFEARALKDTQYLSRIARTYLSALYDGADGKSHVWVVPGRLTEMLRRHWGLNALLSEGKAANKAKNRTDHRHHAIDAAVIAATDRSLIQRISKMAKRDELAGAEEVARAVPAPWEDFRDDIAAQLARITVSHRADHGRIDPQARKSGRDSTSCALHQETAYGLTGETDPRGVPLVVTRKPLSSLTPALIAREAPGKGGMIRDAELRRRLAVATKGKEGKAFEAAIQDFVAKPGAYQGTRHVRVVEPIGVAPIHNGKAKPAKSYATSGNHRYEVWRMPDGKIVDWVVPNFYAHKADLPTDARPATPATCLRPHPAARLLLKLQKNDMVRLRDASGALVVATVEKFSSTGIIEMVPHSEANAADRYSKDKSDNVYIRKTANTLLKAEARRVYVDEMGRVRDPGKAG

SEQ ID NO: 7978 - protein, 1120 aa, synthetic construct
  REGION 1..1120: note = Synthetic
VSCQGAISHLFQENAPVCPIEFGTLDVCHFESLPWMALCVDINQGSNNYSPIFFIWVRNMLRLGLDIGSTSIGWFLYRITNGMIAEIIDCGVRLFSDGRDAKTGVSSAVERRNARALRRRRDRYLRRRAALMRRLAAAGLMPEDPSQAKPLELLDPYRLRADALDRRLELTELGRALFHLNQRRGFKSNRQTDRGNNEGGKIIDGSARLDQAMMAVGARTYGEFLHLRRSQAEDPRRVPSVRTRLTLRSVDGGKAETGYDFYPDRRHLEEEFNKVWAAQAAHHPVLTDSLRHEVFETIFFQRPLKAPAVGRCLFFPEPRLPRAHPLTQRRVLYETVNALRIRTESGAAVPLGKEQRDKVIMLLDGKAPVKAIASAKLSLKAIAKHLKLRDGQTFTLEKGRDYIACDPVRASLSHPDRFGPRWSVLEAEVQAEIVGRIRDDDDTMALVEWLKQVHGLDDAHARATADAPLPEGYGRLGETATRKLLDCLKAEVLTYSEAVGKALDQHHSDRRTGEILESLPYYGEVLQAHVIPGTGEPHHDDITRFGRITNPTVHIGLNQLRRLVNRIIARYGKPAEIVVELARDLKQSTGQKKAAIALNLKNRKAAEARSALLTEWGVPDTGANRMCVRLWQELHEDPMMRRCPYTGTIISPSLLFSGAIDIDHILPYSRTLDDSTANRTLCMKEANRQKRNKSPSEARRDGMRIWALEDDNLRHIPEFKRWRFAEDAMARFEGERDFEARALVDTQYLSRISKAYLETLYDGADGKSHVWVVPGRLTEMLRRHWGLNGILTDPLRDVTKEKNRMDHRHHAIDAAVVAATDRGLIKAMAEQARTDVDQGREALASSIMPPWPGFREAVAAQVDRIIVSHRPDHGRIDLTTRMKGRDQTTGPLHRDTAYGLTGQSEKGVPLVVTREPFDNLTPTMIGKIRDEPLKAALAAVTAGKKDNAFAEALAHFRDRPGPYHGIRRVRLIEPISVVEIRDASGRAYKGYKGNSNHCFEVWRLPGGAITEHIVSTFDAHQPGPEPRPHPAAKRLLRLFKSDMVKLDDSKFGPVIATVVMFDRNGKISLVPHTASNARKRCEKYKEDLYLRFTARTLIEAGARRIIVDETGHFRDPGRKG

SEQ ID NO: 7979 - protein, 1104 aa, synthetic construct
  REGION 1..1104: note = Synthetic
LAHTSYAFKLHLIRVQGILFEIVIWMVNMRLGLDIGTNSIGWWLYETDGAKADAPITGVIGGGVRVFSDGREPSSETKIGPPLAVKRRTARAMRRRRDRYLRRRATLMKVLASAGLMPADPAEAKRLEALDPYELRTTGLDAALPLTHLGRALFHINQRRGFKSNRRTDRGDNESGKIKDATARLEQEMLTSGARTYGEFLHMRRRRATDPRNVPTVRTRLSIAKRDGPDGKEEAGYDFYPDRKHLEEEFHKLWSAQASYHPELTDELRDLVFEKIFFQRPLKEPKVGLCLFTAEERLPKAHPLTQRRVLFETVNQLRVTADGREKRPLTLEERDLIIHALDNKKPTASLKSMTMKLPALAKVLKLRDGERFTLETSVRDAIACDPVRASLSHPDRFGSRWSVLEPDAQWEVISRTRKVQSDADHAALVEWLMQEHGLERDHAEGTAKAPLPEGYGRLGLTATTRILDRLKTDVVTYAQAVAACGWHHSDKRTGECLDRLPYYGEVLDRHVIPGTYDENDDDITRFGRITNPTVHIGLNQLRRVVNKIIEVYGKPDQIVVELARELKQSEQQKKDAMKRIRDTTEAAKKRSEKLEELGIEDNGRNRMLLRLWEDLNPDDAMRRFCPYTGKRISAAMIFDGSCDVDHILPYSRTLDDSFANRTLCLREANREKRNQTPWKAFGGTPKWDAIEANLKNLPENKRWRFAPDAMQRFEGENDFLDRALVDTQYLARISRTYLDTLYTKGGHVWVVPGRLTEMLRRHWGLNSLLSDKDRGAVKAKNRTDHRHHAIDAAVVAATDRSLLNRISRAAGEGEEAGQSAELIARDTPPPWEGFRIDLEVQLGRIVVSHRADHGRIDKQVRKLGRASTAGQLHQETAYSIVDDIHVASRSDLLSVKPAQLLDEPGRSGQVRDPQLRKALRVATADKTGKDFEKALREFAAKPGPYQGIRRVRIIKPLQEQARVPVPAQDPIKAYQSGSNHVFEIWRLPHGKIEAQVITTFEAHTLEGDKRPHPAAKRLLRVHKGDMVALERNGRTVVGHVQKMDIANGLFIVPHNEANADTRNNDRSDPFKWIQIGARPAVASGIRRVSVDEIGRLRDGGAKPI

SEQ ID NO: 7980 - protein, 1094 aa, synthetic construct
  REGION 1..1094: note = Synthetic
LKSTLAIASISSLGWVIELGENRIMRLGLDIGSTSIGWWIYETTDGQITSVIDGGVRIFSDGRDPKSKGSLAVDRRVARAQRRRRDRYLRRKAALMKRMAEVGLMPSDPKQAKQLEALDPYELRARGLDETLELTELGRALFHLNQRRGFKSNRKTDAGDNESGKIIDATARLDWAMRDHRARTYGEFLHMRRQKADTPRTTPAVRTRLTIAARDGAEKEESGYDFYPDRQHLRDEFDALWEAQAEYHGVLTEDLRDEIGTIIFHQRPLKTPKVGKCLFTNEERVASAHPLNQRRILVETVNALRVAQLGEVARALTLEERDTILHALDNKAHTKSLSGMSIKLKALGKVIKLRSGQYFTLETANRDAIACDPVRASLSKPDRIGSYWSTLDHNAQWEVVNRIRAVQSDADHRELVAWLVSQHRLAAEHAEGAAYAPLPDGYSRLGITATKRILAALEANVIPYSKAVESCGWHHSDERTGEVLDRLPYYGEILDRHVIPGTYDDSDDDITRFGRITNPTVHIGLNQLRRLVNRIIEVHGKPDEIVVELARDLKLSQDQKADVERTIKKNTQAAIRRGEKLEEMGVPNTGGNRMVLRLWEDLNDDDVMKRFCPYTGQRISAGMLFDGSCDVDHILPFSRTLDDGFTNKTLCLKEANRKKRNYAPHEAAEKGLLDRDAMDSVAKYLPDNKAWRFAPDAIERFEGERDFTARALKDTQYLSRLARTYLDALYDGGDDKSHVWVVPGRLTEMLRRHWGLNGLEALADSDEKTVKRKNRTDHRHHAIDAAVVAATDRSLIQKISKIAASDEQAGAEDTLKSTPPPWDSFRDDIAAQLQNITVSHRADHGRTDSLAKGRGEDTTSGALHEATALGIIDETHVTVRIPIESLKSGHLIEGSRNGYIRDPYLRDQLTLATKNGSDKDFTTVLQKFFDRSKRYGGTRRVRIIKTLQDTARISVPHNAPIKAYKGGSNHAFEIWRLPNGKIESQVITTWEHHNLTEPKRPHPAAKRIIRLHKTDMVAIERDGKTVICFVQKTDPSNGAFLVPHFEANADGRKRKNEPVEWYQMSANSLIKADLRRVGVDEMGRVRDPGPPPIR

SEQ ID NO: 7981 - protein, 1090 aa, synthetic construct
  REGION 1..1090: note = Synthetic
LQSKAPPSRLLALVVILERQMRLGLDIGAASIGWWLYETEGQGTSTRITRVIDGGVRIFSDGRDPKSKASLAVDRRAARAMRRRRDRYLRRRASLMKVLSRSGLMPSDPAEAKPLELLDPYALRAQGLDQALPLTHFGRALFHLNQRRGFKSNRKTDRGDNENGKIKDASQRLDWAMHEAKARTYGEFLHLRRQKAPDPRQVPTVRTRLSVGKRGGPDAKEEAGYDFYPDRRHLEEEFHELWSAQAQFHPELTQDLRDLVFEKIFYQRPLKEPKVGLCLFTSEERLAKAHPLTQRRVLYETVNQLRITADGRSVRPLSREQRDQIILALDTKKPTKSLNSMVVTLQALGKVLKLREGERFTLESGVREAIACDPVRAAMLATFGPRWSALDWPEQWQVISRVRKLQDDKDFAELVEWLIELYGVDKEAAVKIANTHLPEGYGRLGLTATTRILDRLKSNVFTYAQAVAACGWHHSDQRTGECLDRLPYYGAVLDRHVIPGTYDENDDDITRFGRITNPTVHIGLNQLRRLVNKIIEVYGKPNQIVVELARELKQSEQQKNDAIKLIRDTTTAAKQRSEKLEELGITDNGRNRMLLRLWEDLNPDDAMRRFCPYTGQRISAAMIFDGSCDVDHILPYSRTLDDGFANRTLCLREANREKRNQTPWEAWGGTPNWEAIETNLKNLPENKRWRFAPDAMARFEGENDFLDRALVDTQYLARISRTYLDTLFTEGGHVWVVPGRLTEMLRRHWGLNSLLTDKDRGAVKSKNRTDHRHHSIDAAVVAATDRSLLNRISRAAGQGEVAGQSAELIARETPPPWEGFRNDLKSQLGRIIVSHRADHGRIDRQARKQGRDSTAGQLHQETAYSIVDDTRVASRIDFLSVKPAQLLDQPGRSGQVRDLQLRKALRVATGDLTGKDYEKALRDFAAKPGPYKGIRRVRIIKPLQEQARVPVPVLDPIKAYQGGSNHVFEIWHLPDGKVEPQVITSFEAHALEVEKRPHPAAKRLLRVHKGDMVALKREGRTVVGHVQQMHIKNGLFIVPHNEANADARNSDRTDPFKWIQIAAQPAIAAGIRRVAVDEIGRLRDGGAKTI

SEQ ID NO: 7982 - protein, 1086 aa, synthetic construct
  REGION 1..1086: note = Synthetic
MHTRLGLDIGTNSIGWWLYETDGDRIISVLDGGVRIFSDGRDPKSGASLAVDRRAARSMRRRRDRYLRRRSALMRKLAEAGLMPKHPAEAKALESLDPYALRAQGLDEALPLHHLGRALFHLNQRRGFKSNRKTDRGDNESGKIKDATARLDQAMMTKGARSYGELLHMRRAAAPDPRQTPSVRTRLTVARRGHAEKEEAGYDFYPDRRHLEEEFHKLWDAQGAFHPETLTDDLKDALFEIIFYQRPLKAPAIGLCLFAGMGDVPDGERRLPKAHPLTQRRTLYETVNNLRVTSDGRERRPLTLEERDQVIGLLDTKKSTKTLTSMAMKLPALAKALKLPPGARFTLETANRDAIACDPVRASLSHPDRFGPNWSKLDPDQQWEIVRSIQAVESDAEHSALVDWLCEAHGLNRDHAEATAHAPLPEGYGRLGETATRMILSVLENDKDEDGYPLTYAEAATRCFGHHSDMRTGEVLDALPYYGETLERHVIPGTGDRHDDDITRFGRITNPTVHIGLNQLRRLVNGIITVHGKPDQIVVELARELKMSEKQKTEVNKKNRDNRAAAEKRSEKLAELGQADTGANRMVLRLWEDLGHDVMTRNCPYTGQRISAGMLFDGACDVDHILPYSRTLDDSFANRTLCLREANREKRNQTPWEAWGETDQWHAIEANLKNLPDNKRWRFAPDAMERFEGENDFLDRALVDTQYLSRIAKTYLEALYTKGGHVWVVPGRLTEMLRRHWGLNSLLPDHNKGAGKAKNRTDHRHHAIDAAVIAATDRGLINRISKAAGREEADGKSAEDIARDTPEPWEHFRSDIRTQLDKITVSHRADHGRIDPQARKQGRDSTTGRLHNDTAYGIVDDQSVVSRVPLLALKPGDIEVTSRGKNIRDPFLQKHLARVTRGKTAPKEIEAALVQFASAETLPDGKDNPYRGLRHVRLIESLQASARVVPPSQPFKAYKGDSNHCFEIWRMPDGKPKAQVITTFEAHGADPRKPHPAAKRLLRLFKRDMVAMETDGRTATYYVQKFSQAGTLCLAPQTESNADARDRDSADDFKLIRTSASSMVKAGIRRVFVDEMGRLRDPGPAG

SEQ ID NO: 7983 - protein, 1085 aa, synthetic construct
  REGION 1..1085: note = Synthetic
MQTRLGLDIGTNSIGWWLYELEGEEIARIIDGGVRIFPDGRDSKSKSSLAVDRRIARSMRRRRDRYLRRREVLMRRLVDAGLMPGDSELVKKKLEKDPYALRARGLREELSLHELGRVLFHLNQRRGFKSNRKTDRGDNESGKIKDATARLDHDMMAKGARTYGEFLNMRRSETPEKPEYEGKPENKDGTRQDDRRTKPVRTRMSVARRGGPDAREEDGYDFYPDRRHLEEEFEKLWAAQEPHHPRVLTDALRDALFRIIFYQRPLKEPEIGLCQFENEPRLPKSHPLFQHRVLYETVNNLRITRDGDASRPLTLAQRDTITLLDAKKPTKTLASMQIKLPALAKALKLPKGERFTLQTANRDAIACDAVRASLAHPDRMAGLWSKLDEDTQIDIVARIRAVQSDAEFNDLVNWLQDKFSLPEDQARETANAPLPEGYGRLGETATRRILDVLKSDVVTYDKAVAACGWHHSDTRTGEVLDKLPYYGAVLDKHVIPGSRDESKHNPEDQAAEYYGRITNPTVHIGLNQIRRLVNRIIDVYGKPHQIVMELARELKQSKKQKDAWENTNKNNRKAAEQRSRKLVELGQEDTGANRMILRLWEYLNKDDCMKRFCPYTGERISAGMLFDGSCDVDHILPYSRTLDDSFANRTLCLRAANREKRNHTPWEAWGGTAQWSVIEANLHHLPDNKHWRFAPDAMDRFEGERDFLDRAIVDTQYLSRIARDYLDTLFTEGGHVWVVTGRMTAMLRRHWGLNSLLPDHDKDTAKNRTDHRHHAIDAAVIAATDRALVQRIARAAGRDEGDGQSAERVAREIAPPWDGFRKDIRDRVDRIIVSHRADHGSLNGTVGALHEATAMDWVDKHHVATRIPVNKLEPSHLIEGGKSDTLRDEFLRTKLARATDRLEGKAFEHAVTEWFSRPGPYYGTRRVRVLKALGEKSRVCVQHKNTDKKKVYQGGSNHRFEIWRMPDGEIIPQVVTVWEFHNLKTPKRPHPAAKRLLSVHKNDMVAIERDGNTRICSVQKTSVGVGAVLVPHNEADADARRRRKEAVEWFQMSATSLIKGGIRRVFVDGLGRVRDPGRPVWAGLT

SEQ ID NO: 7984 - protein, 1084 aa, synthetic construct
  REGION 1..1084: note = Synthetic
MRLGLDIGTNSIGWFLYATNNGQISDVVDGGVRIFSDGRDPKSKASLAVDRRAARAQRRRRDRFLRRKAALMKRMAEVGLMPTDPAQAKTLELLDPYALRAEGLDQALPLTHFGRALFHLNQRRGFKSNRKTDRGDNESGKIKDATKRLDEEMAIKKARTYGEFLHMHRSEKPEKPSLQPRMNKDGSRTDDRMTKTVRTRLSVARRDNAEKEEAGYDFYPDRRHLSDEFEQLWAAQAKYHPDALTDDLRDEIALIIFHQRPLKTPKVGLCLFTDDERIPSAHPLNQRRILFETVNALRVAVRGEAARELTREERDQIVHALDNKKHTKSMSGMSIKLRALGKVIKLRTDQVFTLETANRDAIACDPVRASLSHPDRFGPRWPQLDAGAQWEVIKRIRAVQSEAEHEALVAWLMTTHALERGHADHTARAPLPEGYARLGLTATTQILAALEADVIPYSAAVAACGWHHSDGRTGEVLTELPYYGQILDRHVIPGSYDEQDDDVTRYGRITNPTVHIGLNQLRRLVNRIITVYGRPDEIVVELARDLKLSEDQKRDVQRDIKKNTDAAIARGKKLEEMGVPNTGANRMVLRLWEGLGDDVMTRNCPYSGRRISAGMLFDGSCDVDHILPYSRTLDDGFANRTLCLKEFNRQKANKTPWEAWGNTPQWEAIAANLKNLAPNRAWRFATDAMERFEGEKDFSDRALKDTQYLSRIARTYLDALYDGQDKKRHVWVVPGRMTEMLRRHWGLNNLLTEGKAAVKAKNRTDHRHHAIDAAVVAATDYGLINRISKAAGRDEKDGKGAGEVARTTPEPWEGFRADIGAQLDKIIVSHRADHGRIDREGRRKGRDSTTGQLHNDTAYGIVDDQTVVSRTPFLSLKPGDIELTTRGKNIRDAQLQKALAVATKGKDGKPFEEALRLFAAKPGPYQGIRHVRLIETLQASARVEILDATGKPVKAYKGDSNHCYEIWRMPDGKAKAQVITTFEAHGKIARRPHPAAKRLLRVFKRDMVVIERECEMLICYVQKFDPANGVFLAPHIEANVDARNRDKNDPFRLRQMGTGPAIKAKIRRVYVDEMGRMRDPGTAS

SEQ ID NO: 7985 - protein, 1082 aa, synthetic construct
  REGION 1..1082: note = Synthetic
MRLGLDIGTNSIGWWLYETDGFGAKARITGVINGGVRVFSDGRDPQSGASLAVDRRTARAMRRRRDRYLRRRATLMRLLANAGLMPADPVEAKALEALDPYALRAAGLDEALPLTHLGRALFHINQRRGFKSNRKTDHGDNESGKIKEATGRLEQEMMAKGARTYGEFLHLRRTRASHPRHVPTVRTRLSVANRDGPNGKEEAGYDFYPDRRHLEEEFHKLWAAQATFHPDLTNNLRDLVFEKIFYQRALKEPEVGLCLFSGYDDIPPDERRLPKAHPLSQRRTLLETVNQLRVTLDGRERRPLTREERDQIIHALDNKKPTKKPPMSATQGPTLTLKYLAEKVLRLPDGQRFTLETGVRDAIACDPVRASLSHPDRFGPRWSTLDPGSQWEVISRIQNDADYAALVEWLASTYALDRDHAEAIANAPLPAGHGRLGLAATTRILEKLEEDVVTFADAVAACGWHHSDQRTGECLDRLPYYGEVLDRHVIPGTYDAKDDDVTRYGRITNPTVHIGLNQLRRLVNLIIEVYGKPDQIVVELARELKQSDQQKREVMKRIRDTTEAAKKRSKKLEELGIEDTGRNRMLLRLWEDLNPEDIMRRFCPYTGRRISAAMIFDGSCDVDHILPYSRTLDDSFANRTLCLREANREKRNQAPWEAWGGTPKWDAIETNMKNLPENKRWRFSPDAMQRFEGEKDFLDRALVDTQYLARISRAYLDTLFTEGGHVWVVPGRLTEMLRRHWGLNSLLSDRDRGAVKVKNRTDHRHHAIDAAVVAATDRSLLNRISRAAGQGEEAGQSAELIARDTPPPWDGFRSDLDAQLRKIIVSHRADHGRIDREGRKHGRGSTSGQLHQETAYSIVDDTHVASRTDLLSVKPAQLLDELGRSGQIRDPQLRKALRVATAEKIGKDYEKALRDFAAKPGPYQGIRRVRIIKPLQEQARIPVPEQRPIKAYQGGSNHCFEIWQLPDGQIQSQVITTYEAHRLECHKRPHPAAKRLLSVHKGDMLALEREGRTVVGYVQQMHVKNGLFIVPHNEANADARNSDKTDPFRWIQIAARPAVDAGIRRIAVDEIGRLRDGGAKRR

SEQ ID NO: 7986 - protein, 1079 aa, synthetic construct
  REGION 1..1079: note = Synthetic
MRLGLDIGTSSIGWWLYETDGAGSDARITGVVDGGVRIFSDGRDPKSGASLAVDRRAARAMRRRRDRYLRRRATLMKVLAETGLMPADPAEAKALEALDPFALRAAGLDEPLPLPHLGRALFHLNQRRGFKSNRKTDRGDNESGKIKDATARLDMEMMANGARTYGEFLHKRRQKATDPRHVPSVRTRLSIANRGGPDGKEEAGYDFYPDRRHLEEEFHKLWAAQGAHHPELTETLRDLLFEKIFFQRPLKEPEVGLCLFSGHHGVPPKDPRLPKAHPLTQRRVLYETVNQLRVTADGREARPLTREERDQVIHALDNKKPTKSLSSMVLKLPALAKVLKLRDGERFTLETGVRDAIACDPLRASPAHPDRFGPRWSILDADAQWEVISRIRRVQSDAEHAALVDWLTEAHGLDRAHAEATAHAPLPDGYGRLGLTATTRILYQLTADVVTYADAVKACGWHHSDGRTGECFDRLPYYGEVLERHVIPGSYHPDDDDITRFGRITNPTVHIGLNQLRRLVNRIIETHGKPHQIVVELARDLKKSEEQKRADIKRIRDTTEAAKKRSEKLEELEIEDNGRNRMLLRLWEDLNPDDAMRRFCPYTGTRISAAMIFDGSCDVDHILPYSRTLDDSFPNRTLCLREANRQKRNQTPWQAWGDTPHWHAIAANLKNLPENKRWRFAPDAMTRFEGENGFLDRALKDTQYLARISRSYLDTLFTKGGHVWVVPGRFTEMLRRHWGLNSLLSDAGRGAVKAKNRTDHRHHAIDAAVIAATDPGLLNRISRAAGQGEAAGQSAELIARDTPPPWEGFRDDLRVRLDRIIVSHRADHGRIDHAARKQGRDSTAGQLHQETAYSIVDDIHVASRTDLLSLKPAQLLDEPGRSGQVRDPQLRKALRVATGGKTGKDFENALRYFASKPGPYQAIRRVRIIKPLQAQARVPVPAQDPIKAYQGGSNHLFEIWRLPDGEIEAQVITSFEAHTLEGEKRPHPAAKRLLRVHKGDMVALERDGRRVVGHVQKMDIANGLFIVPHNEANADTRNNDKSDPFKWIQIGARPAIASGIRRVSVDEIGRLRDGGTRPI

SEQ ID NO: 7987 - protein, 1078 aa, synthetic construct
  REGION 1..1078: note = Synthetic
MHTRLALDIGTTSIGWILYELVNGQPASILDGGTRIFSDGREAKTGHSLAVGRRTARGMRRRRDRYLRRRAALMKRLAAIGLMPESPEAAAQLATLDPYELRARGLDHPLPPEHLGRALFHLNQRRGFKSNRRTDKGNNEGGMIADASARLEQAMMAAGARSYGEFLHKRRAEATAPRATPAVRTRINPHLTGEDGKEQPGYDFYPDRKHLEDEFHRLWEAQARHNPDLTPAMGDLLFQTIFHQRPLKAPAVGRCLFLDEPRLPKAHPLTQQRTLYETVNMLRIAPPGQPKRRLSRVQRDQIVHALNNRKILASPGKNVLTLAAIGKLLKLRPGEAFSLDTANRDAIACDPVRMSLAYEGRFGPQWSALSVESQWELIQRLRDDQDGAALVDWIMDRYGFDRDRARAIADAPLPEGFGRLGETATRAVLAVLIGGTTEQEVLTYSEAVAACGWDHSRLGTGEVLDRLPYYGQVLDRHVLPGTGRPEDDEITRFGRITNPTVHIGLGQVKRLVNKVIDAWGRPHEMVVELARDLKMSEDQKRNLAKVNAQNQRAAEMRSAKLIGDLKIEDNGRNRGILRVWEESAADVLHRCCPYTGAQISASMLFDGSCDIDHILPYSRTLDDGFNNRVICLKSANREKRNLTPWEAWGNTPKWAAIEANLKNLPPAKAWRFAPDAMLRYEGERDFTARALVDTQYLSRLAREYLECLYAEDIDPGPHSGKKPRRPIWVVTGKLTELLRRHWGLNSLLPDAHRGTAKAKNRLDHRHHMIDAAVVGATDHATVQRIANMAKGNVENGLEDLAGTILPPWPGLRDDLKARLERTIVSHRGNHGAIDPAARKQGRDTTSGQLHNDTAYGLTGETLKGVPLVVNRKPIDMLTPAMIDKIRDPHLSRWLTAVTKGKEGKDFKAAVEAFRAHPGPYRGIRRVRLIEPVEVIRIKDRNGRPYKGYKGDSNQCYEVWCLPDRTLTHHVVSTFAAHQGQTGKPHPAAKRLARLYKGDMVRLDRSKFGSVIATVEKFDRNGQLELVPHNEGNADQRYRKDKSDSVFIRLRAATFIASGARRVIVDEMGRIRDPGPGKH

SEQ ID NO: 7988 - protein, 1074 aa, synthetic construct
  REGION 1..1074: note = Synthetic
MRLGLDIGTNSIGWWLYATERGQITEVVDGGVRIFSDGRDPKSKASLAVDRRAARAQRRRRDRYLRRKAALMKRMAEAGLMPAEPSEAKKLEALDPYALRAEGLDKELPLTHFGRALFHLNQRRGFKSNRKTDRGDNESGKIKNATARLDQAMIIKGARTYGEFLHMRRSTVSDPKQVPSVRTRLSVARWEDAEKEEAGYDFYPDRRHLSEEFAKLWMAQAMFHPNVLTDNLRDEIALVIFHQRPLKTPEVGLCLFTEEKRIPSAHPLNQRRILVETVNALRIATPGEPVTGLTTEQRDQIIHALDNKKHTKTLSGMSMTLKALGKIIRLRPDQYFTLETANRDAISCDPVRASLSDPRRFGPNWSSLSSDAQWDVISRIRDVQSEAEHEALINWLTSFNDLDRDHAVEVARAPLPEGYGRLGLTATTRVFAKLDADVIPYSEAVARCGWHHSDDRTGEVLTELPYYGEILTRHVIPGSYDIEDDDIKRYGRVTNPTVHIGLNQLRRLLNRIITVHGKPEEIVVELARDLKLSEDQKRDVQRGIKKNTEAAIQRGKKLEELGVPNTGANRMVLRLWEDLGDDVMVRNCPYSGQRISAAMLFDGSCDVDHILPYSRTLDDSFSNRTLCLKEFNREKTNKTPWEAWGNMDQWDAIAANLKNLPKNKAWRFASDAMERFEGENDFSARALKDTQYLSRIARAYLNALYDGGDQESHVWVVPGRLTEMLRRHWGLNSLLSDKNGAVKTKNRTDHRHHAIDAAVVAATDRSLIQRISKIASRDELVGAEQVARSVAPPWEDFQKDVASQLRRIIVSHRADHGRIDPVARKSGNDSTSGQLHNDTAYGLAHDGKVVSRKPLMSLGAGDIAISKRGANIRDADLQRHLARVTRGLDGKDLEKALSNFANAPKLPDQSDNPYFRVRRVRMEDTLQKSAQVQVADRDGKVFKAYKGDSNHCYEIWQLPKGKIKSQVITTFEAHQTGLDRKPHPAAKRLLRVFKRDMVAIERDGETIIGYIQKLDAANGLFIAPHAEANADARNRDKIDPFKLIQMSAGPLIKANIRRVYVDEMGRLRDPRQPK

SEQ ID NO: 7989 - protein, 1073 aa, synthetic construct
  REGION 1..1073: note = Synthetic
MRLGLDIGTNSIGWWLCETDRADARVRINGVLAGGVRIFSDGRDPKSRASLAVDRRAARAMRRRRDRYLRRRATLMKVLANAGLMPSTPEEAKALELLDPYELRATGLDQILPLTHLGRALFHINQRRGFKSNRKTDWGDNESGKIKDATARLDLAILANGARTYGEFLHKRRQRAVDPRHVPTVRTRLSIANRDGPDGKEEAGYDFYPDRKHLEEEFRKLWAAQANFHPELTEDLHDLIFEKIFYQRPLKEPKVGLCLFTSEERLPKAHPLTQARVLYETVNQLRVIADGRETRRLTLEERDQIIYVLDNKKPTVSLKSMAMKLPALARTLKLRDGERFTLETGVRDAIACDPVRSSLSHPDRFGPRWSTLDATAQWEVVSRVRKVQSEAEHAALVDWLMQAYSIDRNHAEATANAPLPEGFGRLGQTATTSILERLKADVVTYAEAVAACGWHHSDQRTGECLDRLPYYGEVLDRHVIPGTYDANDDEVTRYGRITNPTVHIGLNQLRRLVNRIIETYGKPDQIVLELARELKQSEQQKRDAIKRIRDTTEAAKKRSEKLEELGIEDNGRNRMLLRLWEDLNPEDAMRRFCPYTGERISATMIFDGSCDVDHILPYSRTLDDSFANRTLCLKEANREKRNQTPWKAWGDAPKWDTIEAKLKNLPENKRWRFAPDAMERFEGEKDFLDRALVDTQYLARISRTYMDTLFSEGGHVWVVPGRLTEMLRRHWGLNSLLSDKDRGAVKAKNRTDHRHHAIDAAVVAATDRSLLNRISRAAGQGEAAGQSAELIARDTPPPWEGFRDDLRVQLDKIIVSHRADHGRIDREGRKQGRDSTAGQLHNDTAYGVVDAMTVVSRTPLLSLKPSDIAVTPKGKNIRDPQLQKALEIATRGKEGKAFEAALRQFAEKAGAYQGLRRVRLIETLQESARVEIGTRSEGGPLKAYKGDSNHCYELWRLPDGKVKPQVVTTYEAHAGIEKRPHPAAKRLLRTFKRDMVALERNGETVICYVQKFNQAGILFLASHLESNADARDRDPNDSFTLFRMSPGPMHKAGIRRVSVDEIGRLRDGGAETH

SEQ ID NO: 7990 - protein, 1072 aa, synthetic construct
  REGION 1..1072: note = Synthetic
MRLGLDIGTNSIGWFLFETENGAITSVLDGGVRIFSDGRDPKSGASLALDRRAARAQRRRRDRFLRRKAALMKRMAEVGLMPRDPAQAKELQALDPYALRAEGLDQALPLAHFGRALFHLNQRRGFKSNRKTDRGDNESGKIKDATARLDQAMMAKRARTYGEFLHMLRAAAPDPKRMPTVRARLSVAKRDLSEKEEAGYDFYPDRRHLSDEFEKLWQAQAAHHPDTLTDDLRDEIAAIIFHQRPLKAPEVGLCLFTEERRIPSAHPLNQRRILVETVNALRIAARGEAARPLTREERDQIVHALDNKKHTRSLSGMAMKLKALGKVIRLRPDQSFTLETANRDAIACDPVRASLSNPDRFGAGWSALDMEAQWEVIDRIRSVQSDRDHAALTDWLMREHGLDRNRAEATGNAPLPEGYGRLGETATRRILAALESDVIPYSAAVAACGWHHSDGRTGEVLDALPYYGEILDRHVIPGTYDEKDDDITRYGRITNPTVHIGLNQLRRLVNRIITVYGKPDEIVVELARDLKLSEDQKREVQRGIKKNTDAAIARGKKLEELGVPNTGANRMVLRLWEALGDDAMKRSCPYTGQRISVGMLFDGSCDVDHILPYSRTLDDSFSNKTLCLREANRAKTSQTPWEAWGGTPQWDKIAANLKNLPDNRAWRFTPDAMERFEGENDFSARALKDTQYLSRIARSYLEALYDGGDGTSHVWVVPGKLTETLRRHWGLNGIENLTDKGSQTVKAKNRTDHRHHAIDAAVIAATDRGLIKRIATAHHREETEGLEDQARSTSPPWEGFRADVAAQIARITVSHRADHGRIDPSARKAGRDSTAGALHKDTAYGLVDENHVTHRKPLMSLSASDIAKKVRDPFLQRHLLRVTRGLDNKEFEKALDDFTKTPLLPDHRPNPYLGLRRVRLVEPLKSEARVPVTDATGKTYKAYKAGRNQCYEIWKTPDGKVVPWVISAYDAHQTTETSKPHPAAKRILRVHKRDMVAIERDGRRLICYVQKLDINNGLFLVPDTEADADRRNSDKSDPFKFIQMSAGPLFKACIRRVYVDEMGRLHDPGPKV

SEQ ID NO: 7991 - protein, 1072 aa, synthetic construct
  REGION 1..1072: note = Synthetic
MRLGLDIGTNSVGWWLYKTDGEAASARIVEVIDGGVRIFSDGRDPKSKTSLAVDRRVARAARRRRDRYLRRRASLMKLLARTGLMPADPVEAKKLERLDPYELRSTGLDDALPLTHFGRALFHLNQRRGFKSNRKTDRGDNENGKIREATARLDLEMMTSGARSYGEFLHMRRQRASDPRHVPSVRTRLSVAARGGPDAKAEAGYDFYPDRHHLEEEFHALWAAQATHHQALTDDLRDLVFEKIFYQRPLKEPKIGLCLFTAEERIAKAHPLTQRRVLFETINQLRVTADGRSTRPLTLEERDTLVHALDNKKPTKSMTSMNMTLKALAKLLKLRDGERFTLETGVRENISCDPVRACMAHPARFGPQWSSLDWEAQWDVISRVRQVQSEGEFIELTDWLIQGHGLDADHAKAVGNAPLPEGYARLGFSATERILDQLKAEVCTYSDAVAKCGWHHSDQRTGACLEVLPYYGEVLDRHVIPGTYDATDDEITRYGRITNPTVHIGLNQLRRLVNKIIEVHGKPDQIVVELARELKQSEPQKKDAMKRLRNTTADAIRRSEQLEQLGQPNTGHNRMLLRLWEDLGPAIGPRCCPYTGKTISVTMVFDGSCDVDHILPFSRTLDDSFANRTLCLKEANREKSDRTPWEAWGGTDQWDDIAANLKNLPEKKRKRFGPDAMEWFEGENDFLDRALVDTQYLAKISRMYLDTLFTKGGHVWVVPGRMTEMLRRHWGLNALLNDKDRGAVKAKNRTDHRHHAIDAAVVAATDYRLMQKISRAAGQGENAGQSAELIARDTDAPWEHFRADIASQLEKIIVSHRADHGRIDVEGRKTGRDSTAGRLHNDTAYGVIDDLTVASRTPLMSLKPSDIAITERGKNIRDPQLQNALYVATKGKEGKMFEQALVDFASKEGPYQGIRRVRLVETLQKAARVEIGKTESGQPLKAYKGDSNHCYELWKLPDGKIVPQVVTTYEAHAGSAPRPHPAAKRILRVFKKDMVKLTKDGEEIVGYVQSMHIKNGLFVAQHLEANADARNRDKTDPFKFLQMGAGTLVKTGLRRVLVDEIGRLRDPGPPKL

SEQ ID NO: 7992 - protein, 1072 aa, synthetic construct
  REGION 1..1072: note = Synthetic
MRLGLDIGTNSIGWWLYATAGTGASARIVAVIDGGVRIFADGRDPKSKASLAVDRRVARAMRRRRDRYLRRRTTLMKVLVDAGLMPSDPAAAKALETLDPYELRATGLDVMLPLTHLGRAVFHLNQRRGFKSNRKTDRGDNESGKIKDATKRLTWAMQEAGARTYGEFLHMRRARASDPRQVPSVRTRLSVASRGGPDSKEEAGYDFYPERAHLEDEFHALWSAQAAFHPDLTCELRDVVFEKIFYQRPLKEPKVGLCLFTAEERLPKAHPLTGRRVLYETVNQLRVTADGRTTRPLTLEERDMIVYALDNKKPVKSLSSMHLKLVALGKLVKLKDGERFTLESGVRDAIACDPIRATMGHPDGFGPAWSRLDWQAQWALIEKLRQVQSDDDFASLVAWLGATHNLSEDHAKRVANLHLPEGYGRLGLTATEAILCNLKAEVCTYSQAVERWGKHHSNQRTGECLEALPYYGEVLDRHVIPGTYNEDDDDVTRYGRITNPTVHIGLNQLRRLVNRIIATYGKPDQIVVELARELKQSEAQKSEALKKIRDTTADAIRRGRQLEEIGQKNTGANRLLLRLWEDLGPAVGPRCCPYTGKPISVTMLFDGACDVDHILPYSRTLDDSFANRTICLREANRQKGDRTPWEAWGGSDQWDAIEANLKDLPENKRKRFAPDAMERFEGERDFLDRALVDTQYLARISRAYLDTLFTEGGHVWVVPGRMTEMLRRHWGLNALLSDKDRGAGKVKNRTDHRHHAIDAAVIAATDHSLVNRISKAAGQGESAGQSAELIARDTPEPWEGFRNDISAQIARIVVSHRADHGRIDVEGRKHGKDSTAGRLHNDTAYGIVDDHTVVSRTPLLSLKPGDIEVTTKGKNIRDTQLQKALSVATTGKDGKGFEEALRNFAEKEGPYQGIRRVRLIETLQSSARVEVGSDEDGQPLKAYKGDSNHCYDLWKLPDGKVVPHVVSTYEAHAGTDKRPHPAAKRILRVFKKDMVAIEQDDQTAIFYVQKLDRANGLFLAPHLEANADARHRNPNDAFKFLQMGAGSVVRNKLRRVYVDEIGRIKDPGPPKH

SEQ ID NO: 7993 - protein, 1071 aa, synthetic construct
  REGION 1..1071: note = Synthetic
MRLGLDIGTNSIGWWLFETDGAEANARIVAVVKGGARIFSDGRDPKSGASLAVDRRTARAMRRRRDRYLRRRATLMKVLSNAGLMPADPAEAKTLEALDPYALRATGLDEALPLTHLGRALFHLNQRRGFKSNRKTDRGDNESGKIKDATARLDQAILASGARTYGEFLYKRRQRAGDPRDVPSVRTRLTVANRDGPDGKAEVGYDFYPDRRHLEEEYHKLWAAQAGHHAELTDDLRDLVFEKIFYQRPLKEPKVGLCLFTAEERLPKAHPLTQRRVLFETVNQLRVTADGRETRPLTREERDQIIHALDNKKPTASLKSMAMKLAALAKVLKLRDGERFTLETGVRDEIACDPVRASLTHPERFGPRWSTLNADAQWEAISRIRKVQSEAEHAALVDWLMQAHSLDRDHAEATAIAPLPEGYGRLGLTATTRILEKLKANVVTYAEAVAACGWHHSDQRTGECLDRLPYYGEVLDRHVIPGTYDVNDDEITRFGRITNPTVHIGLNQLRRLVNRIIETYGRPDQIVVELARELKQSEQQKKDAMRNIREATEAAKKRSEKLEGLGIEDNGRNRMLLRLWEDLNRDDAMRRFCPYTGERISAAMIFDGSCDVDHILPYSRTLDDSFANKTLCLREANREKRDQTPWEAWGGTLKWDAIEANLKNLPDNKRWRFGPDAMERFEGENDFLDRALVDTQYLARISRTYLDTLFTEGGHVWVVPGRLTEMLRRHWGLNSLLSDKDRGSVKAKNRTDHRHHAIDAAVVAATDRNLLNRISRAAGRGEEAGQSAELIARDTPPPWEGFRDDLRVQLDGIIVSHRADHGRIDKEGRKHGRDSTAGQLHQETAYSIVDDTYVASRTDLLSVKPAQLLDEAGRSGQIRDPQLRKALRAATANKTGKDFENALRDFAGKPGPYHGIRRVRIVKPLQAQARIPVPARDPIKAYQGGSNHCFEIWRLPDGKIMPQVITTYEAHTLDGMIRPHPAAKRLLRVHKGDMVALERGGQTIVGHVQQMHIKNGLFIVPHNEANADARNNDKTDPFNWIQIAARPAIEAGIRRVSVDELGRLRDSGPGR

SEQ ID NO: 7994 - protein, 1071 aa, synthetic construct
  REGION 1..1071: note = Synthetic
MRLGLDIGTNSIGWWLYRTENDQITCVVDGGVRVFSDGRDPQSKESLAVDRRVARAQRRRRDRYLRRKAALMKRMAEAGLMPADPVQAKALQALDPYDLRARGLDEALPLAHFGRALFHLNQRRGFKSNRKADRGDNESGKIKDATARLDWAMRDARARTYGEFLHMRQDKADDPRRVPTVRTRLSVARRDNAEKEEAGYDFYPDRRHLSEEFDALWAAQAEHHTTLTDDLRDQIKTIIFHQRPLKAPEVGLCLFTDERRIPSAHPLNQRRILLETVNGLRIVARGEAARGLTREERDQIVHGLDNKGHTKTLSGMSMKLRAIGKVIKLRSDQSFTLETANRDAIACDPVRASLSHPERMGGVWTTLDEDAQWDVVQRLRAVQSDTEHEALVDWLMATHGLGQDYAQATANAPLPEGYGRLGLTATRKILAALEADVMSYSDAVAACGWSHSGGPTGEVLEALPYYGEILDRHVIPGTGVKTDEDVKRFGRITNPTVHIGLNQIRRLVNRIICVHGKPDQIVVEVARDLKNSEDQKREIQKTIRKNTDDAIKRGKKLVEELGQKDTGANRLILRLWENLGNDVMTRQCPYSGKRISAAMLFDGSCDVDHILPFSRTLDDSIWNKTLCLKEENRKKANKTPWEVWGETDQWDVIVANLKNLDRKQAWRFAPDAVERFEGENDFSARALKDTQYLSRVARAYLDALYDGADGKSHVWVVPGRLTEMLRRHWGLNGIEVLTDSDAQTVKSKNRQDHRHHAIDAAVVAATDRSLIQRISKIAKHDEQAGAEQVARSVPPPWDGFRDDVAGQIGRIIVSHRADHGRIDPTARAQGSDTTAGQLHMDTAYGIVDGGHVVSRKPLMSLGAGDIRKIRDPDLQRHLTRVTRGLDKKEFEQALASFAASRKLPDQSENPYFGLRRVRLLDALQDSARVPVRNATGNIYKAYKAGSNHCYEVWRMPDGKVKPWAISTFEAHQSGDGSKPHPAAKRLLRVFKRDMVVIERKGITVICYVQKMDVANGLFLVPHTEGNADARNRDKEDDFKFIQMSAASLIKARIRRVHVDEMGRMRDPGPPR

SEQ ID NO: 7995 - protein, 1142 aa, synthetic construct
  REGION 1..1142: note = Synthetic
MVWTHVCPNDMVFLRQMHAGLVFDILAWTQAAYSHTKVSHSLTMAATLLRINPQQTSLFWRTAMEFRLGLDIGTNSIGWWLYAIQNGEITDVVDGGVRIFSDGRDPKSKASLAVDRRAARAQRRRRDRFLRRKAALMKRMAEVGLMPADPDEAKALEQLDPYQLRAEGLDRKLELSHFGRALFHLNQRRGFKSNRKTDRGDNESGKIKDATKRLDEEMAIAIPDASKRTYGHFLHLRRQSAPTPRETPQVRTRLTVARRDNSEKEEAGYDFYPDRRHLADEFDKLWQVQAEHHPALSDALRNEIRLIIFHQRPLKSPEVGLCLFTDEKRIPSAHPLNQRRILVETVNALRIAARGEPARRLTREERDQIVHALDNKPHTKTLSGMNMKLKALGKIIKLRPEQSFTLETANRDAIACDPVRASLSDPRRFGPRWSTLSQDTQWEVVSRIREVQSEAQHDALVDWLVAEHGLEWVKAEDTAHAPLPEGYGRLGLTATSRILAELEADVIPYSEAVARCGWHHSDDRTGEILNELPYYGEVLTRHVIPGTYDDTDDDITRYGRITNPTIHIGLNQLRRLVNKIITVYGKPDEIVVELARDLKLSEDQKREVQRSIKKNTDAAIKRGDKLEELGVPNTGANRMVLRLWEDLNPEDSLRRFCPYSGERISAAMLFDGSCDVDHILPYSRTLDDGFANRTLCLKEFNRQKTNKTPWEAWGDTPGWEAIAVNLKNLPQNKAWRFAPDAMERFEGENDFRDRALKDTQYLSRIARSYLNTLYDGADGKSHVWAVPGRLTEMLRRHWGLNSLLPDKNGAVKAKNRTDHRHHAIDAAVVAATDRSLIKRISDMAKRDEQAGAEEVARSTEPPWEEFRADISSQLNRIIVSHRADHGRIDPAARRSGRDSTTGQLHNDTAYGVVSKDTVVSRKPLLSLKPNDIEVSKRGANIRDADLQRHLARVTHGLDGKAFEQALADFANVRTLPDQSLNPYFGLRRVRLEESLQESARVSIADPTGKVFKAYKGDSNHCYEIWRMPDGKIKPQVITTFEAHQSGPPKKPHPAAKRLLRVFKRDMVAFEKDGEQHIGYVQKIGSNGVFFAPHQESNADARNRDASDPFKFTSMGGTSLIKSGFRRIHVDEMGRIRDPGATT

SEQ ID NO: 7996 - protein, 1050 aa, synthetic construct
  REGION 1..1050: note = Synthetic
MRLGLDIGTNSIGWWIFAQDSQGNPVQVIDGGVRIFADGRDPKSKASLAVDRRVARAMRRRRDRYLRRRTVLMERLAAAGLMPANPIARKALERLDPYRLRAKGLDHALTLSELGRAIFHLNQRRGFKSNRKTDRNDNDSGKIASGAARLEQAIIAAGARTYGEFLHQRRKTDDPRKTPAVRTRMTTLTLGDKPEEGYDFYPTRNLLEEEFNKIWRAQEKHHVELTDELHDTLFETIFYQRPLKAPAIGRCLFEEEERLPKAHPLFQRRILFETVNALRIREAGQSDRPLTLEERDTLILQLDGKNVKGTASANVSFIQMRRGLKLGGDQSFSHETQNRKGIDCDRLRALITYPERLGGRWSGLDTDAQWALVQRLRDTENAAELEAWLKAEYGLSEARAMNVANTPLPEGYGRIGLTATRKILEHLMAEVITYDKAASEIYGDHRGIATGEILDELPYYGEILDKHVIPGTSEPSDDDITRFGRITNPTVHIGLNQIRRLVNKIIEVHGKPDEIVVELARELKQSEDQKREINKVIRKNTDAAIERGKKLEELGQRNNGANRLILRLWEGLNPDVMDRRCPYTGTKIAGSMLFDGSCEVDHILPYSRTLDDSIANRTLCMRAANREKGNKTPWEAWGHISERWEQIAPLIKRLPGNQQWRFAPDAMEKYGDEAQFLDRQLVDTQYLSRIAREYLSRLYPTEESRVWVTPGRLTEMLRRHWGLNSLLGDHNLAKPKNRHDHRHHAIDAAVIAVTDRSLINRISKMAGRNENLEDATCKIAPPWKAFRDDLKAQLDLITVSHRADHGRINFNGRSQGRDSTAGQLHNDTAYGFTDEEGIVVTRKPLLAIKPADIGRIRDTDLQAQLYQEAEGLEGKEFEAALAKFSAKTGPYQGIRRVRLSEKLKTIPIKDGRGKTYKGYKGDSNHCIEVWKLPDGKWKAELLTTYDAHQNGLGSTRPHPAAGLLMRLFKKDVVQLEHPEEGSLTAIIVKFTEQNLSLAPLNEANVDARSRSKDDQFKFLNVGTGTFQKRALRKIHVDEIGRIRNTPAGGR

SEQ ID NO: 7997 - protein, 1071 aa, synthetic construct
  REGION 1..1071: note = Synthetic
MRLGFDIGTNSIGWWLYATDGNEITGVIDGGVRIFSDGRDPKSKASLAVDRRGARAQRRRRDRYLRRKAALMKRMAAAGLMPADPVAAKALEQLDPYALRASGLDQELPLTHLGRALFHLNQRRGFKSNRKTDKGDNESGKIKDATARLDQAMIAKGARTYGEFLHMRRASAPDPKCVPTVRTRLSIAPRDNAEKAEAGYDFYPDRRHLFEEFTKLWAAQAANSPDILTDELRDEISVIIFHQRPLKTPEVGLCLFSGSHGVPQNDKRIPSAHPQNQRRILFETVNNLKVAARGELARGLTRDERDTIAHALDNKAHTKSLSGMSMKLKALGKLIKLRPEQSFTLETANRDSIVCDPVRASLSHPDRFGSRWSTLDAEAQWDLVQRIRAVQSDAEHNALVAWLIATHGLDRVHAENVANAPLPEGHGRLGMTATKRILAALEAEVIPYSAAVAACGWHHSDGRTGEVLTELPYYGQILDRHVIPGTYDENDDEVTRYGRITNPTVHIGLNQLRRLVNKIVTVYGKPDEIVVELARDLKLSEDQKRDVQRDIKKNTEAAITRGQKIEELGYANTGANRVMYRLWEELGPAIGPRCCPYSGKPISASMIFDGSCDVDHILPYSRTLEDGFSNRTLCLKEFNRQKTNKTPWEAWGNTPAWDAIEANLKNLPANKAWRFAPDAMERFEGENDFSARALKDTQYLSRIARSYLDALYDGADGKSHVWVVPGRLTEMLRRHWGLNSLLPDKDGAVKAKNRSDHRHHAIDAAVVAATDRSLVQRISKMAQRDEVNGAEEVARSVPPPWDDFRTDIKSQLDRIIVSHRADHGRIDFAARQTGNDSTSGALHEATALSIIDDQNVAVRIPLLSLSAAQFEEGGRSGWVRDPQLRGALHLATKGKDKKDFEAALLSFAAKPGPYHGISRVRIEKPLQDTARVYVPADAPIKAYQGGSNHRYEVWKLPDGKVLHHVVSMFVAHQGNLTRPHPAAKRIYQFMKGDLVRLEDSKFGPVIATVEKFNGKGMIELVPHNEANASDRYRKTKEDLYIRLGATTLLRAKARRVHVDEMGRLRDPGPPQ

SEQ ID NO: 7998 - protein, 709 aa, synthetic construct
  REGION 1..709: note = Synthetic
MRLGLDIGTNSIGWWLYQTEKDRAGKREITAVIDGGVRILSDGRDPKTKASLAVDRRAARAMRRRRDRYLRRRATLMKRMAEVGLMPSDPAEAKALEALDPYELRARGLDEALPLPHLGRALFHLNQRRGVKSNRKTDRGDNESGKIKDAIRRLDQEMAAAIKDESKRTLGAFLHMRRQKTPEKPSTEPKKNKDHTRKDYRRIPPVRTRLSIAARGGPDAKEEAGYDFYPDRRHLDEEFAKLWAAQAEHHPALTDDLRDAIHTIIFHQRPLKAPEVGLCLFSGQNGVPSDEKRLPKAHPLTQRRVLYETVNALRIAEPGQAERALTMDERNILILALDNKKHTKSLSGMKLALKALGKQIKLRPGQHFTLQTANRDSIACDPVRASLSDPACFGPNWSALDAEAQWEVVQRIRAVQSEADHAALVQWLMATHGLEREQAENTAHAPLPEGYGRLGLTATRRILAELEADVIPYSEAVARCGWHHSDEPTGEVLDTLPYYGKLLTRHVIPGSYNPDHDDITRYGRITNPTVHIGLNQLRRLVNRIITVYGKPDEIVVELARALKQSKKQKDKAKSKIKKNTEAAIRRGEKLEELGIPNTGANRMVLRLWEDLNPDDCMKRFCPYSGQRISATMLFDGSCDVDHILPYSRTMDDSFANRTLCLKEYNREKKRQNSVGHLERNGSMGQNRGQFKISAQKQGLALCPGCDAAL

SEQ ID NO: 7999 - protein, 1084 aa, synthetic construct
  REGION 1..1084: note = Synthetic
MRLGLDVGTNSIGWWLYASENNTITDVIDGGVRIFSDGRDPKSKKSLAVDRRAARAQRRRRDRYLRRKAALMKHMATAGLMPSDPTEAKALEVLDPYRLRSEGLDRELPIAHFGRALFHLNQRRGFKSNRKTDRGDNENGKIKDATKRLDEEMAIKQARTYGEFLHMRRSEKCEKPASEPALNMDGTRNDDRRTKPVRTRLSVARRDNAEKAEAGYDFYPDRRHLSDEFEQLWAAQAQFAPEVLTDDLRDEIAMIIFHQRPLKTPEVGLCLFTNERRIASAHPLNQRRILVETINGLRIAARGEAARGLTREERDQILHALDNKAHTKSMSGMAMTLKALGKTIKLRPDQSFTLETANRDAIACDPVRASLSHPDRFGPRWSMLDCDRQWHVIERLRAVQSEAEYVELVNWLISAHGLDRDHAEAVANAPLPEGYGRLGLTATRNILAALEADVIPYSAAVAACGWHHSDGRTGEVLTELPYYGQILDRHVIPGTYAETDDDVTRYGRITNPTVHIGLNQLRRLVNRIITVYGRPDEIVVELARDLKLSEDQKREVQRDIKKNTDAAIARGKKLEEMGVRNTGANRMKFRLWEELGPTIGPRCCPYSGEVISAAMIFDGSCDIDHILPYSRTLDDGFANRTLCLTAFNRAKSNKTPWEAWGGTPAWENIAANLKNLKDNKAWRFAPDAMERFEGEKDFTERALKDTQYLARIACRYLEALYDGGDERRHVYAVPGRMTEMLRRHWGLNRLLPDRDGAVKAKNRTDHRHHAIDAAVVAATDHALINRISKAAGRDEEGGKGAEDVARTTLPPWEGFRDDIARQVDTIIVSHRADHGRIDREGRKSGQDSTAGQLHNDTAYGIIDDHTVVSRAPLLSLKPADIAVTTKGKNIRDPQLQHALAVATKGCEGKALEEALIAFSAKPGPYQGISRLRLTESLQSSARVEITGPSGQPLKAYKGDSNHCYEIWRMPDGKPKAQVITTFEAHGEAIRRPHPAAKRLLRVFKRDMVAIEREGERLICYVQRFDPANGIFLAPHVEANADARSRAKGDPFRILQMGLGPAIKARIRRVHVDEMGRLRDPGPVG

SEQ ID NO: 8000 - protein, 1079 aa, synthetic construct
  REGION 1..1079: note = Synthetic
MRLGLDIGTNSIGWWLYETESAGTDSAIKGVIDGGVRIFSDGRDPKSGASLAVDRRAARAMRRRRDRYLRRRASLMKVLAGAGLMPADPAEARSLTLLDPYELRARGLDEPLPLAHLGRALFHLNQRRGFKSNRKTDRGDNESGKIKDATQRLDWAMHDACARTYGEFLHMRRARATDTRNVPSVRTRLSVAGRGGPDAKEEAGYDFYPERRHLEAEFHALWAAQAEHFPDVLTGGLRDLVFEKIFYQRPLKEPVVGLCLFSGHHGVPAREKRLPKAHPLVQRRTLYETVNQLRITADGRETRPLIREERDRVVHSLDNKAPTKSLSSMSMTLAALAKVLKLRDGERFTLETGVRDAIACDPVRASLSHPDRFGPRWSALAWGDQWEVIGRIRAVESDSDHEELVAWLIGAHQLDADHAAATANAPLPEGYGRLGLTATQAILEQLRADVLTYSEAVAACGWHHSNQRTGEYLDRLPYYGEVLERHVIPGTYDESDDEITRYGRITNPTVHIGLNQLRRLLNRIIDIHGKPDQIVVELARELKQSEQQKREAMKRIRDTTADAQRRSRQLEELRQPDTGHNRMLLRLWEDLGPAVGPRCCPYTGETISVTMLFDGSCDVDHILPYSRTLDDSFANRTLCLQQANRDKRNRTPWEAWGGTLLWDAVEANLKNLSENKRWRFAPDAMERFEGEREFLDRALVDTQYLARIARTYLDTLYTKGGHVWVVPGRMTEMLRRHWGLNSLLSDADCGAVKAKNRTDHRHHAIDAAVVAATDRSLLNRISRAAGQGEEAGQSAELVARETPPPWEGFRSDVKARLTTMIVSHRADHGRIDPQARKSGRDSTTGQLHNDTAYGIVDATTVVSRTPLLSLKPGDIVVTPKGKNIRDPQLQMALEVATRGKDGKAFEAALAEFAARPGPYRGLRRVRLIEALQQSARVEIGTGADGRPLKAYKGDSNHCYELWRLSDGKVTPQVVTTFESNTGVEKRPHPAAKRLLRIFKRDMVAVERDGQTLICYVQKLDVANGLFLAEHTEANADARHRDKDSGFRLLQLGAGSIVKARLRRVFVDEAGRLRDPGPKG

SEQ ID NO: 8001 - protein, 1076 aa, synthetic construct
  REGION 1..1076: note = Synthetic
MRLGLDIGTNSIGWWLYQTDDGMITGVVDGGVRIFSDGRDPQSKESLAADRRAARAQRRRRDRYLRRKAALMKRMAEAGLMPLDPAKAKALEVLDPYDLRARGLDEALPLVQFGRALFHLNQRRGFKSNRKTDRGDNESGKIKDATARLDWAMRDGKARTYGEFLYMRQQEADDPKHVPTVRTRLSVALRDNAEKEEAGYDFYPDRRHLSEEFDALWETQATYHSALTDDLRNQIKTIIFHQRPLKTPEVGLCLFTDERRIPSAHPLNQRRILMETVNALRVVARGEAARDVTLQERDQIVHALDNKGHTKTLSGMTMKLKALGKVIKLRKDQSFTLETANRDAIACDPVRASLSHPDRMGRIWTTLDADAQWGVIQRIRDVQSDSEHDRLVDWLMDKHVLDRAQAQATANAPLPEGYGRLGLTATRRILAALESDVIPYSAAVAACGWSHSGGPTGEVLDTLPYYGQILDRHVIPGTYDESHDDVKRYGRITNPTVHIGLNQIRRLVNRIILVHGKPAEIVVELARDLKNSEEQKREIQKAIKKNTDAAIMRGKKLVNDLGQKDTGANRLRLRLWEDLGPTIGPRSCPYTGKPISASMIFSDQCDVDHILPFSRTLDDSFSNKTLCLKEANRLKGNKTPWEVWGDTPQWGEIAVNLKNLPDNKAWRFSPDAMERFEGETDFAARALKDTQYLSRIARAYLDALYDGADGKSHVWVVPGRLTEMLRRHWGLNGIEALTDSDTQTVKPKNRMDHRHHAIDAAVVAATDRSLIQRISKIAKHDEKTGAEQVVRSVPPPWDRFRDDIAAQLSKIIVSHRADHGRIDPQARAQGRDTTSGQLHNDTAYGVIDEGHVVSRTPLTSLKPGDIEVTTKGKNIRDPFLQKHLARVTRGLDGRAFEAALVAFARAAKLPDDTENPYFGLRRVRLSESLTKRARIEVADRNGKPFKAYKGDSNHCYEVWRLPGGKIKSQMVTTFEAHQAAVEKKPHPAAKRLLRFFKRDMIALERDGALFIGYVQKMKAGGLFIAPHTEANADARDRDSKDTFRFLNIGGGSLIKAKARRIHVDEMGRMRDPGPPR

SEQ ID NO: 8002 - protein, 1081 aa, synthetic construct
  REGION 1..1081: note = Synthetic
MHTRLALDIGTSSIGWILYQITDDRPTRILDGGVRIFGDGREAKTGQSLAVGRRTARGMRRRRDRYLRRRAALMKRLGTAGLMPSDPAQAAALNAIDPYELRALGLDHRLPLPHLGRALFHLNQRRGFKSNRRTDKGDNEGGLIKDATARLDQAMMAAGARSYGEFLHMLRQQAGDARDVPAVRTRINPHLTGEDGKEQPGYDFYPERRHLEEEFHKLWQAQAQHHAALTDELRDSLFETIFYQRPLKTPAVGRCLFLPEPRLPKAHPLTQRRTLYETVNMLRVVTPGEAKRRLTREERDIVIHALDNRKILAGPGKNVMTLAALGKDIKLRPDQSFSLETANRDSIACDPVRMSLGYEGRYGAQWSTLTIEQQWELIQQLREQQDGEALVQWIMDRTGFDRNRARAIADAPLPEGFGRLGETATRRILEVLIGGTADQEVATYNEAVAFCGWDHSRFGKGEALERLPYYGEVLDRHVLPGTGEPDDDPVTRFGRITNPTVHIGLGQVRRLVNLIIDTHGRPDQIVLELARNLKMSEEEKRELAKTNAKNQRAAEANSDDIAILNDTRAAGQPAIVDNGASRAILRIWKESSSDVLNRVCPYTGTQITPAMLFDGSCDIDHILPYSRTLDDSFPNRVVCLKSANREKRNQTPWEAWGNTPKWPVIEANLKNLPGNKAWRFQPDAMTRFEGERNFEARALVDTQYLSRLTREYLESLYADALAAGRRPIWVVAGKLTELLRRHWGLNGLLPDAHRGTSKAKNRQDHRHHMIDAAVVGATDHSMVQRISKMSAANIANGLEALAGTILPPWPGLRDDLKTQLDRTIVSHRADHGRIDAQARKQGRDSTSGQLHNDTAYGLTSETLNGVPLVVSRKPIDSLTPAMLDKIRDSHLAGLLRHAIEGKEGKDLKAAIEAFRGRPGPYHRIRHLRLIEPVDVIKIRDRNGKAYKGYKGDSNQCYEVWRLPDGRLTHHVVSTFDAHQGGESRPHPAAKRLIRLFKDDMVKLDDSKFGPVIATVRKFDVNGGLSLVAHNESNADQRYRKDKEDVFIRMQPSALIRAGARRVVVDEMGRFRDPGRPPDRIR

SEQ ID NO: 8003 - protein, 1093 aa, synthetic construct
  REGION 1..1093: note = Synthetic
MTHRCRIVRGLMGEFMRLGLDIGTNSIGWWLYATDGENITEVIDGGVRIFSDGRDPKSKASLAVERRAARAMRRRRDRYVRRRASLMRKLADSGLMPADPAQAKALELLDPYALRATALDDALPLHQLGRALFHVNQRRGFKSNRKADRGDNESGTIKDATQRLDLEMALKGARSYGEFLHMRRMTAPDPRREPSVRTRLTVAQRGGPDAKEEAGYDFYPDRRHLEDEFTQIWEVQRHHHPDVLTDDLRAALYETIFYQRPLKEPEVGLCLFSGYGDVSSDERRLPKAHPLAQRRVLYETVNSLRITADGRQSRPLVLEERDAIIHALDNKKATKTLASMRLSLDAIGKVIKLAPGEKFTLETANRDSIACDPVRSSLRHDDRFGPTWSILDAQAQWQVISRIRAVQSDADFAELIDWLMQTYGLDRDHAVATANAPLPEGYGRIGETATRRILDALESDVLTYSEAVTACGWHHSDHRTGEVLEQLPYYGEILERHVIPGSFDHSRHDPVKQAAEYYGRITNPTVHIGLNQLRRLVNLIITVYGKPDQIVVELARELKQSEQQKAEINRKNRENRAAAMRRSAQLAECGKPDTGANRMLLRLYEDLGPAIGPRKCPYTGKPITATMVLNGECDVDHILPYSRTLDDSFANRTICLREANREKGNKTPWEAWGDTPQWEAISANLNSLPGNKKWRFAPDAMERFEGENSFLDRALVDTKYLSRLARTYLDALYTRGGHVWVVPGRLTEMLRRHWGLNSLLSDKEGASKAKNRTDHRHHAIDAAVVAATSRSLIKQIADSAKHDEQDGKSAEDIARSIPHPWEDFRNDISGQLERIIVSHRADHGCIDPASRRQGRDTTTGQLHNDTAYGIVDEQTVVSRSPLLALKPGDIEITTKGKNIRDSYLQSKLALVTKGKDGKAFEEALRNFAASDDKYRGIRHVRLIESLQSSARVEIDGPNGKPMKAYKGDSNHCYEIWRLPDGKTKAQVTTTFEAHAGSARRPHPAAKRLLRLFKRDMVAIEREGETVICYVQKFNQAGILFLAPHTESNGDARDRTAGDPFSLFRMSINTLVKAHIRRVYVDEMGRLRDPGPVA

SEQ ID NO: 8004 - protein, 1071 aa, synthetic construct
  REGION 1..1071: note = Synthetic
MRLGLDIGTNSIGWWLYQTDDGTITDVLDGGVRIFSDGRDPQSKESLAVDRRVARAQRRRRDRYLRRKAALMKRMAGAGLMPTDQAHAKKLESLDPYALRAEGLDCELPLTHLGRALFHLNQRRGFKSNRKTDRGDNESGKIKDATARLDWAMRDAKARTYGEFLHTRQQKADDPKRMPTVRTRLTVARRDNAEKEEAGYDFYPDRRHLSEEFDALWAAQADYHEALSDDLRDQIKTIIFHQRPLKTPEVGLCLFTDERRIPSAHPLNQRRILLETVNALRIVARGEAARRLTLEERDQIVHALDNKNHTKTLSGMAMKLKALGKVIRLRSDQTFTLETANRDAIACDLVRASLSHPDRMGGVWTTLDEGAQWEVVQRIRAVQSDSEFDALVVWLEQNHGLDNAHAQATANAPLPEGYGRMGLMATRRILAALQSDVMPYSDAVAACGWSHSGGPTGEVLEKLPYYGKILDRHVIPGTYDENNEDVKRYGRITNPTVHIGLNQIRRLVNRIICIHGKPDEIVVELARDLKNSEDQKREIQKIIKKNTDAAIKRGEKLINELGQKDTGANRLVLRLWEDLGHDVMTRNCPYSGKRISAGMLFDGSCDVDHILPYSRTLDDGIANKTLCLKEANRQKSNNTPWEVWGETEQWDTIAANLKNLPDNKAWRFASDAMQRFEGENDFSARALKDTQYLSRIARAYLDALYDGGDGNSHVWVVPGRLTEMLRRHWGLNGLEALTDSDENTVKAKNRMDHRHHAIDAAVVAATDRGLIQRISKIAKRDEQAGAEEVARSVSPPWDGFRDDIAAQLSRIIVSHRADHGRIDSQAKQQGEDATAGQLHMDTAYGVVDAGRVVSRKPLLSLSESDIKKIRDPDLQRHLTRVTKGLDKKEFEHALSDFANARKLPDQSENPYFGMRRVRLIDALQDSARVSVRDRDGHIYKAYKAGSNHCYEVWRLPDGKIKPWAISTFEAHQTGTESKPHPAAKRLLRVFKRDMVAIERDGETLMCYVQKMDIANGLFLVPHTEGNADARNRDKDDSFKFIQMSAVSLIRAKIRRIHVDEMGRLRDQGPPR

SEQ ID NO: 8005 - protein, 1074 aa, synthetic construct
  REGION 1..1074: note = Synthetic
MRLGLDIGTNSIGWWLYETDGQGASARIIGVIDGGVRIFSDGRDPKSKASLAVDRRAARAMRRRRDRYLRRRATLMKVLAKSGLMPADPTEAKALELLDPYTLRAKGLDEALPLTHFGRALFHLNQRRGFKSNRKTDRGDNESGKIKDATRRLDDALHDARARTYGEFLHMRRQRASDPRHVPTVRTRLSVAARGGPDAKEESGYDFYPDRRHLEEEFHELWETQSAYHPDVLTDDLRDLVFEKIFYQRPLKEPKVGLCLFTAEERLPKAHPLTQRRVLYETVNQLRVTADGRETRPLTLEERDRIIHAIDNKKPAKSLSSMKLSLTALGKVLKLRDGERFTLETGVRDAIACDPVRSVMIHPEAFGPNWSKLDWQAQWEVISRIRKVQSEDEFADLVSWLMERYGLDAEHAQKTANAHLPEGYGRLGLTATQRILDRLKAGVVTYAEAVAACGWHHSDQRTGECLDTLPYYGEVLDRHVIPGTYDEKDDEITRYGRITNPTVHIGLNQLRRLVNKIIEVYGKPDQIVVELARELKQSDAQKREAMTRIRNTTADAIRRSETLREHGVKDTGHNRMLLRLFEELGPAIGPRCCPYTGEVITATMVLNGECDIDHILPYSRTLDDSFANRTLCLKEANREKRDQTPYEAWGDNAGRWAKIEANLKNLSDNKKWRFGPDAMERFEGESDFLDRALVDTQYLSRISRAYLDTLYTEGGHVWVVPGRMTEMLRRHWGLNSLLSDKDRGAVKAKNRTDHRHHAIDAAVVAATDRSLINRISKAAGLGEKAAQSAELIARDTPEPWEHFRSDIAIQLEKIVVSHRADHGRIDIEGRKSGRDSTAGQLHNDTAYGIVDDMTVVSRTPLMSLKPSDIEVTTKGKNIRDPQLQKALSVATKDKEGKAFEEALRQFAAKEGPYQGIRRVRLVETLQRSARVEVGQTEKGTPLKAYKGDSNHCYELWKLPDGKVKPQVVTTFEAHAGIEKRPHPAAKRLLRIFKKDMVVLERDGQTIIGYVQSMHVSNGLYIAPHQEANADARNRDKNDQFRFIQIGASPMVKANLRRILVDEIGRVRDPGPPKV

SEQ ID NO: 8006 - protein, 1077 aa, synthetic construct
  REGION 1..1077: note = Synthetic
MRLGLDIGTNSIGWWLYATHEGEICGVIDGGVRIFSDGRDPKTKASLAVDRRAARAQRRRRDRFLRRKAALMKRMAETGLMPVDPAEAKALEQLDPYALRALGLDQELPLAHFGRALFHLNQRRGFKSNRKTDRGDNESGKIKDATARLDQAMMAKDARTYGEFLHLRRAAAPDPKQVPTVRARLSVARRDTDAKEEAGYDFYPDRRHLSEEYDKLWAAQAGYHPDVLTDELRDEIALIIFHQRPLKTPEVGLCLFSDEKRIPAAHPLNQRRILVETVNALRVAAKGEAARGLTREERDQILHALDNKKHTKSLAGMVMKLKALGKTIKLRPEQSFTLETAIRDAIACDPVRASLSHPDRFGSRWSTLDADTQWQVIERIRAVQSDAEHNALSDWLVSEHALDRDHAETAANAPLPEGYGRLGLTATKRILAALEAEVIPYSEAVARCGWHHSDRRTGEVLEQLPYYGEILDRHVIPGSYDEKDDDITRYGRITNPTVHIGLNQLRRLVNRIITVYGKPDEIVVELARDLKLSEEQKKEVNKTIKKNTDAAAQRSKKLDEMGIPDTGANRMVLRLWESLSDDAMLRKCPYSGQQISAQMLFDGSCDVDHILPYSRTLDDGFANRTLCLKEFNRQKSNKTPWEAWGGTPQWDKISANLKNLPENRAWRFAPDAMERFEGENDFAARALKDTQYLARIARTYLEALYDGQDGKSHVWVVPGRLTEMLRRHWGLNGITALSDNGKKTVKAKNRTDHRHHAIDAAVIAATDRALIQRISKMAGSDELEGAEDVARAVPPPWVEFRDDIAAQLQRIIVSHRADHGRIDPAARKSGRDSSSGQLHNDTAYGLTSDGTVVTRKPLMSLKPGDIAITNRGANIRDADLQRHLARVTRGLEGKDFEQALAKFADARKLPDHSDNPYFGIRRVRMEEALKVISIKDKNGRAYKGYKPDSNARYEIWKLPDGTVSHHVVATFDAHNDTTSKPHPAAKRLHRFHKGDLVRLEQSKFGPVVATVEKFNVNGGIELVPHNEANASDRYRKSKEDLYIRLSAATLIKSGGRRVYVDEMGRVRDPGVAQDLRA

SEQ ID NO: 8007 - protein, 1056 aa, synthetic construct
  REGION 1..1056: note = Synthetic
MRLGLDIGSNSIGWWLYETNQNNEIIGHIVGGSRIFPDGRDPKSKASLAVGRREARSARRMRDRYLRRRTVLMNTLATAGLMPDSPDDRKALEGLDPFELRAHGLSERLELVELGRALFHLNQRRGFKSNRKTDGKDNEGGKIKDGAARLDQAILTAGAKTYGEFLHVRRVAAKDERAIPPVRTRLGLVQSDDKQVSGYNFYPTRALFEEEFTKLWTAQAAHYPKVLTDELRDEIWQIIFYQRPLKEPKIGLCFFEDEPRMAKAHPLFQERRLYETVNALRVVEDGHGARPLTLDQRDALVLKLQDAKTVSFAQLRKVLKLLPDQRFSLERGNRTKVDGNEVRYALKKAYGANWSVLSFEDQWAIIQAVRKAEDTATLLDQLQSKFDMGEDQAKEVAQVSLPDGYGRLSETATRKILEKLKAGVVLYSKAASDIYGSHSDDGTGELLDELPYYGELLQRHVIPGSHDAKQHDPVKDAAEYWGRITNPTVHIGLNQLRRLVNDIIRIHGMPDQIVVELARDLKNSEKEKKKINVEIRKLTDAAIMRGKEIETEIGEHANTGRNRLKMRLWEDSHPNALLRCCPYCSGAIGITSLFDGSTEIDHILPYSQTLDDSVANKVVCHQLCNQEKSNKHPYKAWGHIPAKWDVISTNLKNLPHNKAWRFAPDAMERFEGESGFLARQLTDTQYLSRISREYLSRLYPDPKTAPVWVVPGKLTEMLRRKWALNELLQDSENHHTVKKKNRQDHRHHAIDAAVIAATDRGLLQQISRTSARSAEMGKKEEANIELPWDGFRAEMKIILDNITTSHKPDHGTVGKGSIGASSGQLHNDTAYGLTGSQSSTGADIVVTRKPLGSLGPKDIAKIRDEDLRDKLWQTTRDLSGKDFTAALLAFSQNNVIYRGIRRVRLIDAVKVIPIKDKTGTTYKGYKGDSNHCVEVWRLPDGKWKAEVLSTFDANQKGLGASRPHPAAKLVMRLFKRDMVALDHPKHGSIQAVITKMSTQRLDLSPMNEANVDARSRDTNDPFDYIRLGLGTLQKYGLHKIGIDALGRVTDPGPHKL

SEQ ID NO: 8008 - protein, 1083 aa, synthetic construct
  REGION 1..1083: note = Synthetic
MRLGLDIGTNSIGWWLYATNGGEITEVLDGGVRIFSDGRDPKSKASLAVDRRAARAQRRRRDRYLRRKAALIKRMAAAGLMPADPIEAKALELLDPYALRAIGLDQELPLTHFGRALFHLNQRRGFKSNRKADKGDNESGKIKDATARLDQEMMAKGARTYGEFLHMRRAAATDPKHVPTVRTRLSVARRDNADKEEAGYDFYPDRRHLSEEFEKLWKAQATHYPDVLTDELRDEISVIIFHQRPLKTPAVGLCLFSGSHGVPKEDKRIPSAHPLNQRRILFEIVNSLRVAARGEPARGLTREERDAIVHALDNKSHTKTLSGMSMKLKALGKVIKLRPGQSFTLETANRDAIACDPVRASLSHPNHFGPRWSTLDSDGQWDVVQRIRAVQSDGEHDALVKWLMGTHSLDRDHAESTANAPLPEGYGRLGLTATKRLLAALEAEVIPYSDAVAACGWHHSDGRTGEVLTELPYYGQILERHVIPGSYDENDDDVTRFGRITNPTVHIGLNQLRRLVNKIVMVHGKPDEIVVELARDLKLSEDQKRDVQRDIKKNTDAAIARGKKLVEELGQKDTGANRMILRMWEDLNQDDCMKRFCPYSGKRISPGMLFDGSCDVDHILPYSRTLDDGFANRTLCLKEYNRHKTNKTPWEAWGDTPAWDAIQSNLKNLPANKAWRFAPDAMERFEGENDFTARALKDTQYLSRIARTYLDALYDGTDGKSHVWVVPGRLTEMLRRHWGLNSLLPDKDGAVKAKNRTDHRHHAIDAAVVAATDRSLIQRISKMAQRDEVKGAEDVARSVPPPWEDFRADIATQLTRIIVSHRADHGRIDFAARKAGRDSTSGRLHNDTAYGLGEGSSVVSRKPLLSLKPNDIEVTTRGANIRDVDLQRHLARVTRGLEGKAFEVALAEFAVTSKLPDGTDNPYYGLRRVRLEESLQQRARIEVRDSNGKPFKAYKGDSNHCYEIWRLPNGKVVSQVITTFEAHKIDADKKPHPAAKRLLRIFKRDMVAIERDNQTIIGYVQKLDPANGLFIAPHTEAKADARHRDKEDDFRFLQMSAGPLVEAKARRVYVDEIGRLRDPGAPS

SEQ ID NO: 8009 - protein, 1079 aa, synthetic construct
  REGION 1..1079: note = Synthetic
MFLRLGLDIGTNSIGWWLFELNGPETNSEIIRSVDGGVRIFSDGRDPKSGASLAVDRRAARAMRRRRDRYLRRRASLMKALAASGLMPVKPVEAKALELLDPYELRAKGLDEKLELTALGRALFHINQRRGFKSNRKTDRGDNESGKIKDASARLDWAMREAEARTYGEFLHKRRAKAPDPRHTPGVRTRLSIAARGGPDSKAEPGYDFYPDRRHLEAEFHTLWDAQAEYYPEVLTRALRDLVFEKIFYQRPLREPEVGLCLFTSEKRIPKAHPLAQRRTLYETVNQLRITADGRSSRPLTRDQRDIVILALDTKAPTKSLTSMNVSLTALGKLLKLSDGERFTLETEMRDAIACDPVRASLSHPERFGPKWVSLGWEAQWEVIERIRAVQSDAEHQALVDWLVKNHKLDKAHAERVASAPLPEGYGRLGLSATQRLLDHLQSDVMTYSDAVAACGWHHSSERTGECLDRLPYYGEVLDRHVIPGTYDEKDDEITRYGRITNPTVHIGLNQLRRLVNRIIETYGKPTQIVVELARELKQSEAQKREVIKRIQDTTAAAKKRSEKLQEQGCPDNGHNRMLLRLWEELGPAIGPRCCPYTGTPINVSMVLNGECDVDHILPFSRTLDDSVANRTLCLKEANREKGNHSPWEAWGDTPRWAVIEGNLKNLPENKRWRFAPDAMRRFEDEGDFLDRALVDTQYLARISRSYLDTLFTEGGHVWVVPGRLTEMLRRHWGLNALLSDAEQGAAKAKNRTDHRHHAIDAAVVAATDRSLLNRISKASGQGEAAGQTAELVARNTPAPWEGFRKDIESQLDRIVVSHRADHGRIDREGRKNGRDSTAGQLHNDTAYGVVDAGTVVSRVPLLSLSAADIVTGSRGKNIRDPQLQRMLEVATRGKEGKALEAALRDFAAKPGPYQGIRRVRLIEALQQSARVEVGSRPDGRPLKAYKGDSNHCYDLWRLPDGKVVPQVVTTFEAHSLPDKRPHPAAKRILRVFKRDMVVLERNGKTEVFYVLRMHVNNGLYLAPHREANADARSRNKDDPFRLLQIGAGPMVKAGIRRVFVDEMGRLKDPTASKKQLLE

SEQ ID NO: 8010 - protein, 1096 aa, synthetic construct
  REGION 1..1096: note = Synthetic
LTASDAEADRDKNLSNKDFSVMHTRLGLDIGTNSIGWWLYEIDGAETNARIVGVLDGGVRIFSDGRDPKSGASLAVDRRAARAMRRRRDRYLRRRATLMKLLARSALMPADPAEAKKLERLDPYELRATGLDETLPLTHFGRALFHIDQRRGFKSNRKTDRGDNESGKIKDATQRLDWAMHDAKARTYGEFLHMRRSKAEDPRHIPTVRTRLSIAARGGPDAREEAGYDFYPDRRHLEEEFHHLWEAQATHHPTVLTEELRDLVFETIFYQRPLKEPKVGLCLFSAEERLPKAHPLTQRRVLYETVNHLRVTSDGRALRPLTLEERDTIILALDNKKPTKTLSSMSMTLTALAKAIKLRDVERFTLETGVRDSIACDPVRASLAHPDRFGPRWSVFDGETQWEIVSRIRAVQSDADFEALVSWLQKTHGLDAEHATHTANASLPEGHGRLGLGITRALLKKLEADVVTYSEAIEACGLKHSDQRTGEDLGTLPYYGEVLDRHVIPGSFDENDDDVTRFGRITNPTVHIGLNQLRRLVNKIIETHGKPVQIVVELARDLKQSEAQKKLAIKRIRDTTADAKRRSSQLEELGVADNGHNRMLLRLWEDLGPAVGPRSCPYTGRTISTTMVFDGSCDVDHILPYSRTLDDSFANRTLCVKEANRDKGDKTPWEAWGGTARWDAIDANLKNLPENKRWRFSPDAMERFEGEKGFLDRALVDTQYLARIARSYLDTLYTEGGHVWVVPGRMTEMLRRHWGLNALLSDASNGAVKAKNRTDHRHHAIDAAIVAATDRGLLNKISKAAGQGEQAGQSAELIARDTPSPWEGFRADLEHQLNNILVSHRADHGRIDREGRKLGRDSTAGKLHNDTAYGVVDDATVVSRVPLLSLSLVDIEITSKGKNIRDPQLQRALATATRGKEGKAFEAALRDFAAKPGPYQGIRRVRLIEALQKSARVEVGLDQAEEGPLKAYKGDSNHCYELWRLPDGKVKPQVTTTYEAHTGVEKRPHPAAKRLLRVFKRDMVALERNGETLICYVQSMHIANGLYLAPHFEANADARSRDKSDPFRFIQIGAGPLVKAGIRRVLVDEMGRLRDPGPPR

SEQ ID NO: 8011 - protein, 1078 aa, synthetic construct
  REGION 1..1078: note = Synthetic
MRLGLDIGTNSIGWWLYETDGSEADAPIVSVIDGGVRIFSDGRDPKSGASLAVDRRAARAMRRRRDRYLRRRATLMKVLANAGLMPADPAEAKTLEALDPYELRATGLDAALPLAHLGRALFHINQRRGFKSNRKTDRGDNDSGKIKDATARLEQAMMASGARTYGAFLHMRRQRATDPRNVPTVRTRLSIAKRDGADGKEEVGYDFHPDRKHLEEEFHKLWTAQASYHPELTNELRDLVFEKIFFQRPLKEPKVGLCLFTAEERLPKAHPLTQRRVLYETVNQLRVTADGREKRPLTVEERDQVIHALDNKKHAKKAPMSATNGPTLTLKHLAEKVLRLPDGQRFTLETGVRDAIACDPVRASLSHPDRFGPRWSTLDADAQWAVISRIRRVQSDADHADLIDWLTQTHGLDRDHAEMTAKAPLPEGYGRLGLTATTLLLDVLTAGVVTYSDAVAACGWHHSNQRTGECLDRLPYYGEVLDRHVIPGTYNEADDDITRYGRITNPTVHIGLNQLKRVVNKIIEVYGKPDQIVVELARELKQSEQQKQEAMKRIRDTTVAAKKRSKKLEELGYEDNGRNRMLLRLWEDLNPDDCMRRFCPYTGKRISAAMIFDGSCDVDHILPYSRTLDDSFANRTLCLKEANREKRNQTPWEAWGGTPKWDAIEANLKNLPDNKRWRFAPDAIARFEGENDFLARALVDTQYLASISRTYLDTLFTEGGHVRVVPGRLTEMLRRHWGLNSLLSDAKRGAVKAKNRTDHRHHAIDAAVVAATDRSLLNRISRAAGQGEEAGQSAELIARDTLAPWDGFRSDLEVQLGRIIVSHRADHGRIDKEARKQGKDSTAGQLHQETAYSIVDDMHVASRTDLLSVKPAQLLDEPGRSGQVRDPQLRKALRVATGDKTGKDFENALRDFAAKPGPYQGIRRVRIIKPLQEQARVSVPAQVPIKAYQGGSNHVFEIWRLPDGRIEAQVITTFEAHSMEGEKRPHPAAKRLLRVHKGDMVALERDGRTVIGHVQQMHIKNGLFIVPHNEANADARNSDNTDPFKWIQIAARPAIAAGIRRVAVDEIGRLRDGAVRPG

SEQ ID NO: 8012 - protein, 1084 aa, synthetic construct
  REGION 1..1084: note = Synthetic
MRLGLDIGTNSIGWWLYGTEGGRITEVVDGGVRIFSDGRDPQSKASLAVDRRAARSQRRRRDRYLRRKAALMKRMAQVGLMPADPAEAKVLEVLNPYELRASGLDGPLPLTHFGRALFHLNQRRGFKSNRKTDRGDNESGKIKDATARLDQAMMAKGARTYGEFLHMRRAAALDPKSVPSVRTRLTVARRDDAEKEEAGYDFYPDRKHLSEEFDKLWAAQARHAPDVLTEDLRDEIATIIFHQRPLKTPEVGLCLFTGQHGVPERDKRIPSAHPLNQRRILMETVNNLKVAAQGEPSRPLTREERDQIVHALDNKKHTKSLSGMTMKLKALGKVIKLRPEQGFTLETANRDAIACDPVRASLSHPDRFGARWSTLESAGQWDVVQRIRAVQSDAEHADLVGWLMDVHGLDRDHAEETANAPLPEGYGRLGLTATTRILAALEADVLNYSAAVAACGWHHSDGRTGEVLESLPYYGEILERHVIPGTGDPNDDDVKRYGRITNPTVHIGLNQLRRLVNRIITVYGRPDEIVVELARDLKLSEDQKKDVQRDIKKNTEAAIRRGKKLEEMGVPNTGANRMVLRLWEDLGDDVMTRNCPYTGKRISAGMLFDGSCDVDHILPYSRTLDDSFANRTLCLKEANRQKTDKTPWEAWGETEQWEAIAANLKNLPANKAWRFAPDAMERFEGEKDFSARALADTQYLSRIARAYLDALYDGDDGKSHVWVVPGRLTEMLRRHWGLNGVAALTDSDKQTVKAKNRTDHRHHAIDAAVVAATDRGLIKRIADMAKRDEFNGAEEVARSIPPPWEGFRDDVSAQVTRIIVSHRADHGRIDPAARKSGRDSTSGQLHNDTAYGIGRDGTVVSRKPLASLSPNDIVVTKRGANIRDVDLQKHLARVTHGLDGKAFEAALLAFAASPILPDNTDNPYFGLRRVRLEETLQESARVEVADQEGRPYKAYKGDSNHCYEIWCLPDGKIKPQVVTTYEAHQSGAEKKPHPAAKRLMRIFKRDMVMLERDGETIIGYVQKMKQNGSIFVAPHTEANADARDRDPKDDFKLIQLGAGSLVKAKARRVIVDEMGRLRDPGPPL

SEQ ID NO: 8013 - protein, 669 aa, synthetic construct
  REGION 1..669: note = Synthetic
MRLGLVREGYGRLGLTATTRIFAALEDHVCTYNEAVASCGWRHSDGPTGEGLENLPYYGEILDRHVISGTGIKTDDDITRYGRITNPTVHIGLNQLRRLVNKIICTYGRPDEIVVELARDLKQSEDQKREVQKIIKRNTDAAIARGKKLVEDLGQKDTGANRMILRLWEDLGHDVMTRNCPYTGKRISATMLFDGSCDIDHILPYSRTLDDSFANRTLCLKEANRQKANKTPWEVWGDTPQWEVIAANLKNLPDNKSWRFAPDAIQRFEGENDFTARALKDTQYLSRIARSYLDALYNGGDGKSHVWVVPGRLTEMLRRHWGLNGLGALTDCDAQTVKAKNRTDHRHHAIDAAVIAATDRSLIKRISDMAKRDEKAGAEEIARSVPPPWEGFRGDIAARIRRIIVSHRADHGRIDPAARKLGKDSTSGQLHNDTAYGLTDAGTVVSRKPLMSLKPNDIGVTTRGANIRDPQLQKHLLRVTRRLEGKAFENALLDFANTRKLPDNSDNPYFGLRRVRLEETLQESARIEVQDQNGTSFKAYKAGSNQCYEIWRCPDGKIKPQAISTYEAHQTTVERKPHPAAKRLLRVYKRDMVAIERNEQIIICYVQKLDVANGLFLVPHTEANADARNSDKTDSFRFIQMSAGPLIKAKARRIHVDEMGRIRDPGPPR

SEQ ID NO: 8014 - protein, 1098 aa, synthetic construct
  REGION 1..1098: note = Synthetic
MPTRLGLDIGTNSIGWWLYETDGKTIVGIVDGGVRIFSDGRDAKSGASLAVDRRAARSMRRRRDRYLRRRAALMRKLAEAGLMPKDPAEAKALEGQDPYELRAKGLDRSLPLHHLGRALFHLNQRRGFKSNRKTDRGDNDPGKIKDATARLDQAMMAIRARTYGEFLHLRRRQVPDKHEDCRDNNDGSRTDHRKTPSVRTRLTVVRREGSEREEAGYQFYPDRRHLEGEFHRLWDAQAVHHPSLLTDDLKEALFETIFYQRPLKAPAIGLCLFAGIGDVPGDERRLPKAHPLTQRRTLYETVNNLRVTADGRERRPLTLEERDQVIGLLDNKKPAKSLKSMKMKFDALAKALKLPPGNRFTLETASRDTIECDPVRASLCHPDRFGPSWSTLDPDQQWEVVRRINGVESDADHDALVDWLASTHGLPRERAETTAQAPLPEGFGRLGERATLRILAALQKDVRSYSDAVAACGWHHSDQRTGEILDELPYYGAVLERHVIPGTGNRKHDDITRYGRITNPTVHIGLNQLRRLVNKIIAVHGKPDEIVLELARELKMSREQKKRISETNSANRNAVEKRGEKLAELRQPDTGRNRMILRLWEDLGHDVMTRNCPYTGERIGAGMLFDGSCDVDHILPYSRTLDDSFANRTLCLRKANREKGNKTPWEAWGETDRWPDIAANLKNLPDNKKWRFAPDAMERFEGERDFLDRALVDTQYLSRIARSYLEALYPMGGHVWVVPGRLTEMLRRHWGLNCLLPDRGKGAGKAKNRTDHRHHAIDAAVVAATDRGLLNRISKSAGQDEREGKGAEDVARSTPEPWEHFRSDIGRQLETIIVSHRADHGRIDPEARRRGVDSTTGRLHNDTAYGIVDDQTVVSRVPLLSLTIKDIGLTSRGKNVRDPFLQGHLARVTRGKTTPKEVEAALAEFAAAERLPDGSRNPYKDLRRVRVDESLQRAARVEVNGPDGRPHKAYKGDSNHCFEIWMLPDGKIRSLVTATFDAHRNEVHKPHPAAKRLLRLFKRDMVAIEREGATLVCYVQKFDPANGIFLAPHVEANADARNRDRNDDFRLLQMGAMPALKAKLRRVHVDEMGRLRDPGPIQ

SEQ ID NO: 8015 - protein, 1137 aa, synthetic construct
  REGION 1..1137: note = Synthetic
LRQTIADRLAAPWCGPKQQSHPNRRAMLDLGSLSGEDQPTINFVMGYGIMRDFNSEHGLRLGLDIGTNSIGWWLYRTHEGEITEVADGGVRIFSDGRDPKSGASLAVDRRAARAQRRRRDRYLRRKAALMKRMAEAGLMPSDPAEARALEALDPYALRATGLDEKLPLTHLGRALFHLNQRRGFKSNRKTDRGDNESGKIKDATKRLDEGMAIRKARTYGEFLHMRRAAAPDPRRTPPVRTRLTVARRDHAEKEEAGYDFYPDRKHLADEFAALWAAQAAHYPELLTDELRDEIGTIIFHQRPLKTPEVGLCLFTEERRIPAAHPLNQRRILIETVNSLKVAARGEAARGLSREERDRIVHALDNKKHTRTLSGMTMKLKALGRVIGLRPEQSFTLETANRDAIACDPVRASLSHPDRFGPRWSTLDRAAQWDIIARIRAVQSDAEFASLVDWLMAQHDLDKAHAEATANAPLPEGYGRLGPTATQRIVEALDSDVMTYSDAVAACGWHHSDGRTGEVLAELPYYGRILDRHVIPGTYDENDDEITRYGRITNPTVHIGLNQLRRLINRIICVHGKPDEIVVELARDLKLSEDRKKEVERDIKKNTEAAIGRGKKLVEELNQRDTGANRMLLRLWEDLNPNDCLKRFCPYTGKRISAAMLFDGSCDVDHILPYSRTLDDGFANRTICLKEANRAKTNKTPWEAWGGTPQWEAIEANLKNLPKNKAWRFAPDAMERFEGEKDFSARALKDTQYLARIARSYLEALYHGGDGKSHVWVVPGRLTEMLRRHWGLNGIETLTDSDDHTVKAKNRTDHRHHAIDAAIVAATDRSLIKRISDMARRDELQGAEEVARSVTPPWDDFRADIAAQVQRIVVSHRADHGRIDPAARKRGKDSTAGQLHNETAYGLAGESTVVSRKPLTSLKPNDIAITTRGANIRDGDLQRHLARVTHGLESKAFEQVLQDFARTRKLPDNSCNPYFGLRRVRLEETLQQSARIEVKDRAGIPFKAYKGDSNHCYEVWRLPDGRIKAQVVTTFAAHQTQTVQKPHPAAKRILRVFKRDMVKLERDGEWLIGYVQKLDVANGLFIAPHTEANADARSRDKADPFRLIQMGAGPLIKAKARRIHVDEMGRVRDPGPPG

SEQ ID NO: 8016 - protein, 1073 aa, synthetic construct
  REGION 1..1073: note = Synthetic
MRLGLDIGTNSIGWWLYETDGQGASARIVGVIDGGVRIFSDGRDPKSKASLAVDRRAARATRRRRDRYLRRRAALMKVLAKSGLMPASPAEAKQLELLDPYELRANGLDDVLPLTHFGRALFHLNQRRGFKSNRKTDRGDNESGMIKDATARLDLEMMTNGARTYGEFLHMRRLRASDPRHVPTVRTRLSVASRGGPDAKEEAGYDFYPDRRHLEDEFQELWRAQATCHPEVLTDALRDLVFEKIFYQRPLKEPRVGLCLFTAEERLAKAHPLAQRRVLYETVNQLRVTADGKETRSLTLVERDQVIHALDNKKPAKSLSSMNLTLKALGKVLKLRDNERFTLETGVRDAIACDPVRAVMIHPDAFGPRWSELDWKAQWELISRLRKVQSEAEFDALVDWLMATHELDRDHAQKVANVHLPEGYGRLGFTATQRILEQLKADVATYSEAVSACGWHHSDQRTGECLDRLPYYGEVLDRHVIPGSYDENDDEITRYGRITNPTVHIGLNQLRRLVNKVIEVHGKPDQIVVELARELKQSEQQKKDAMRTIRETTEAAKKRSEQLEQLGQPDTGHNRMLLRLWEELGPAVGPRCCPYTGETISVTMLFDGSCDVDHILPYSRTLDDSFANRTLCLKEANREKRDQTPHEAWGGDPVRWTKIETNLKNLADNKKWRFSPDAMERFEGENDFLDRALVDTQYLSRISRTYLDTLFTEGGHVWVVPGRMTEMLRRHWGLNALLSDKDHGAAKAKNRTDHRHHAIDAAVVGGTDRSLVNRISKAAGQGEKAAQSAELIARDTPAPWEHFRSDIAAQLDKIVVSHRADHGRIDVEGRKSGHDSTAGKLHNDTAYGIIDDMTVVSRTPLLSLKLSDIEWTTKGKNIRDPQLQKALAAATKGKDGKAFEDALRQFAAKDGPYQGLRRVRLVETLQRAARVEVGTTDKGRPLKAYKGDSNHCYEIWRLPDGAIQHSVVTTFDAHQGKENRHPAAKRLLRLHKGDMVRVENSKFGAVTATVAKFNGNGVIELVPHAEANASDRYRKNKEDLYIRLSAKSAMKSGLRRIIVDEIGRVRDPGPPKT

SEQ ID NO: 8017 - protein, 1070 aa, synthetic construct
  REGION 1..1070: note = Synthetic
MLTRLALDIGTTSIGWILYELVHNQPATILDGGTRIFSDGREAKTGQSLAVGRRTARGMRRRRDRYLRRRAALMKRLAAIGLMPASPEAAAQLAALDPYELRARGLDHPLPPEHLGRALFHLNQRRGFKSNRRTDKDSNEGGLIADGSARLEQAMMAASARTYGEFLHKRRAAATDPRATFAVRTRINPHLIDGDGKEQPGYDFYADRHHLEKEFHTLWAAQVRHNPDLTPAMEDLLFQTIFHQRPLKAPAVGRCLFLEEPRLAKAHPLTQSRTLYETVNMLRIATPGQPKRRLSRDQRDQIVIALNNRKILAAPGKNVLTLAAIGKLLKLRPGEAFSLETANRDAIACDPVRMSLAYDGRFGPQWSALSVASQWELIQRLRDDQDGTALVDWIMERYGVDRDRARAIADAPLPEGFGRLGETATRAVLAVLIDGTAEQEVPTYNEAVAACGWDHSRLGTGEVLDRLPYYGQVLDRHVLPGTGRPEDDEITRFGRITNPTVHIGLGQVRRLVNKVIEVWGRPHEIVVELARDLKMSEDQKRDLAKANAQNQRAAESRSAKLIEDLKIEDNGRNRAILRVWEESAADVLHRFCPYTGAQISATMLFDGSCDIDHILPYSRTLDDSFNNRVICLKSANREKRNLTPWEAWGNTPKWQAIDAILKNLPAAKAWRFAPDAMLRFEGERDFTARALVDTQYLSRLAREYLESLYADALQAGRRPIWVVAGKLTELLRRHWGLNSLLPDAHKGTAKAKNRLDHRHHMIDAAVVGATDHATVKRIADMAKANVENGLEDLAGTIPPPWPGLRDDLKARLERTTVSHRGNHGTIDHSARKQGRDTTSGQLHNDTAYGLTEETLDKVPLVVNRKPIDTLTPAMIDKIRDPHLARWLAVVTKGKEGKEFKGAVEAFRAQPGPYRGIRRVRLIEPVEVIRIKDRNGRPYKGYKGDSNQCYEVWRLPDGTLTHHVVSTFAAHQGQRVKPHAAAKRLMRLYKDDMVRLDSRKFGPVIAVVAKFDTNGGITLVSHNEGNADQRYRKDKEDVFIRLSAKTLINSSARRVIVDEMGRIRDPGPGKH

SEQ ID NO: 8018 - protein, 1060 aa, synthetic construct
  REGION 1..1060: note = Synthetic
MRLGIDIGTNSIGWWLYITDGDRIAGVVDGGVRIFSDGRDPKSGASRAVGRRTARAMRRRRDRYLRRRAALMKRLAEAGLMPTDPGKAKELEALDPYQLRAEGLDRALPLPHLGRALFHINQRRGFRSNRKTDRGDNESGKIRDATARLDQAMMATGARTYGEFLHLRRSAAPDPRQTPSVRTRLTIAHRGDSEKDEAGYDFYPGRRHLMEEFARLWAAQATHRPDILSEELRAAVHEIIFHQRPLKEPQVGRCLFIDEPRLPKAHPLTQQRTLYETINNLRITGDGRRRRPLTREQRDQIVHLLDNKKPTKSLSSMTMTLKALARALNLPPDERFTLESLNRDAIACDPVRASLSHPDRFGPNWSKLDERSQWEVIARIRQVETDADHTALVDWLMSVHDLNQENADTVARAPLPEGYSRLGETATRRILDALRSDVLTYDQAAAACGWHHSDGRSGEALDALPYYGAILDRHVIPGSFDPNDDEITRYGRITNPTVHIGLNQLRRLVNRIIATYGKPDQIVVELARELKQSEEQKREIQRAIKRNTDDAVRRGKLLEEMSIANTGANRKILRLWEDLGNDIMLRSCPYSGKRISAAMLFDGSCEVDHILPYSRTLDDSFANQTLCLREANREKSNQSPWEAWGGTPAWDRIAANLNNLPENKRWRFAPDAMARFEGERGFIDRALVDTQYLSSIARAYLDALYTQGGHVWVVPGRLTEMLRRHWGLNALLPDHVKGTAKAKNRTDHRHHAIDACVVAATDRSLVKRISDAAKRDEDTGAEEIARSIDPPWDGFRVDIEHQLGKIIVSHRADHGRIDPEARKRGRDSTTGQLHNDTAYGLTREVRNGVPLVVTRKPLDTLTHALIDKIRDPDLRQRLRFATDGKEGKDFTAALAKFAADSNRYRGIRRVRLVDAVEVIGIKDRNGRVYKGYKPDSNHCYEVWRLPNGDLVHHVIPTFAAHQRNPQRPHPAARRLLKLHKNDMVRLENSKFGPVIATVEKFDGNGAITLVAHNESNADQRYRKDKEDVFIRLRPASLHNAGARRVIVDEMGRVSDPGPPK

SEQ ID NO: 8019 - protein, 1064 aa, synthetic construct
  REGION 1..1064: note = Synthetic
MKTRLGLDIGTNSIGWWLYKLEAGRPVFIIDSGVRIFSDGRDPKSKSSLAVDRRVARAARRRRDRFLRRRTVLMQRLAEAGLMPTDPVEAKKLEQLDPYALRAKGLNQKLSLTHLGRALFHLNQRRGFKSNRKTDGGDNEAGKIKQGTARLEQAMMAAGARTYGEFLHMRRATAPTPRATPSVRTRLTLHQDSEDGKPVMAYDFYPDRSHLEEEFNQLWSTQATHHPELTDTLHGSLFETIFYQRPLKAPKVGRCLFMDEPRLAKAHPMTQMRILYETVNNLRITADAHPKRPLTIDQRDTVILALNQKKHTKSLSGMSLKLKALGKVIKLLPDEIFTLETQTRDAIACDLVRASLSHPDRFGPNWSKLDADAQWSLIQRLRDDENRDELIKWLMAKYGLDAEHAAATADAPLPEGYGRIGETATRNILAHLKAEVLTYNEAVEKCGWHHSNDRTGEVLDALPYYGEILDRHVIPGTQEPEDDDITRYGRITNPTVHIGLNQIRRMVNRIITEYGKPAEIVVELARDLKNSEAQKKEINITIKKNTTAAIMRGDKLVEELKQPNTGRNRMILRLWEELGSDPMTRLCPYTGTRISVGMLFTGECDVDHILPYSRTLDDSFSNRTLCLREANREKRNKTPWEAWGDSPRWDKIASNLKNLKRNKAWRFAPDAMEQFEETKGFLDRQLVDTQYLSRIARQYLDALYTEGGHVWVVPGRLTEMLRRHWGLNSLLPDHNRPTVKKKNRQDHRHHAIDAAVIAVTDRALIKKIAAVAKQDKEDGLEHFAASVPPPWEGFRNDVKASLDQIIVSHRADHGRIDPKARKSGHDTTAGQLHNDTAYGLTGEVNDKGAALVVTRKPIDNLTPAMIDKIRDPDLQRMLRVATKDREGKDFEAAIKVFVAKTGPYQGIRRVRLIEALDVIHIDDKSGNAFKGYKGDSNHSYEIWQMPDGKYKPQVITTFEAHQTGTPRRPHPAAKRVLRIFKRDMVALEHPKLGPLVCYVQKLSLANGLFLVPHTESNADARNRDKDDPFKLISMATGPLIKANIRRIYVDEIGQIHDPRGNISG

SEQ ID NO: 8020 - protein, 1076 aa, synthetic construct
  REGION 1..1076: note = Synthetic
MHTRLGLDIGTNSIGWWLYETNGAETNARIISIIDGGVRIFSDGRDPKSGASLAVDRRAARAMRRRQDRYLRRRATLMKVLANAGLMPADPQEAKALELLDPYELRATGLDQALPLTHLGRALFHLNQRRGFKSNRKTDRGDNESGKIKDATARLDQAIMASGARTYGEFLHKRRGRAIDPRHVPTVRTRLSVANRDGPDGRAEAGYDFYPDRKHLEEEFHKLWAAQAEHHTELTKELRDLVFEKIFYQRPLKEPKVGLCLFTAEERLPKAHPLTQRRVLFETVNQLRVTADGRETRPLTLEERDRIIHALDNKKPTASLKSMILKLPALARVLKLRDGERFTLETGVRDAIACDPVRASLSHPDRFGPRWSTLDLDAQWDVVARIRKVQSEGEHAALVDWLTQTHILDRDHAEATANAPLPEGYGRLGPTATARILEKLEADVVTYAQAVADCGWHHSDQRTGECHDRLPYYGEVLDRHVIPGTYDENDDEITRYGRITNPTVHIGLNQLRRLVNKIIEVYGKPDQFVVELARELKQSDQQKKAAMRNIREATEAAKKRSEKLGELGIPDNGRNRMLLRLWEDLNPDDAMRRFCPYSGERISAAMIFNGSCDVDHILPYSRTLDDSFANRTLCLQKANREKRNDTPYEAARKGALDWGTIEANLKNLPENKRWRFAPDAMERFEGEHDFLDRALVDTRYLARISRAYLDTLFTEGGHVWVVPGRLTEMLRRHWGLNTLLNDKDHGAVKAKNRTDHRHHAIDAAVVAATDRSLLNRISRAAGQGEMAGQSAELIARDTPPPWEGFRDDLRVQLDKISVSHRADHGRIDREGRKQGRDSTAGRLHNDTAYGVVDENTVVSRIPLLSLKPGDIAVTPKGKNIRDPQLQKALETATRGKNDKAFEAALREFAGKPGRYQGLRRVRLIETLQQSARVEIGTRPDGTPLKAYKGDSNHCYELWRLPDGKVKPQVVTTFEAHAGVENRPHPAAKRLLRVFKRDMVALEREGETVICYVQSMHVTNGLYLAPHQEANADARNRDKSDPFRFIQIGAGPMVKAGIRRVSVDEMGRLRDRGAMPH

SEQ ID NO: 8021 - protein, 1080 aa, synthetic construct
  REGION 1..1080: note = Synthetic
MRLGLDIGTNSIGWWLYETNGNETNARIISVIDGGVRIFSDGRDPKSGASLAVDRRAARAMRRRRDRYLRRRAALMKVLAKVGLMPADPEEAKALELLDPYELRAKGLDRALPLTQLGRAFFHLNQRRGFKSNRKTDRGDNESGKIKDATARLDQAIMASGARTYGEFLHMRRQRASDPRHVPTVRTRLSVANRDGPDGKEEAGYDFYPDRKHLEEEFHKLWAAQAGYHSELTYELRDLVFEKIFYQRPLKEPEVGLCLFSGYGDIPSDERRLPKAHPLTQRRVLYETVNQLRVTADGRETRPLTREERDQIIHALDNKKPTASLTSMVMKLPALAKVLKLPDGERFTLETGVRDSIACDPVRASLSHPDRFGPRWSTLDDEAQWDVVARIGKVQSDAEYAALVKWLMDNHALDRDHAEAAARAPLPEGYGRLGLTSTIRILEKLEAAVATYADAVAACGWHHSDQRTGECLNRLPYYGEVLERHVIPGSYNPQDDDVTRYGRITNPTVHIGLNQLRRLVNKIIESYGKPDQIVVELARELKQSEQQKKDAMRNIREATDAAVKRSEKLEELGIEDSGRNRMLLRLWEDLNPGDIMRRFCPYTGERISAVMIFDGSCDVDHILPYSRTLDDSFANRTLCLKEANREKRNQTPWEAWGGTPKWDAIEANLKNLPDNKRWRFGPDAMERFEGENDFLDRALVDTQYLARISRNYLDTLFTEGGHVWVVPGRLTEMLRRHWGLNSLLSDAERGAVKAKNRTDHRHHAIDAAVVAATDRSLLNRISRAAGQGKEAGQSAELIARDTPPPWEGFRDDIRVQLGKIIVSHRADHGRIDREGRKKGKDSTAGKLHNDTAYGVVDAMTVVSRTPLLSLKPGDIAATPSGKNIRDPQLQKALETATRGKEGKAFEAALRDFAAKPGPYQGLRRVRLIETLQESARVEIGTRPDGGPLKAYKGDSNHCYELWRLPDGKVKAQVVTTYEAHSGPEKRPHPAAKRLLRVFKRDMVALNREGETIIGYIQKLDIAHGLYIAPHNEANSDARNRDKSDPFRFIQIGAGPMLKAGIRRVFVDEIGRLRDGDAKPR

SEQ ID NO: 8022 - protein, 1176 aa, synthetic construct
  REGION 1..1176: note = Synthetic
LEPLKPEVDSAYFSSVPQKRKRRPWPAFQCGAIECLLAARPRILNTLNFAYSIARHNAVRGCFEHFSMKWLVTFSGVFFMRLGLDIGASSIGWWLYTLEDGAISEVIDGGVRIFSDGRDPKSKASLAVERRAARAMRRRRDRFLRRKAALMKRMAEVGLMPADPIEAKALEQLDPYELRARGLSNELPLAHFGRALFHLNQRRGFKSNRKTDRGENDNESGKIKDATKRLDLAMATAIPDESLRTYGHFLHLRRSDRPEKPAGSEANKNGSRSDDRRTPPVRTRLSVAQRDGADKAEVGYDFYPDRRHLEEEFLKLWQEQASYHRDVLTSDLRDDIFQIIFFQRQLKMPEVGLCLFSGQHGVPENERRLPSAHPLNQRRILFETVNALRVAEFGQPNRPLKRDERDQIILALDTKEHTKSLSGMSIKLKALGKVIKLRPKQHFTPETANRDAIACDPVRASLSDPRRFGPRWSSLDIDGQWQVIDRLREVENEAEHQELMKWLTEWHGLNRTQAAAVANAPLPEGHGRIGRTATLRILDQLESDVIPYSEAVARCDWHHSDDRTGEILDELPYYGEILNRHVIPGTYNENDDEITRFGRITNPTVHIGLNQLRRLVNRIICVHGKPDEIVVEIARDLKKSEDQKREIERTIKKNTEAAKKRGDKLVNELGQRDTGANRLRLRLWEDLNPEDCLKRFCPYSGQRISAGMLFDGSCDVDHILPYSRTLDDSIANRTLCLTEFNRQKTDQTPWEAWGETRQWDEISDMLKYLPANKAWRFAPDAMSRFEGENDFQARALKDTQYLSKIARSYLNALYDGADGKSHVWVVPGRLTEMLRRHWGLNGIEAMSDSVKRTAKAKNRTDHRHHAIDAAVIAATDRALIKRISEMAKRDELDGAEEVVRSLQAPWEDFRNDIAGQLQRITVSHRADHGRIDPQVRTSGRDSTSGALHEATALSIIDDATVAVRVPLKSLSVAQFEEGGRSGWVRDEDLRQKLHLATKGKDGKALEAALEAFAAKPGPYAGILRVRLVKPMLRAVRVQIPQAAPTKAYQAGSNHCYEVWKLPDGKATHNVVQVFDAHRNRESRPHPAAKRLHRFMKGDLVRLDDSKFGPVTATVEKFNNKGMIELVPHNEANASDRYRKLKEDLYIRLGAASLLKAGARRVYVDEMGRVRDPGPRG

SEQ ID NO: 8023 - protein, 1065 aa, synthetic construct
  REGION 1..1065: note = Synthetic
MRLGLDIGTNSIGWWLYATENGAISGVIDGGSRIFSDGRDPKSKASLAVDRRVARAQRRRRDRYLRRKAALMKRMAEVGLMPSDPAAAKELEQLDPYALRAEGLDRALPLAYLGRALFHLNQRRGFKSNRKTDRGDNESGKIKDATARLDQAMMAKGARTYGEFLHMRRVAAPDPKNVPGVRTRLSIAARDNSDKAESGYDFYPDRRHLSEEFEKLWSAQAAHHPNTLTNDLRDEIRVIIFHQRPLKTPAVGMCLFTDEKRIPSAHPLNQRRILLETVNALRIAERGAPARGLTHEERDQIVHALDNKNHTKSLAGMALKLKALGKVIGLRSEQSFTLETANRDAIACDPVRASLSHPDRFGPRWSALDSDAQWDVVQRIRAVQSDAEHLELVQWLETTHGLDQVHAESAASKPLPEGYGRLGLTATKRILAALKADVIPYSAAVAACGWHHSDGRTGEVLDELPYYGQILDRHVIPGSYDENDDDVTRFGRISNPTVHIGLNQLRRLVNRIITVYGKPDQIVVELARDLKLSEDKKREVQRKIKENTVAAIKRGEKLEEIGVPNNGANRMRLRLWESLGEDVMTRNCPYSGQRISIGMVFDGSCDVDHILPYSRTLDDGFANRTLCLKEFNRQKTNRTPWEAWGDTGQWDTIAANLKNLPGNKAWRFAPDAMERFEGENDFSERALKDTQYLSRIARAYLDTLYDGGDHKRHVYAVPGRMTEMLRRHWGLNSLLPDKDGAVKAKNRTDHRHHAIDAAVVAATDHSLINRISKAAGRDELIGNAAEDVARTTKEPWDGFRADIRAQLAEITVSHRADHGRIDREGRKSGRDSTTGQLHNDTAYGIIDDQTVVSRAPLLSLKPGDIELTTMGKNLRDSYLQRKLALVCKGKDGKDLEEALRKFAANEGPYQGIRHVRLMESLQASARVEIADASGKPVKAYKGDSNYCYEIWRLPDGKPKAQVITTYEAHGETLRRPHPAAKRLLRVFKRDMVAIEREGERIICYVQAMHVANGLYLAPHTEANADARNRDKSDSFRFFQMSAGSLLKAKIRRVFVDEMGRLQDPG

SEQ ID NO: 8024 - protein, 1054 aa, synthetic construct
  REGION 1..1054: note = Synthetic
MCKDGKKNYRLGIDLGSTSLGWCMLEIDEERNPIGIINMGVRIFPDGRDAKSKEPLSVARRGYRGQRRNLDRYLQRLKELITYLQKHGFLPADEAERREVFKLNPYMLRAKALDEALSPSEFARAIIHLSKRRGFRSNRKIQSDKKTAYTEAIDNLKTNLESNGARTLGEYLWLRYQQMPEGKEHLRNPIKFRYEIKLEDPNPIFPLREMVEHEFDAIWQAQSKYSPLFSETHKQNIFAIIFTQRDLKKQAKGKCQLLPEFTRAPKAHPLFQEFRIRQDLNNLKARDMFNNTTIELTDAQYNTLFQALSTSKERSFEQLRKAIYGKQAEDYRFNLEANDRKKLLGDLTYAEINRKGNEAVRSYWEKWSLEMQAQVIEIVISDLDDEPTLVELSELGIPKDIASALLDLHLPSEYCHLSTQAMEKILPFMRQRTIYSEACKLAGMDHSGEFTGEVFTDGSLPYYGELLKRETIELNRQTGDNDADESGKINNPTVHIALNQLRKLVNAICKRYGAAPKEIVLELGKDIKLGEKEKERLNKQANKNKKINETVDELLRYNDIKPNHLNRLKAKLWLELGASELDRRCVYSGHQIAVNDLFTSKVEIDHILPKSRTYDDSTSNKILCIIDANHYKKERSPYEAFGESKDGYRWEDIVSRANNLPDNKKWRFQADAMQDYANKEEILARMLNDTRYMSRVANKYMCYICGINNVWTITGRHTGMLRAKWGLNAALGDDERKDRSDHRHHAIDAFVIALTNRAMIHRLATTIENSRERFIENLEPPYTSFNHEEFKQKVNSIVTSFKPDQINPEKLQSRNQTGGSLVQETAYSFEGIDPDNPKYNLYAVRKSVSDVTEKNYQDIAAPEFRKELEAIAKTYTGKDFQAQVSIWAKRRNIKKVKLISSMNPDGMVPILNKEGIAFKFMASGENLFADIYIKDPADPKVKWSIEIVNSYKAHQPGFTPQWKQEFPKAKKLMRVFKNDIIAIDTPDGGRELRRVKKMTKGALFLRESNIAKKDKALDDIGEQFSPNKLFELHARKAGVDMIGRWFDPIVNEHE

SEQ ID NO: 8025 - protein, 1046 aa, synthetic construct
  REGION 1..1046: note = Synthetic
MKKDYRLGIDLGSTSLGWCMLELDKNNDPTGIIKMGVRIFPDGREMKSKEPLSVQRRNARGQRRNLDRYLERARQLISYLLEHGFLPKNEKERAEVFQVNPYMLRAKALDQPLSPAEFARALIHLAKRRGFRSNRKALSDKKHAYSEAINNLNEALQSEGAHTLGEYMWNRYQQVPGGKQHRRQPIKFRYEKTYEDPIFPTRNMVEEEFDAIWSAQAAFNPIFSEQHKEALHHIIFYQRELLSPSKGKCQLIPEEPRAPKAHPLFQEFRIRQDLNNIRAVNLFTNETQALSDAEYETLFGMLNQNAKVSFKAMRKKLWGKQAEDWRFNLETNERKELLGDQTRAVFHKKGNEDLAALWGKLDLDTKNEVIEILISDLDDEPLLRGLFELGVAAEAATALMNLSLPDDYCHLSVEAMKRILPFMRQRMMYSDACKAAGFEHSGEYSGEIFDEGNLPYYGELLKRETIELNRDTHDPDADAHGRINNPSVHIALNQLRKLVNALVEKYGVPREIVLELGKDIKLGKKEKDAINRANFLNRKENEKIDDFLEEHGQRPNRLNRLKTKLWWELGEDELDRRCPYSGQQIALADLYTHKTQIDHILPKSLTYDDSNANKILCLAHANRYKKERSPWQAFGESLDGYEWSGIVARANKLKPSKRWRFQADALQNFEDQEEVLARMLNDTRYMSRVAMKYMWHVSGNNRVWTVTGRHTSLLRGKWGLNTALGEEDAKNRADHRHHAIDAFVIALTTRSLIKNLASRIRESRERFVENLDPPWPGFSHEDFRDKVNSIAVSVKPDHINPTLLAKRNQTGGALLKETAYGCAGPDPKNPKQMLYTLRKPVSELNPKNVENVVRLDLREELQDMAQTRSGADFAEAVQAWAQRKNIKKIKLALSKNPAGMVPILDKNGSPFKYMDTGENLFADIYLSDPTDPDSNWGIEIVDIHSAHQPGFLPQWKKDFPKGKRLMRLYKNDIIAIDAPDGLRELKKIRKMTGNIIYLRDLSVAKKPKGQEDIGEQYSPKQLKEKRARKAGVDIIGRVFDPIVNEL

SEQ ID NO: 8026 - protein, 1000 aa, synthetic construct
  REGION 1..1000: note = Synthetic
RSYRGQRRNLDRYLERIRDLIIYMTEHGLLPEDRLQRDEVFKMNPLRLRAKALDEELSPAVFCRALIHLARKRGFRSNRKVLSDKTTKLSEAIENLQTQLQEYGSRTMGEYLWHRYNETPKNARNMSKSVKFRYEINEREPMPIFPTRDIVLDEFHKIWDTQASFNPIYTDAFKQDIEDIIFTQRPLLPQVKGKCQLLPEHERAPKAHPLFQEFRILQDLNNLKAINIFTGETVLLDDDQHAKLLHLLIHNKEVTFKKMRKDLWEKEAEDYRFNLETNERKKLLGDQTWMAISSKADEETKAWWYQANEELKEKAINIMISDLDDEPFLIEMGNLHVPHAIANTLLDVHLPDAYGNLSVAALKRLIPHMRNRMIYSDACAEEGFSHSGDDVKAEYYEGNLPYYGELLTQETIALNRNTNDAQADKWGRINNPTVHIALNQLQKLVNTLCIRYGGPKEIVLELGKELKLSGKEKDRIKKRMNQNKKINEEIDSLLERNYQDINYANRLKVRLWQEISPEEIDRRCVYTGKQINITDLFSPAIQIDHILPKSKTYDDGIANKILCYLDANRYKKERSPWEAFGHSQDGYNWEEIQRRAQNLPDNKRWRFQKDAMDRYVDKEELIARMLNDTRYMSRVAMKYMYYVSGKSNVWSITGRHTALLRSKWGLNSVLSEGDHKERADHRHHAIDAFVTALTTRSMVKGIADSIEKSVDRFIEQVPAPYTGFSWEDFKRRVNTIAVSHKPDQPNPRKLTARNQTAGALAKDTAYGFVRPDTKNDKYAFFSKRIAIEDLSIKDIEKIIDPDIKQALLKIADTYGGKPSEFKDQLSQWGMANNVKKVKTEFRASLDTMIPVADKTGKIYKYYQSGGNLFAEIYLKDPTDPKCMWEMEIVSMYEAHQPDFAPQWKKDYPKGKKIMRLYKNDIVAYTNDKGIRELRRVKKMSGEIVYLREIYVAKKTKDMENIREQYNPRALMMANAAKAGIDIMGRVFDPKAGSVDADTGN

SEQ ID NO: 8027 - protein, 1046 aa, synthetic construct
  REGION 1..1046: note = Synthetic
MGYVLGLDLGPTSIGWAAIEVDENERPVGLLTLDDNGEKVPAMGSRIFPVGVINYGQGKKREQSNNKKRRDKRSVRRRLRRARARRLKLIGLLKSQGLLNGQPVDEVQQMDPYELRAKGVSEKLEPEEFARILLHFAKRRGFKSNRRKPIDEDAKGTDMKKAKDRLEAQLDGQTLGEFWYDKLSDGSSEPIRNRRDNFKWLAQRKHYQEELGRIWAVQSAHYPEIFTHGFYKELEGILFDQIPFELTKTKKKKVIGMCSLMPGKVRCGYSERIAQKFRTLQKVNDLRVEDGKESRDLCDAEREVLVNSLSASKDKSYEAMRKKIWGKDADYVKLNLEYRPKEKIRGNEIDSMMVSASFFQKKAWLGLTEQQKDEVWGLLRSYLDESLSADDVEARVGEYGLEFKKDNWTDKLKEPVGTCSYSKAALNKIVPLMEEGKDLYTAIQEAGLSKKHEQHGLLPVPDKAHGFAIPNPVVQTVMFQMRKIVNLLIKEVGPPERIVIETTRELKASKERRQEILKKQSDNLKDKEKAKDKIREMRGWSDDVRVSNTDVMKWRLWEEQNHYCPYRCKKITLGEVLSREVEIDHILPYSMSLDNTMANKVVCFAGENQEKGQNTPISWLGENSAKWRKITEAMSRNSFNFSKEKWERFGVLNEEIEEKYQPERLIRDTSYIAREVRAYLKRLYPADYADQSVRTASGKITFELRNLWQLNAILRDGELGPKNRDDLRHHAVDAAVVAVTTPGMIQRITRVLQDNWPKRPKYAAIAEPWEGFGEELASAVEKINVSHRVQRKVKGALHGGTHYGKIAHGLHAGKFVTRKNLSDITKTSAENICDPEIRDMALARLKEYGGKAKDAFAKPLKLENKNGEPVPVKKVRIWENSSNMIKLERSNKNGNSLDNSVWVKPGENHHVEIFVHTVGGKDEYVCKGYTIWEAGQRVKNKQPIISRQHPDYPEARFIMSLSKRESLVMKNKSGTARKVFVLSISTQPTFDMEVRPLSVGDVRNLSDKEKKALRREWRLQSLKALKERLMQKITLDPLGRVRRAGD

SEQ ID NO: 8028 - protein, 1054 aa, synthetic construct
  REGION 1..1054: note = Synthetic
MRILGVDLGVASVGWALVNDKNNKIIDSGVRIFTQSTNREGKTLAAVRRSFRGGRRVLSRRKQRLNQLKKLFIAHKLLSKSEFKHLFNSKNRLDIWQLRAKGLEQQLNNKEWARVLYHIAKRRAYQSNRKSEESGNTDKKKVLSGISKNEKKMNELGYKTIGEMLYTENRYPDNRIRRNKKDQYKHSISRDLLRKEIDVLFESQRDFGNQFATDGLKEHYKDIAFTQRPIKFKADLVGKCTFETQEYRGAKNCFSVEKSTLLSKINNTDLIDKSTGEIKRLFEISEFDKLLDIFYSIKEVKYTTLRKQLKITDAFKFKQLDYHQNFEYKTNIKAKIEDFYKLEDWLTPEQKVLLEKQVLDDKKEKFKCYKYSSIRSILSLSESQKFNGVKYDTKVENTVFGKLNGYHSIKKELNKEVFDLLFIDKDKFNKIAEILSYQKDDKSATQDLKKQVFNDFNMDKTIVNEAINSLLNISFSGFNSLSLKAINKLLPYLCQGLKYHDAVAHSEYKHHSQFKAANPQQYLRPLNKEENYQITSPTVKRVFSQFRKVLNAVIRKHGSFDAMHIEMARELKNSKKIKFEIQTGQKEYAQEKEAIRVKFLEIFKYEGSGRDLLKLRLYEQQHGKCIYSKKEIEINKLLEDGYVEIDHILPWSRTFDNSLNNKALCLSAENQNKANQTPFEYLTNSDKNSKDSKEWQEYKNYVSSFAGIKQAKKHKLLNTTLPPRRGNDFSDDIKNPESGFLARNLNDTAYASRFIKNFVQNHLQFSQNDTIKQKVKVRSGALTNQLRYNWGIEEKNRDNNLHHAEDAIILAFATQGEVQRMSTISAKREDFKYQTAKERKIKFTPPFSDFKSVLDESVGDIFVSFAPRRKISGAAHKATIKPKDTGGKYKFPVNNGMAENGVIQRVDVFKNAKNKYQFIVFYPADFYKDDFPELDLKGNEIDKNVQFLFSLFKDDLIEFKTKKTKTKDSKHLLAYFKYIRSDGKIAFQQNYKAEIERKESDNKKGYKDILLATGSGLASLKKYQVSVLGDIAEVKNEKRLPLIKQMYKSKPKKK

SEQ ID NO: 8029 - protein, 854 aa, synthetic construct
  REGION 1..854: note = Synthetic
VLFEKQAELGNQFTTDELKQKYKQIVFTQRPIQFKADLVGKCTFEQDKYRGAKNCFSAEKSVLLNKINNTDLIDENTGEIKRLFEFSALDKLLDIFYKTKEVKYATLRKQLEISGNFEFKQLDYHQNFEYKTNIKAKIVDFYKLEDWLTPEQKEKLEKQVLDDKKEKFKRYKYSSIRSILSLQDSQKFKGVKYDTKVEDTVFGKLNGYHSIKKELNQKVFDLLFTKKIKFNKIAEIITYQKDDESATQDLKEQVFKNLDLDEIAINEAIDGLLNISFSGFNNLSVQALDKIIPHQEEGLKYHNAIKEVYEHHSHFKNTNPQQYLRPLNKKENYQITNPTIKRVFSQFRKVLNAVIRKHGSFDVMHIEMARELKNSKKRKFEIVTGQKEYQQEKAEIKAQFLENFHHEGTGRELLKFRLYEQQHGKCIYSKNEIKIDRLLEDGYVEIDHILPWSRTFDNSLNNKVLCLKVENQNKADQTPFEYLANGEKNNSEWQEYKNYINSFVNIKQAKRNKLLNTNLPKRRGNDLTDNDIENPESGFLARNLNDTAYASKFIKNFVERNLAFLENSEIKQKVKTRNGALTSQLRYNWGVKEKNRGNNLHHAEDAIILAFSTQGEVQRMSTISANREDFKYQTTDERLVKFTPPFVNFKNALDQSINDIFVSFAPRRKVAGAAHKATIKSKNIGGKYKFSVNQGVAENGVIQRVDVFKNAKNKYQFVVFYPADFYKDDFPKLDLSGKEIDEDSKFLFSLFKDDLIEFKTKGNKKNPSRHLSAYFKYIQSDGRIAYQRHDKTEIERKKSDNKKGFIDILLATKSDLQSIKKYQVSILGDCQEVINEKRLPLIKQMRKNKSKQQK

SEQ ID NO: 8030 - protein, 1053 aa, synthetic construct
  REGION 1..1053: note = Synthetic
MKILGVDLGIASVGWALVDDKKNEIIDSGVRIFTQSTNKDGKTLASVRREFRGGRRALNRKKQRLIQLKKLFISNKLLSKSEFMHLFNSEKRLDIWQLRAKGLERQLDNKEWARVLYHIAKRRAYQSNRKAEESGNTDKKKVLSAIKTNQEKMKQGGYQTIGEMIYSETKHPSSGRVRRNKKDNYTWSVSRIFLREEIDVLFEKQAELGNQFTTDELKQKYKQIVFTQRPIQFKADLVGKCTFEQGKYRGAKNCFSAEKSVLLNKINNTDLIDENTGEIKRLFEFSALDKLLDIFYKTKEVKYATLRKQLEISGNFEFKQLDYHQNFEYKTNIKAKIVDFYKLEDWLTPEQKEKLEKQVLDDKKEKFKRYKYSSIRSILSLQDSQKFKGVKYDTKVEDTVFGKLNGYHSIKKELNQKVFDLLFTSKIKFNKIAEIITYQKDDKSATQDLEEQVFKNLDLDEIAINEAIDGLLNISFSGFNNLSVQALDKIIPHQEEGLKYHNAIKEVYEHHSHFKNTNPQQYLRPLNKEENYQITNPTIKRVFSQFRKVLNAVIRKHGSFDVMHIEMARELKNSKKRKFEIVTGQKEYQQEKAAIKAQFLEIFVYEGTGRELLKLRLYEQQHGKCIYSRQSIEIDRLLEDGYVEIDHILPWSRTFDNSLNNKVLCLKVENQNKTNQTPFEYLANGEKNNSEWQEYKNYINSFVNIKQAKRNKLLNTNLPKRRGNDLTDNDIENPESGFLARNLNDTAYASKFIKNFVERNLAFLENSEIKQKVKTRNGALTSQLRYNWGVEAKNRDNNLHHAEDAIILAFSTQGEVQRMSTISAKREDFKYQTTDERLVKFTPPFVNFKNALDQSINDIFVSFAPRRKVAGAAHKATIKSKNIGGKYKFSVNQGVAENGVIQRVDVFKNAKNKYQFVVFYPADFYKDDFPKLDLSGKEIDEDSKFLFSLFKDDLIKFETKGNKKNPSRDLLAYFKYIQSDGKIAYQRHNKAEIERKKSDNKKGFIDILLATKSDLQSIKKYQVSILGDYQEVINEKRLPLIKQMRKNKSKQQK

SEQ ID NO: 8031 - protein, 1051 aa, synthetic construct
  REGION 1..1051: note = Synthetic
MRILGVDLGVASVGWALVDDENNEIIDSGVRIFTQSTNKDGKTLASVRREFRGSRRGLNRKKQRLNQLKKLFIAHKLLSKSEFKHLFDSKNRLDIWQLRAKGLDRQLNNQEWARVLYHIAKRRAYQSNRKSESNGDDSKKKVLSAININQAKMNQGGYQTIGEMIYKENKHPGDGKIKRNKKDKYTNSISRDLLRDEIDILFEKQNEFGNQYTDATFRDGYKQIAFTQRPIQFNTDLVGKCTFEKDEYRGAKNCFSTEKSTILSKINNTDLIDKDTGEIVRLFEYATLESLLDVFYSTKEVKYTTLRKQLKISDNFEFKQLNYHQNFEYKTNIKAKIVDFYQLEDWLSLEQKVLLEKQVLDDKKEKFKRYKYSSIRSILSLPDSQKFNGVKYDTKVEDTAFGKLNGYYSIKKELSKDVFELLFVDKDKFNKIAEILSYQKDDDSATNDLKSQVFNGLNLDENIIDEAINGLLNISFSGFNNLSIKALDKILPYQEQGFKYHDAVAEVYKHHSQFKATNPQQYLRPLNKEENYQITNPTVKRVFSQFRKVLNAVIRKHGSFDAMHIEMARELKNSKKRKSEIETGQKEYQQEKEALKAKFLENFGYEGSGRDLLKLRLYEQQHGKCIYSKKEIKTNRLLEDGYVEIDHILPWSRTFDNSLNNKALCLSAENQNKGNKTPFEYLTNSDKDSEKWQEYKNYVGSFANIKQAKRNKLLNTTLPKRRGNDLSGDDIENPESGFLARNLNDTAYASKFIKSFVEKNLIFAENSEIKQKVKVRSGALTNQLRYNWDIEEKNRGNNLHHAEDAIILAFATQGEVQRMSTISAKRADFKYQTADERKIKFTPPFSNFRDIVDESIDKIFVSFAPRRKIAGAAHKATIKPKDTSGKYKFPVNDGMAENGVIQRVDVFVNNKNKYQFVVFYPADFYKDDFPQLDLNGNEIDENPQFLFSLFKDDLIEFKTKKTKNKDSKHLLAYFKYIQSDGKIAFQQNYKAKAERKKSDNKKGYTDVLLATGFGLVSLKKYQVSVLGDKVEVKNEKRLPLIKQMRKNKAKK

SEQ ID NO: 8032 - protein, 1054 aa, synthetic construct
  REGION 1..1054: note = Synthetic
MKILGIDLGIASVGWALVDDKDNKIIDSGVRIFTQSTNKDGKTLASIRRGFRGTRRVLSRKKQRLNQLQKLFIDNSLLSKSEFKHLFSSKNRTDVWQLRAKGLEQPLNNEEWARVLYHIAKRRAYQSNRKSENSGDDDKKKVLSAININQKKTDQGGYQTIGEMIYSETKHPGDGRIRRNKKDNYTWSISRDMLRQEVGILFKKQVAFGNQFAGDDLKQNYKEIVFTQRPVQFKADLVGKCIFETDEYRGAKHCFSTEKSVLLQKINNTDLINEETGEIRRLFECVNIDSIFDIFYTVKEVKYTALRKQLKISNNFKFKQLDYQQNFEYKTNIKAKVSDFYKSEDWLTSEQKTILEKQVLDDKRENFKRYKYSSIRSILSLPESQKFNGVKYNTKVEATTIFGKLVGYHSIKNELDSEVFSLLFANKNKFNKIAEIITYQKDDKSATKDLEDMVFNNLKLDKIITNKAIQDLLNISFSGFNSLSIKALDNILPYQEQGLKYHNAIKEVYEHHSHFKANNLQQYLRPLNEKENYQITNPTVKRTFSQFRKVLNAVIRKYGSFDAMHIEMARELKNSKKMKFEIQTGQKEYKQEKEAIQIKFLENFGDKGSGRDLLKLRLYEQQHGKCIYSANELKINRLLEDGYVEIDHILPWSRTFDNSLNNKALCLSKENQNKSSQTPFEYLANSDKESQKWQEYKNYIGSFISVKQAKKNKLLNTTLPKRRGNDLNSDDIENSESGFLARNLNDTAYASKFIKKFVEQNLVFSDNSKIKQKVKVRSGALTNQLRYNWGIEEKNRGNNLHHAEDAIILAFSTQGEVQRMSTISAQREDFKYQTADERRVKFTPPFTNFKNALDESIDNIFVSFAPRRKIAGAAHKATIKPKDTGGKYKFLVNNGAAENGTIQRVDVFVNDKNKYQFIVFYPADFYKKDFPKLDLSGNKIDKSSQFLFSLFKDDLIEFETKKTKAKDSKHFLAYFKYIQSDGKIAYQQHYKAEIERKKSNNKKGFTDILLATGGGLVWLKKYQVSVLGDYVEVINEKRLPLIKKMRTNKSKKQK

SEQ ID NO: 8033 - protein, 1055 aa, synthetic construct
  REGION 1..1055: note = Synthetic
MRILGVDLGIASVGWALVDDKKQEIIDSGVRIFTQSTNKDGKTLASVRREFRSGRKVLSRKKQRLTQLKKLFIGHKLLSKSEFKYLFNSKDRLDVWQLRAKGLERQLNNKEWARVLYHIAKRRAYQSNRKSEESGNIDKKKVLSAIKTNQDRINQGGYQTIGEMIYKETKHPSSGRIRRNKKDDYAWSISRDFLRQEVDKLFEVQRSFGNKFATDELKQEYEYIAFKQLRIKFKADLVGKCTFEEDEYRGAKNCFSAEKSVLLSKISNTDLVDKDTGEIMRLFEYATLESLLDVFYNTKEVKYTTLRKQLKISDNFEFKQLDYQQNFEYKTNIKAKIEDFYKLEYWLSPEQKEILERQVLDDKKEKFKRYKYSSIRSILSLSESQNFKGVKYNTNVEATIFGKLTGYHTIKDELNSEMFNLLFSNKDEFNKIAEIITYQKDDKSATQDLRKQVFNNLNLNESIIDKAISGLLNISFSGFNHLSIEALDKILPYQQQGLKYHEAVEKVYGHHSNFKNTKLQQYLRPLSKEENYQITNPTVKRTFSQFRKVLNAVIRKHGSFDAMHIELARELKNSKKRKFEIETGQKEYQQEKEAIKTKFLENFGYEGTGGDLLKLRLYEQQHSKCIYSKQEIKINRLLEDGYVEIDHILPWSRTFDNSLNNKVLCLAEENQNKTNQTPFEYLANSDKNSEAWQEFKQYVNSVHGIKIAKRNKLFNTTLPERRGNDLSTDDIENPESGFLARNLNDTAYASRFIKKFVEQNLVFSENTEIKQKVKTRSGALTDQLRYNWGIKEKNRGNNLHHAEDAIILAFSTQSEVQRMSTISAKREDIRYQTAGERPIKFTPPFVDFKNALDKSIKNIFVSFAPRRKIAGAAHKATIKPSNTGGKYKFPVNKGVAENGIIQRVDVFVNDKNKYKYQFMALYPADFYKDNFPELDLSGNKIDENSQFLFSLFKDDLIEFETKGNKRNKSRHLKSYFKYIQSDGKIAYQQHYKAEIERKKSNNKKGFVDVLLATKSDLQFIKKYQVSVLGDIQEVINEKRLPLIKQMRKDKFKKKK

SEQ ID NO: 8034 - protein, 1462 aa, synthetic construct
  REGION 1..1462: note = Synthetic
MSNKKFGIDLGTNSYGWAIRNFDLEENQIEKAGVIRFGSGVGIDKSGSVFTFASVRTKGRGVRNRYKSEKNRKFELLKYLIKYKYVPLTENELKSWKNYVHPNLRTNEIISRKFPKENIKFLNWLQNDFSYLDFDEKLNIYEIRAKLVNEKIEDEILRKHLLGRVLYHIANHRGFKSSKKVKENIEDDNAEDDISLNRKNPIGAERKKASKIEEIALKYNVKTIGEAFAKEISFGNRVRQELQQYAIRIKQEEEVKLIFEKQGYVLESEEFKNLFKSVFFQKKLKSQKGNVGNCTLEKNKTRCYLSHYDFEEFSVREFLNNVRINRKPLTKNIKDILWNDFFLKRVKSNFKFSEIKEFLYVNFYCKETDYFNYRDKQTIGGCPISSYFFKIFGENWRDLRIETNLQKANAKRKDKRIIYNIEDVWHLLLDEEDDENLKTIFLNKYNFSEKQIIDLLKCSRKFEQGFASLSLNAIRKILVFLREDFDNVSAKLLANVPIVIGKEQYESNRKKIIEFLINIQDEVNFEKLTSNIVNELIYEWKNEEQKRGYRDVEYKLSNNVEGKDILNKLQIRFGKDTWTDYSEEIKKKYYNTCFNKFQFFFKTSKREFIKLPTLKDTFKGYLKNNFLSHFSEDTINKKLERIYHPSETIIYQKPENSDVILQLGSPKHPALKQPKALKSLHILKNHLNQLLKEEIIDSDTEIIIEIARELNDINRAWAIEQYQKKQEQEREEIKVLLEEYFLSNGLNVNPQSEDDNDKMRLAIEQIEMEEKDYDYSIKENSKTKEKKWDYFIKQEKSKIEKYVDKIKLWKEQNFRCIYTNKSISFKDLFNDRIVDFEHTIPYEISQDNSLRNKTLCYSHYNTNIKKAKIPTELIDDYETIRNNIEHWVQKVKFIEDRIEFWKLESKKAVGDKERKDSAIRERHLWSLELNYWKGKVEGFLVKEITEKWLNSQLVDTQIMTKYAYHFLKTIFNKVRVVKGNDTKEFRKILQVQPKEELEKNRTHHSHHAIDAAVLTLIPPSPEKERIKVIAEEFRKKYKKQYHDYVPYRNYSSEHVLKIKDEIIINYKEKDKIFSSFVKNLKKNGKRIPLEIYNKQTNKKEIVYQKNEKGEIEFRKYEDGNFIIKKDQFGNPIKDQFGGKIPIPEYKKMKGDGFRGSIFQDSFYSELSYFERDENGNFKFDKEGNHILKKNVIAKRIPIDDAKKKIDAIIDFQVKENVKKEIERIKEEENLLKDNKLELVDKKIYQLNRKGERVKDQFGKFITYRHVRCAIPNTKVVPIKNHLYGDNRHYLAQHEEVSLAAIYEIKTKNKIKRELKTLNPIHIAELKNNLNILDKKDFFEYLIDEKTGEIIYPKYVFSKKTKVLFYGNETIEDLKRIYNEGNIEDIQKRFFMISGIEENKAGKKIIFQNCFMAGDALKSLPKNLSELNLNENVETYKLSQGNWNFIMEGYDFKINALGEIEFK

SEQ ID NO: 8035 - protein, 1059 aa, synthetic construct
  REGION 1..1059: note = Synthetic
MALVLGLDLGARSVGWALLEKQGDNWTRIVRAGVRVFEAGTEGNIEQGRDQSRGATRRIARLARRQIRRRRQRARALYRELASAGLLPEVTPSPGSPLAVLIQQAINDLDEHLRQKYAQESAVSQLPYFLRARALDHRLEPHELGRVIYHLGQRRGFKSNRKAEAREKADGDPLKEQKDKSVVYREIEELKAQIQDTGARTLGEYLSRVDPAVERIRHRYTQRRMYEEEFEAIWEAQRPHHAALTRELKDRLWDILFKQRPLRATDDLVGECDWIPGEKRAPVWSMDYQRFRLLQAVNHLRVSENHSAPRPLSSEERLRLLDVLETQSKISFAQAKKILGLRKAEFTIEEGGEKNLPGNAVAAQFYEKLGQDWIRLKPEDRQALVECVAVAESDEQLLEALKQQWGLSEDQARRIVQEVSLPSGYARLSLKAIRAVMPYLEEGWDVQRARIEAGIPLHRPVELHDLLPPLADSGVAVYNPAVKRVLTEMRKVVNAIITHYGKPDEIHLETARELRKSREEREKDSKRMREHEKEREAIIRRICEEIGIPETRISRDDVRKAMLWEECNGMCPYSGRSLGGFASLFSGNSPAQIEHIIPFSRSLDNSFVNLTLAHVSENAYKGDKTPWEAYGANPEQWDRILQRVALFKGSYKKAKLNRFKMDSNAVGEFLEQFSSRALNDTRAAAVAAARYLALLFGGETVGGKLKILKITGQVTAHLRDAWDLNGLIPSIHRETRGEAADKEPKTPPLKSRDDHRHHAVDAVVVALCDQGSIHRLSEASKTAVAARRRLLAPMAPPWVGFREQLKDILKSMNISFRPDHRVTGALHKETFYTKLGQNQKGGDMVRLRVPVTSLSSKDIENIADPTVREIVRAKLEEVGGDAAKLEKNWPLLPNRNGNPVPIKKVRVNLNRAVVSVGKGRWQRWAEPSETHHIEIYEVTANGKTTWSGDVVTMRDAISRASRGELVVRRSREPNSRFLFSLAKEDMLRLQGDKSGIWVVKKIKSNTQIVLVPQHDARKEKEKDKSNGRETLNPTASGLRKYYAEKVVVLPIGDVVVCHE

SEQ ID NO: 8036 - protein, 1058 aa, synthetic construct
  REGION 1..1058: note = Synthetic
MESVKHSSGNPVPAPLVLGLDIGVASVGWAVVRLPTGDSSGSVLALGSHLFEPGTAGTDADRQRGADEPRNTARRTARLTRRQIWRRARRKRKLLLLLQEHDLLPRSTPALRTPAEIDQYLKSVDAALRPKWAKTHEDQQRWPYLIRAAAATEPVERHELGRAIYHLAQRRGFLSNRRADAGRRDEDQSEMKREIGELADRIAAHDPPTLGALLGSLDPDQERLRARWTSRAMYVDEFNAIWLRQAADHGLSEEAREEVFEAVFWQRPLKSQKNLVGRCSLEPGERRAPLAHRRAQRFRVLQAVNNLTVAAEGELPRPLTDEERATLLDALCRKGDHTWAAARRACGLGRAAHFNLEDGGDPKLIGHRTDAKLIDVFGPAFDRLSEDDRDRVVEDLRSFRLPEALERRGRSRWGLSNEQAIAFAGIELEEAYASLSLKAMRRLLPAMERGVPYATARRELYPESFASSEPHDLLPPVAASMPELRNPAVARALTEVRKVVNEVVRRYGTPDQVRIELARDVKNPRSLRERLSRQNRERQRERDDAKARILKEMGYQNPSRDDVDRVLLADECGWRCPYTDRQIEWSTLLGPQSQFDVEHIWPRSRSLDDSFVNKTLCYHEENRARKRGRTPFEAYSGDREAWNAMLARVARFKGDLRTRREKMRRFMAESIDADFTNRHLSDARYIGSAAADYLGALYGGQVDANGIRRVYIRTGGLTAWLRTGWGLADLLGSNEDGSKSRDDHRHHAIDALVVALTDERSVQQLARAAEAADARWARRAFDTVDEPWPGFLREVGEKIQSVVVSHRQSRRVSGPLHNETIYSQPINGRHRVSKELQSLTPAEIRDGRVVDKRALRAIVDKLASAGLDSPTPQQLSKFFADPASAPMVRGHGGKPVRLRRVRVEVGGQKAAIGREAAVRHVETASNHHTVVWGVCGADGSEERWEDQPVTLMEAYGRVAEGKPVVCRDGGPNRRFQFSLVIGEHVEIDVPGGEGERDIYRVLSISHRDMELARTSDARTSTQRKEAKDRLRVSGEKLRTLHARKVRVTHLGELRPARD

SEQ ID NO: 8037 - protein, 1054 aa, synthetic construct
  REGION 1..1054: note = Synthetic
LALGSAASRGAASRTSRGVRSGVNFIPSGVPAQHPAGKGAKSPTPAAGPAGGTRPGRRGVPQDSLMPRAAAYMPKWGASHAARQLWPYMMRRDAAAGRELTAHEIGRAIYHLAQRRGFLSNRRTEGKAKADEDKSVVKSGIGELQAAIDAMPDEPRTLGAYLASLDPAEHRARGRYTARSMYLAEFDRMWSAQSARWPSLLTAKARADIEHAIFFQRPLKDQSHLIGKCSLIPDQRRAPIAYRIYQRFRVLQTVNAVEVSMPDEPVRRLTDDARRMLTAALCREGDLTFAAVKKLLGIKKATLNFEAAKTKGLIGHRTDATLREAFGERFDTLPEPERDLLVQTMRSFRSPDALVVRLKERWGLSPEQAAWLADPRQALEEARGSISLAAVRRLLPHMEVGGVGGGGLDYATARKAEFGVRDAQSDEPFDELPPLACFTDRHNSEKCYAKRCGSTARASAALSTLRNPSVARALTEVRTLVNAIVRRHGKPAIVRIELARDLKNPRGVRERMTRQNRDREDVRKAAYQRVVQKADIPRPSREDVDKALLFEECGGICPYTGRPIDFRSMFGRHPEVDVEHIWPRSRCLDDSMLNKTLCYADENRSRKRGRTPFEAYGGGSGADNERYAQMLDRVLRFKGDGYARREKHRRFAATEIDAGFENRHLSDTRFIARACADYLALLFGGNTQMRVDEEGTRRVETPTGGLTAWLRSGWGLSRLLGETPEKNRADHRHHAIDAIVVALTDQGAIKRLADAAKRAETKRERRAFEDVEEPFAGFRDRAKELIDGMVVAHRQSRKVRGPLHAASIYSRPLGAPTDPEHRIRKELEKLSPTEIAKGLIVDKRALKAIRDKLKELKITKPDQKTIGQVFGNPANAPLVMGHGGKMVRLRKVRVVVTKTPQRIGRKHPKHILTAGNHHTVIVEEKDAQGKVRWVDEPVTLVDVVRRLDAKAASVQRVQPEGRRFVFSLAKNDFVEIDNPIRGGRGRRVYRVSYLSEGLTGLRLHQDGRPAGKLRGSRAEGRADERVIVDGEKLRKLNARKVRVTYLGEILPAND

SEQ ID NO: 8038 - protein, 1123 aa, synthetic construct
  REGION 1..1123: note = Synthetic
MKKYTIGLDLGINNVGWAKYDLETKKVIDKGVVRFKESSTAQDRRIIRGSRRLRKRKQHRVERLAIQLSNINFCTSRSYEPELLNKRIKGLNESLSEQEITNIIYWFAIHRGYIPFDEEKPEREVHKFAEDEYPCQYIFDYYKEYGVYRGQCDLISLKDNLKELKQILLTQQKYHSKLTDEVIDNILYIIQSKREFWEGPGASKENQLSPYGRYRTLEDLEKYKADSTYHQYLYEMLIGKCELSIDKDGFMDQVAPKCNFYAEEFNFYNDFINMSVKEPSQIDEEYRNKITLKGKFTKDTIEEIKKEILNTKTVSLEKLVKKVLGLELKDIQGYRIDKKYKPEISKFEFYKYLLKSFKDKKLNPHWLENDDKTIYNQIIYILTVAPSTYAIEDMLKDRVKEVEFKKEEIDVLIDIKKKKNPDLKYHSLSERILKKALDDIKRHNCEYNFMQIMKRLEYEKEMKEYFQNNYSTKTQSPYTIEDQYIDHLIANPQVKKTLRKAIKVINAIIKKEKNYPETIVIESATSLNSKERKKQIKAEQKKYDKLNEEAKNELEANGYEATDKNMQLLINWKETNESCIYCGESISLKEVLTTEIEHILPKSKSMDNSHNNTTCSCLKCNKEKNNRTPYQYLTSENRYEGFKNRVMNQYDKMSQDKKSNLLFEGDIDKYSIKFINRNLRDTSYASVALVQELKKYNEYLGAKEGYKINIITSPGQLTSKIRQYLKIKDKDRTYLYHHVVDAMILASIPDTEIGKVLIEAQNDSQYWFKDKNKENKYKEEVYNMLNHVWLSNRDQIQKFNQDCDNMPEDNKDGLIKRSYEVLKNPIQQFSQYTEYAKYIKQDDGYYKILQVDNIYNLLIRKKDGSVDKDKQLLDELFDLSNKKTISLLCEKKDPKLYQKLKDIYIKNASSINPFVDECKYMYGLEEGDKFNYLKQGIRKTDNPNSPLVIRLRYLKRVTNPYIKNNITTRRKNVYNEFTINKPKKDTIIGLDGLKQVSTRIFYSYDDKKFIFLPICAISFVNGKLNKKEKNYQTTYNRLIGNKNVKEIGNIYTGEWVGVYKKNGEYLEGRYKGYHKTSNVLEYYINGLDTLSCVKICSSDLRIIIYTTDILGNRHIRLDTQKEI

SEQ ID NO: 8039 - protein, 1120 aa, synthetic construct
  REGION 1..1120: note = Synthetic
MKKYTIGLDLGINNVGWAKYDLEAKKVIDKGIVRFKESSAAQDRRDRRGSRRLRKRRQHRVERLAVQLSNINFCTSRSYEPELLNKRIKGLNESLSEQEITNIIYWFAIHRGYIPFDEEKLEREVHNFAEDEYPCQYISNFYKEYGVYRGQCDLIFLKDNIRELKKILITQQKYHSKLTDEVVDNILDIIKSKREFWEGPGAPKENQLSPYGRYRTLEDLEKYKKDSNYHKYLYEMLIGKCELSMGRDGSIDNVAPKCNYYAEEFNFYNDFINMSVKEPSQIDEDYRNKITLKGKFIEETIEEFKKEILNAKTVSLEKLIKKVLGLELKDIQGYRIDKKYKPEISQFKFYKYLVNQFKNKNLNPTWLEDEDKTIYNQVIYVLTVAPSTYAVEDMLKERVKEIEFKKEEIDVLKNIKSKKNPDLNYHSLSESILKKALNDIKKYNCEYNFIQIMKKLEYEKEMKEYFQNNYSNKTEKPYTIEDRYIDNLIANPQVKKTLRKAIKVINAIIKEEKNYPEAIVIESATSLNSKERKKQIEEEQKTYDELNEEAKKELEVNGYETNDKNIQLLINWKETNESCIYCGKHISLKEVLTTEVEHILPKSKSMDNSHNNTTCSCLNCNKEKNNRTPYQYMTSQNKYESFKDCVIKKYDKMSQIKKSNLLFEGDIEKYSIKFINRNLRDTSYASVALVQELKKYNEYLEAKEGYKIHIVTSPGQLTSRIRRYLKMNKNRDYLYHHVVDAMILASIPDTEIGKVLIDAQNDNQYWFKHKDDEYKEKVYNMLDNVWLVNRDQIQKFNQDCDNMPEDNKDGLIKRSYEVSKNPVQQFIQYTEYTKYIKQDDSYYKISQIDNIYNLLIRKKDGSADKVKKDLDELFGLSNKKTKILLCEKKDPKLYQKLKDIYIKNASSINPFIDECKYMYGLEEGNQFNYLKHGIRKTDNPNSPLVIRLRYLEKVTNPYIKNTITTKRRNLYHEFTINQPKKNTLIGLDGLKQVSTSIFYAYEDKKFIFLPICAISFINGKLNEKENNYQTTYNRLIGNKKVTKIGNIYTGEWVGVYKKNGQYLEGRYKGYHKNNNCLEYYINGLDTLSCSTISSSDSRIIIYTTDILGNRYIRLDTDKII

SEQ ID NO: 8040 - protein, 911 aa, synthetic construct
  REGION 1..911: note = Synthetic
LGGERVNIFRICRALCRRARRLRKRKQHRVERLAIQLSNINFCTSRSYEPELLNKRIKGLNESLSEQEITNIIYWFAIHRGYIPFDEEKPEREVHKFAEDEYPCQYIFDYYKEYGVYRGQCDLISLKDNLKELKQILLTQQKYHSKLTDEVIDNILYIIQSKREFWEGPGASKENQLSPYGRYRTLEDLEKYKADPTYHQYLYEMLIGKCELSIDKDGFMDQVAPKCNFYAEEFNFYNDFINMSVKEPSQIDEEYRNKITLKGKFTEDTIEEIKKEIISTKKVSLDKLVKKILGLELKDIQGYRIDKKYKPEISQFEFYKYLLKSFKDEKLNPSWLENDDKTIYNQIVYILTVAPSTYAIEDMLKDRVKEVEFKKKEIDVLIDIKKKKNPDLKYHSLSERILKKALDDIKRHNCEYNFMQIMKRLEYEKEMKEYFQNNYSTKTQSPYTIEDQYIDHLIANPQVKKTLRKAIKIINAIIKEEKNYPETIVIESATSLNSKERKKQIEEEQKTFNQLNKEVKKELEDNGYEATDKNMQLLINWKETNESCIYCGESISLKEVLITEIEHILPKSKSMDNSHNNTTCSCLKCNKEKNNRTPYQYLTSKNMYEGFKNRVMNQYDKMSQDKKSNLLFEGDIDKYSIKFINRNLRDTSYASVALVQELKKYNEYLGAKEGYKINIITSPGQLTSKIRQYLKIKDKDRTYLYHHVVDAMILASIPDTEIGKVLIEAQNDSQYWFKDKNKENKYKEEVYNMLNNVWLSNRDQIQKFNQDCDNMPDNNKEGLIKRSYEVLKNPVRQFSQYTEYAKYIKQNDVYYKISQIDNIYNLLIRKKDGSADKDKKLLDELFDLSNKKNKTLLCEKKDPKLYQKLKNIYEKNSFSINPFVDESKYMYGLEDGDKFDCLKQGIRKTDN

SEQ ID NO: 8041 - protein, 1058 aa, synthetic construct
  REGION 1..1058: note = Synthetic
MSTVLGLDIGSNSVGWALVDIENQSITAMGVRIFPDAVENKNSEREESKNVARRMKRQLRKQYDRRRRRAKVVRSIMVKNALLPLTEEELDRLNTSDPYELRSRSLTEKLELYEIGKIIDHINSRRGFQSNRKSSSEEETSGVIIDGTKDGLKPGIMAIDESLNPKLRKYKDYLAEKASIVKKLPDVKHGYRTMGEYLYSLDPHTVRRRNRFTLRDHYRIELDLILALQARYYPKVLTPELQEQILGSVFHQRPLKSVRHLVGKCRFEPGKKRVHKSHPEYQRFRFLQQVNALRVNTTDRVSGDDTDLLPEEIYNLKLIAEAAAAKGRDRKLKLETQGDIKKALGWKSKIPATASVTSVDLERTIADMRNALGRTYIDGLPREQVHELWNVLQYAEDLDWVIDWAQKKLGVDETKARAFAAIKLEDGYGSVSLRAVRKILPFLEEGDLYNEAVVHAGYNFHDEALDFQITDRVPALLPEDARNSMVQRSFAETRRIVNAIVRKWGNPDVIRVEMGRDLKLPAKQRAKIEKENKKNQTQNANDKTRLEKEFKIDDARRSDILKLRLWEEQDGKCMYTGKTIAKNMLFNGTVDVDHILPYSRTLDDSKNNKVVCLREVNQAKGNRTPWEAAMAGVLDFEALKEMAKILRANHKITDKKHANLLMSAEQFAERFSDDPNNGFIARQLNDTRFATRLVSKYLRTVTKRVEAPTGAMTAMLRRFWGLDGVLPELASLGRAFVAPVLEGGRKDRNDHRHHAVDALTIALTNQSIIQKISTLNARSEEKSKELRDGRIKLPDAPIAGLRKLALDCVDSIIVSHRKTRKGRGALHQETLYGLARTHGGEQRFNAAGVPQYVVRKPLSAGLSCGEIDGIVNPVVRNLVLQRLEEFGVNTSQKKYTIPEDAFAAPLYYELASGERRRIKRVRILVPSTSAVKLRKDGVYVIPFGSDHMLFYRENDSQKYKWELRSRLDLAKKLPLQKLTLSEAEQAISLRAGDLVELTRKGKIDVYKVQKLSGAGVGEVSLFHHADASGNTKQYERPTPSAMQFEKLTVDILGNITPE

SEQ ID NO: 8042 - protein, 1132 aa, synthetic construct
  REGION 1..1132: note = Synthetic
MKQPYRLSLDIGTNSIGWCVLDLKKDSDGVASSEDNLVPCKIRKMGVRLFTEPRNPKDGTTLAARRRDKRSQRRNLFRFKQRQQRLLKVLRKHGLLPVDDTLAQELKDLNPYYLRVRALDYPLSDFELGRAIYNLSIRRGFKSNRKSANEDGSSQLKKAIQNLRDTLSNSKARTVGEFLYNRMLEGKSVKFSYLIDDKTESHEIKNFFIDRTLMESEFDLIWERQREIASLDLNDAMKEDIKRCIFEQRPLKSQKETIGRCSFETHDENGFKIPFGERPIRASKGLISFEIYRLLQTLISLKYTVSEEEGAEKALNSFQIMRVVQQAFKKPTKKVSFATLREILKLESENIFNFEIGQLKQQLGSSKTITKSKKTELDFVPTLAIVSKYEEFKDFLNLERVVELDCFLEFIALGEDDDKLLERLQTQFALSDNRVEAFLDKVLPELDKALGTQYASLSLKALNKINKYVVEHLNQSDNPLKFNEYIQAVYPKRLEGREIHEELPYYGDLDMSCLTKSPKGYVPPKGSDADFYISNPTVHVALNELRKVVNTLIDKYGQRPHSIHLELARDLKNSKKQKDKINQTNKYNEELRKEFEERCLPLGANKDNRDDLIKYKLWKEMDVDGGRKCLYSDKCIQITELFTKNIEIEHIKPYSKSLDDGISNKVLVFHSENRFKKNQTPYQAFVQDEGKWSAIQERARDLFYIRNRRKYENVISQNEPQADAFLERHLNDTRYISRVAREYLTCIVDKPSRVVVLNGGLTSMFNKAYSLYGLLDPNSPEEKNRDDNRHHALDAFAIGVISRSLINKIHRISGGNENILNFSSAILGMKSSVELSRILEDLPIQLDKIVISCKPNRSFAGELHEETIYGAIEPSEWYKYWDEEHKPDWVNKLDTYQNYYLPTKKLSVKEFAKIEEFKSIVDKGLRTTLQKVCGLIQDKIQAKLPKEQVLSVFEYYEANYASLPKRIKIFNSLSPLKLLVKKDPSGRVTQAFKYGNNAFCLIYKDIKSKVKLKVIQRAEAYLSYREYGENYITRLAEKYLPDGLAYHDVIFPKDTLLAILRQPIEGYHSSQVYLQVESFTYRSSRDSYAIMFNESLSPIIIQNSKPFGKGELSPSGFKDYQVHRIDISPMGV

SEQ ID NO: 8043 - protein, 1153 aa, synthetic construct
  REGION 1..1153: note = Synthetic
MKKILGLDIGTSSIGWAFVLEDEENAELNKIQSAGVRIIPMGDEEKQFIEGKTVTLNVERRTYRTIRRNNQRYKLRRHNLVKKLIELNMIPDENLLKRITAFELYGLRDKVLKEKISLEELGRVFFHLNQKRGYKSNRKANKETETDFTQIIINRSKIIEDEGITVGQFFYQKLLKNKETPDANFIIKKNTFLRQDYLNEFNAIWNFQRNFYPELLNDQNLIEIRDRIIYYQRRLKSQKGLVGECRFEKFHKVVPKSSPIFQLFNIYSKLNNLAIASKDGEIIEITPEGREKILLSLNYVDHISKTKLLEMLDCKPTRHYYINFENLEGNKTRAQFLNVLTQSGCDTEKIKHLLAFDPMYARPDLEPFYKLWHLVYSSEEDHQLIKNLMEDYSFTDIQAEAISKIGYTSQHGSLSAKAIRKLLPYLKQGLKYSEACEKVGYNHSDSETIEQRNERVLVDRLEQIKRNDLRNPVVEKISNQVITLVNSIISDPQFGRPDEIRVELARELKQNAKEREDLTKTIRENETENKRIEKILLEEWGFKKVSRKDIIKFRLWQETGGVSVYTGNTIQKSELYDTAKIDVEHIIPRALLFDDSFSNKTLCETSLNREKSNETALDFISSRGIDVNENYRIFVKKLFEEKAITRTKFNKLMMKKEDLPEDFIARQLRESQYIAREITKRLKSVCRNVVSTTGSVTDYLRFEWGLDTILHELNLEKYRKMGKTFQDTDHSGNKVERITEWTKRNDHRHHAVDAIVIAFTKQGMIQKLNTLHSIKGGLQNEMKDYIVQHESWRIKEPCTSIRPQAKRAVERILISFKTNRKVLTKHINKIKIQGGELKQVTYTPRGFLHKETMYGQIRRYEKIKLDKKFTSELYVLMANPFERFLVEKHLGKYDNKFEQAFSTKTLKSDPLYVDEENKKVLETISVFNHKFVYRVALNRSFDKVNDIVDQGVKKIIQKRLEEFGNDHKKAFNDLEKNPVWFNDAKRIPIKTIRVFGPVTLQPLHVDENGKPKDFVQTRNNHHIAIYEDEKGNRYEKVVTFWEAIERKQQGISIIDKNPHAEHKFITSMQVNDLFVFNLDPSEIDFYKEDNWPLVSTNLYRVQNLSNSDYSFRHHLETTLKNTATKIRIQDIKKMNGVKVILDHFGRVIQLGEK

SEQ ID NO: 8044 - protein, 1206 aa, synthetic construct
  REGION 1..1206: note = Synthetic
MPPLGKPYGGKNYAFNFRDLTPRGTRPPYHSNASDTVILCIEKQLATLYCISQDIYMVVKKFLWGNSLMTYTLGIDIGIASVGFAGVNQDQKKILFCGVHIFEAAENPKDGASLATPRREKRGMRRVTGRRSQRKKQIRALLARHGLKDIESIDLSKKEAVTLSPWELRKAALERKLEDGEFARVLFHIAKRRGFQSNKKGNTEENDTEGKKVISGAIELEENAFKSGAKTIAAYLATQPKKRNGDGDYTNSIKRDAVREEIKLIFESQRKYGNEKATEELRFEYAGSGRKEERNTREGDGIAFFQRPLKSSEELVGECTFEAPEKRAPKFSYSAELFVMWSRLNNTRIKYKNGHDPFLTQEQKNKLVDLVHKQKEVTYKQAREKLDLSDDESFNISYRQVGENDDTPEKKRATAEKRVFLSLAGYHTLKEALSPDSERDWDIWRNQRRDDLDDIARVVTYEQDQDTRQSKLTKYDLIETQIQHLRKIEHFSKTVDLSLMAIKKILPYMEKEVITEDGEIIHGYDHAWRKIYGKPENKALELVPKFKDIPNPVVNRALAQTRKVINACIRKHGMPKKIIVELAREVGKPMNGYWVDKNGKKKLGKGNVNHGDRYIKGRRDIEKEQAKNWEKRRSAAIAVAIELGINPDLVSGGDILKHRLWEEQRHACIYCGNIIGAEKFKAADETQIDHILPYAKSHDDSYMNKVLVHKNCNQIKGDSIPFEKWSADTARWEKIVACASVLPKDKQERILMEEFDAREQGWKDRALNDTRYMAKELRNHLKDNLACKVDARNGAITAHLRGIWGFTDEKLNEIINILSSDKDEKDVTKNLSSLGLQDYHVKAALRIRDMDQANLKKALRGLINYKDRTNDRHHALDAIVIACSTEAMVQDVAKHNRYNKEKKHFPTPWPDTFRDDALAAVYGEEGEDGIRRGGIFVSRMPVRKISGAAHQETIRSIRKPDGKVIQRVKLKSLKLSTLENLVDRQRNIKLYNLLKERLEAHGDKPEKAFAEVIYMPVNDPSKPAPRVNSVRIETNEKSGIIINEGLASNGDMVRVDVFQVNGKFQLVPIYIHHFVQKKLPNRAIIAFKDEKDWLEVSDEDFIFSLYKNDLVRIKSKKEDFLGYYNGTHRGTGNINIRAHDSDPSFGKEGVKEGVGVKTLLAFEKYSVDYFGNKHRIVKEQRLGVAQCDDPECGGAVPLEGAVEAAE

SEQ ID NO: 8045 - protein, 1050 aa, synthetic construct
  REGION 1..1050: note = Synthetic
MGYILGIDIGIASIGFAGVNHDLKKILFSGVHIFEAAENPKTGASLAEPRRTARGQRRVIHRRAQRKNAIRQLLLRHGLNCLSVVDKKYEPTGKNTPPISPWDLRRTALDRKLTDEELVRILFHIGKHRGFQSNKKSQSNEGDDGKALKGAGDLEQKWIQSGEKTIGAYLSTQSKKRNGNESYDNFIKRDWLREEIKVIFEAQRKFNQIKATEVLRLEYAGTGEKAKRNTPEGDGIAFYQRPLQSSEKLIGDCTFEKGEKRAPKFSYTAELFVLWSRLNNTKIKIQNGDERFLTQDEKNKLVNLAHKNKGGVSYTQARKEIGLNESERFNISYRQLDKGDNSWEKIRNEAEKSNFLKLSGFHALHEALDTGSATDWQKWIGSDRDKLDEVAYITSFIEDGKIIREKYQKLGLNEDQIKKLCEIKNFSKTVDLSLKALRNILPELEKGLRYDEARKALNYNNQPENKGLSKVPKFEDVRNPVVNRALGQTRKVINACIREYGLPDTIVVELAREVGKNFRDRKDIEKEQKTNEARRNTAKTHIAEILGIIEDNVTGEDILKYRLWKEQDCFCPYSGAYITPEMLRDSTSVQIDHIIPYSRSWDNSYMNKVLVLTTENQKKKNDTPFEYLGKTNRWEALEVFARQLPPKKAERLLTENFDDKKAGEWKDRALNDTRYMARLLKSHLEQSLDLGKGNRVQTRNGSLTAHLRGAWGFPDKNRRNDRHHALDAIVIACSTQSMVQGLTNWNKYEARRKNPAERPLPPKPWESFREDAKESVNSIFVSRMPVRKISGAAHEDTIRSIRKSDGKIIQRIKLKDFKKDTLENMVDKARNIKLYDILKERLDAHGGDAKKAFATPVYMPVNDPSKPAPRINSVRILTNEKSGIEINHGLASNGDMVRVDVFKKDNKFWLVPIYVHHFAEDKLPNKAIIAFKDESEWAEMSDNDFMFSLYKNDLIKVTTKKEIIFGYYNGTHRGTGNLNVRTHDSDPSFGKDGIKEGIGIKTSLSFEKFSVDYFGRKHKIEKEKRLGVAHSDDSERGAAIPEQGTGAAAE

SEQ ID NO: 8046 - protein, 1044 aa, synthetic construct
  REGION 1..1044: note = Synthetic
MSYNLGVDIGIASVGFAGVNLNAQNILCSGVHIFEAAENPKTGASLAEPRRTKRGMRRVFGRRSQRKRAVRRMLIEYGIDNIDAIDVQDKRHNNEKLIKKSPWDLRKESLERILTDAEFSRVLFHIAKRRGYQSNRKGAIANDTEGKKALSGAVQLQEAMVQSGAETVGAYLATLDKKRNGHGSYDNFVTRDLLRQEVRKIFAAQRRYGNIKASRELEHAFAGNGEADKKYTLEGSGIAFCQRDLQSSIGMVGYCTLEPSEKRAPKFSYSAELFILWSKLNNAKIRDTKSNERVLSQDEKNKLTDLAHKNKSGVSFKQARKILNLSDDMRFNMSYRKINDRDDTWEKVRDRAEKSVWLILTGYQTLKSKMATGSDDDWQQWTGPRRNSLDEISHILSFYESEQEIRDLLAPLELQEDQISSLLTITNFSRTIDLSLKVVRAILPFMQKGLTYDKACREAGYNHSQKENKGLTKIPSFKDVRNPVVNRALAQTRKVMNAVIAQYGMPETIIIEMARDVGRSFKERKDKERDQKTNQSYREAAKKHAAEILDIDPDNVRGGDIIKYRLWKEQKGFCPYSGVYINHQMMRDPVATQIDHIIPYSRSWNDSYMNKILCCTDENQMKANNTPVEYFQKQGRNLKTLSAFAKGLPKPKADNLLIENFDEEKANKWKDRALNDTRYIAKLLKNHVEQSLGLGIGNRVQARNGALTSHLRSAWGFPDKNRRNDTHHAIDAIVLACSTQSMVQNLTRWNKYEARRKNPHKRALPPKPWESFIQDTKDAVEHIFVSRMPVRKVTGPAHQDTIRSIRKDDGKIIQRIKVADLKPDMLERMVHKERNIRLYTVLKKRLDAHKGDPKKAFATPIFMPTNDPGKQGPLINAVRIETIEKSGVLINGGLASNGDMVRVDVFRKNGKFFLVPIYVHHFVGGTLPNRAIIAYKPEGEWEEMEDKDFIFSLCKNDLLFIKSKKDEYFGYYGGTDISTGAIGITAHNRDPSFGKKGDGKDRTGVKTLQSFEKYTVDYFGNKYKVRKETRLGVAHNSHPEPCKT

SEQ ID NO: 8047 - protein, 1028 aa, synthetic construct
  REGION 1..1028: note = Synthetic
MRYNLGLDMGIASVGIAAIHSDTYQILMAATRIFEAAEEPKTGASLALPRRVARGGRRVIGRRRKRKSDIRQMLAQQFTMERAQINAIIDAPQTSSVWALRAEGIDRALTPEEWGRVLFHIAKRRGFQSNRKDAQPNDVEGKKALSAAKALEEAMLAANAPTIGAYLATQAKQRNGDGCYEHFVTRDRLREEVNLLFAKQRAFQNPYADTDFEARYTHGAFYQRPLASVADKVGMCGFFPDEPRAPKCSYSAELFVLWSRLNNIKIITNGIQRTLTLDEMRLLAEKAHQSKEVTYKQARKALCMDEESRFNLSYRQTDKGDTTWKSVRDAAEKAIIAKLNGYHALKEAMDSGSVIDWHAWCDGKRTTLDEIARILSFYPDAAQQEAMLMPLGVTQAQCTKLMNITNFSKTVDVSLKAIAMLLTHMQEGMRYDQACVAAGMHHSTRSKGAMQRVPIFEDVRNPVVNRALAQARKVINAVIAQYGLPECIIVELAREVGKNRDDRKKIEIEQKKNAAMREASKKEIAEIYGVRVEDIRGDDVLKHRLWKEQQGFCPYSWQEITPQMLRDAHATQIDHIIPYSRSFDDSYMNKVLCIASQNQAKQNKTPYEYLDDRRFAALQAFAQRLPKAKGDRLISTTVDEEGWKTRALNDTRYMARLLKNHLETSLPVKVQTRNGALTAKLRHLWGFPEKDRTTDRHHALDAIVLACSTQSMVQQVAQEYKAQRSVERKPIPKPYPTFREDAWQYVYGTEGQGGIFVSRMPNRKVTGAAHQDTIRSIRHDAEGNQKIVQRVKLASVKLAHLEAMVDKERNRALYDVLKARLEAHGDDPKKAFATPIFMPTRDGKPAPRIHGIRIITNEKSGIPINGGLASNGDMARVDVFRKAGKYFLVPIYVHHLAGDALPNKAILAGKPETQWETMRDEDFIFSLYKNDLVRIRRKSEEILGYYNGTDISSASIELVMHDKGNFLPDKKGKNKKNPWRGIGVKTLLGFEKYTVDVLGNISKEPVAKEVRCGVVHSDDSESSEIAPE

SEQ ID NO: 8048 - protein, 1051 aa, synthetic construct
  REGION 1..1051: note = Synthetic
MSIANLSGGETAMGYTLGIDIGIASVGFAGVSVKEQTILTAGVHIFDAAENPKTGASLAEPRRTKRGMRRVIRRRAVRKCQLRMLFQKHGLQCVEAIDTPSPRTGKGNPPKSPWDFRKEALERRLTDEELVRALFHIGAHRGFQSNRKGAELNNLEGKKALAGAKELEVRMESANARTIGAFLASQPKKRNGDGSYDNFVTRNLLREEVSVIFEMQRKLGNPKATPELMQEFSNLAFFQRPLQSSEGMVGECTFEKGEKRAPKCSYSAELFVAWSRLNNTKIRMMNGEDRVLTQEEKQRLIDKAHALKSFSYKQARSELRLHEEERFNISYRKTKEADDSWEKIREATEKSSFIVLKGYHELKGALDTGSALDWQQWTNTRRVSLDDIARVISFYEDETEIRTLLAPHGLSEAQMQGLLKITSFSQTVDLSLKAIGKILPYMQQGMTYDKACDAAGYNFNRKESQGQNRVPPFKDVRNPVVNRALAQSRKVINAMIRTHGIPETIIIEMAREVGKPFKERKDIEREQKKNEAHRNEAKQHAAEILGMHPDNIRGEEILKHRLWKEQEGFCPYSGVYITPEMLRDSLATQVDHIIPYSRSWDDSYMNKVLCLTDENQSKRERTPYEYLHATPRWNAFVSFAARLPYKKAERMLIENFDEKKAKDWKDRALNDTRYMTRLLKNHLEQNLGLGQGNRVQTRNGQLTAHLRRSWGFPDKDRRNDRHHALDAIVIACSTQGMVQELSNWNKYEAKRKNPTERPLPPKPWESFRDDAKAAVEKVFVSRMPVRKVTGTAHEETIRSIREDGTGKRQIVQRKKLSSLSLGDLENLVDKERNIKLYNVLKERLEQHGGKPDKAFATAIYMPTNDPTKQGPRIHAVNIITNEKTGVPINQGLASNGDMVRVDVFKKDGKYHLVPIYVHHFASKSLPNRAIVAFKDENEWPEMKDEDFLFSLHKNEFVRIVTKKETVEGYYNGTHRGTGAMSIRTHDSDPGYGKEGIKEGIGVKTALNLEKYTVDYFGIKTRVMKETRRGVADTDDSESDEAEPFQRADNAA

SEQ ID NO: 8049 - protein, 1079 aa, synthetic construct
  REGION 1..1079: note = Synthetic
MTTSQTTIFQSKIKVAIHTTLSQECHIGDFMTYNLGIDIGIASVGFAGVNADLKQILFCGAHIFEAAENPKTGASLAEPRREKRGMRRVIGRRSQRKKQIRALLARHGLQDLALIDQSRHSPTLLSPWDLRKEALERKLTDAEFARVLFHIAKRRGFQSNRKGAEANDTDGKKALSGAKDLQDAMMRASTQTIGAYLATLPKKRNGDGSYERFVTRDLLREEVKIIFTAQNKFGNNKAASTLLHDYAGNGKAQDRNTLEGDGIAFYQRPLQSSEHLVGECTFEPSEKRAPKFSYTAELFVLWTKINNARIRSVNGDERLLTSEEKNLLCELAHKNKGGVTYKQARKVLSLSSDERFNISYRKIKDSDNSWEAIRDTSEASYFLKLTGYHALKAALDTGSTADWQSWIGSRKNNLDDIARILSFHEDKKQVDEMLSKHALSEAQKENLCAIKGFSKSIDLSLKAVRKILPLMQTGMRYDEACKEKYEDHHGKKGNKGLNLIPPFEDIRNPVVNRALAQTRKVINACIRKYGMPETIIIEIAREVGKNFKDRKDIERAQKKNEAYRNEARQHIAEILGIIEDNVRGEDILRYRLWKEQDGLCPYSGVYMTPEILRDSVATQIDHIIPYRRSWNNSYMNKVLCFTDENQNKGNETPVEYFNRTGRKLASLETFARQLPPKKADNLLLENFDEEKAGMWKSRALNDTRYIAKLLISHLRDNLDLGKGNHIQTRNGSLTFQLRGAWGFPDKNRRNDRHHALDAIVIACSTQSMVQRLSSWDKYEARKKKPSERPLPPKPWDSFRDDALIAVNAIFVSRMPVHKITGAAHQDTIRSKRSDGKVIQRIKLKSLSLATLENMVDKARNFKLYNVLKERLDAHNGKADKAFAKPVYMPVNDPSKTAPRISSVRIVTNEKSGIEINEGLASNGDMVRVDVFQKDGKYYLVPIYVHHFVKNELPNKAIIGGKNEKDWLEMDDTDFVFSLSKNDLVQIQRKKGIELGYYVGTDRATGAISIRAHDNDPEFGKEGLMRSIGVKTLLSFEKYSVNYFGEKHKVGKEKRLGVAQCNGTKPSKAQPQTGTATSGK

SEQ ID NO: 8050 - protein, 1061 aa, synthetic construct
  REGION 1..1061: note = Synthetic
MKYTLGVDVGIASIGFAGVNILSQSIPFCGVHIFEAAENPKDGASLAAPRREKRGMRRVISRRAQRKKALRCLFRRHGFGNVDAAIDAAPFAPPEKSVWDLRKEALERLLTEGEFIRVLFHIAKRRGFQSNRKGGEDNDTEGKKALSGARELQEAMRAAAAPTIGAYLATLDKKRNGDGSYERFVTRELLREEVRKIFEAQARFGNAKATPELLTDYAGSGKKEERNTPEGDGIAFYQRPLRSSEDLVGFCTLEPAEKRAPRFSYTAELFVLWSKLNNTRIRNVDGRERELTLDEKNRLAEKAHMLKSLSYKQARKDLGLQDEERFNLSYRKISEEDNTWEKIRDAAEKADFLKLPGYHALKGVLGAGGDMAWQKWTTESGRKKLDEVARILSFYEDRKEVDALLAALDIDFQQREELAKITHFSKVVDLSLKAIRNILPHMQQGLTYDKACDAAGYSRKQNKKLKKVPVFEDVRNPVVNRALAQARKVINACIREYDMPESIIVEMSRDLGRSFKDRKNIEREQKKNQAYREEARHHIAEIIGVVPENVSGEEILKYRLWKEQKALCCYCGSEITPAMLKDAVATQIDHILPYSRSWNDSYMNKVICHTSCNQEKANRTPYEWLAGTPGWESVVLFARQLPPRKAEHLLMQNFDDEKAGQWKDRALNDTRYIAKLLKNHLENSLDLGDGVRVQTRNGALTANLRRAWGLGKRRDNDRHHAVDAIVLACSTQAMVQQHANWNKYEARRKNPAARPAPPSPWENFRQDVMNKVFGEKNAQGIREGGIFVSRMPVRKVTGAAHEETIRSIRKSDGKAIQRVKLSALTPARLEDIVDKERNIKLYSVLKERLDAHGGKPDKAFAEPVYMPTNDPAKKGPRINSVRVVTNEKSGVPINGGLASNGDMVRVDVFLKEGKYYLVPIYVHHFAQDKLPNKAIVANKPEDEWPEMDDRDFIFSLYKNDLVMIRSKKEEFWGYYAGTDRSVASISIKCHDADKSVWNSGQKTGIGVKTLLSFEKYSVDYFGNIFPKHSPGIREKRRGVAQRDDSKSGAAEPVQRAAATGE

SEQ ID NO: 8051 - protein, 1101 aa, synthetic construct
  REGION 1..1101: note = Synthetic
MWYASLMSAHHLRVGIDVGTHSVGLATLRVDEQGTPIELLSALSHIHDSGIGKEGQKDHDTRKKLSGVARRTRHLLRNRRKRLQQLDKVLLGLGFPIPKPGEFLDPSEQTDPYRVWRVRARLVEEKLPEDQRGPAISMAVRHIARHRGWRNPYSTVESLLSPAEESSFMKALRKRIMTKTGEVLDDDITPGQAMAQVALTHKIYMRGPEGILGKLHQSDNANEIRKICARQGVSTDVCKQLLRAVFKADSPRGSAVSRVAPDPLPGQGSFRRAPKCDPEFQRFRIISIVANLRISEATGENRPLTADERRQVVAFLTGDSQADLAWVDVAEKLGVHRRDLRGTAVLTDDGERSAARPPFDATDRIMRQTKIRSLKTWWEKANSEQRGAMIRYLYEEPTDSECAEVIAELPEEDQAKLDSLHLPAGRAAYSRESLTALSDHMLATTDDLHEARKQLFGVDDSWTPPAEAINTPVGNPSVDRTLKIVGRYLAAAESMWGTPDLIHVEHVRDGFTSERMAEERDKADRRRYDDNQKAIQKIRQDYGKEGYISRGDIVRHDALELQGSACLYCGTTIDRHTCQLDHIVPQAGPGSNNRRGNLVAVCERCNRSKSNTPFAVWAQTCGIPDVGVKEAIGRVRGWRKQTPNTSSEDLTRLKKEVIARLRRTQEDPEIDERSMESVAWMANELHHRIAAAYPETTVMVYRGSITAAARKAAGIDSRINLIGEKGRKDRLDRRHHAVDAGVVALMEPSVAKTLAERSSIRGEQRLSGQKQTWKQYTGSTVGAREHFEMWRSHMLRLTELFNERLAADKVYVTQNIRLRLSDGNAHTVNPSKLVSHRLGDGLTVQQIDRAYTPALWCALTREKDFDEKNGLPAREDRAIRVHGQEISSADCIQVFSKRKKTRSDCDEPPFGAIAVRGGFVEIGPSIHHARIYRIDGDEPSYAMLRVFTHDLLSQRHGDLFSAVIPPQSISMRCATTELRQAISTARATYLGWVVSGDELHVPVETFTTHKIGSFLKDYPNTTHWRICGYDSETILILRPKVLSAEGLSDSSSIAEYIIKDRGWRVTINKLAKVHPTVVRRDALGRPRYSSRSNLPVSWTID

SEQ ID NO: 8052 - protein, 1095 aa, synthetic construct
  REGION 1..1095: note = Synthetic
MPAHHLRVGIDVGTHSVGLATLRVDDQGTPIELLSALSHIHDSGIGKEGQKDHDTRKKLSGVARRTRHLLRNRRERLQQLDKVLVDLGFPIPKPEEYPDLSERTDPYRVWRVRARLVEETLPEELRGPAISMAVRHIARHRGWRNPYSKVESLLSPAEESSFMKALRKRIMTKTGEVLDDDITPGQAMAQVALTHKIYMRGPEGILGKLHQSDNANEIRKICARQGISSDVCKQLLRAVFKAESPRGSAVSRVAPDPLPGQGSFRRAPKCDPEFQRFRIISIVANLRISETKGENRPLTVDERRQVVAFLMEDSQADLTWVDVAEKLRVSRQALRGTAMLTADGERSAAQPPIDVTDQIMRKTKISALKTWWDKADAERRGAMVRYLYEGLEDSECAEVIAKLPEKDHAKLDSLHLPAGRAAYSRESLTALSDHMLETTNDLHEARKRLFGVDDSWAPPAEPVGAPVGNPSVDRTLKIVARYLSAVESIWGTPEVIHVEHVRDGFTSERTAEERDKANRSRHNDNQKAIEKIQHDYGKEGYISRGDIVRFHALKLQGSACLYCGTTIGYHTCQLDHIVPQAGPGSNNRRGNLVAVCERCNHSKSNTPFAVWAQKCGIPHVGVKEAISRVNGWVEHNHSTSSGDLTRLKKEVIARLRRTQKDPEIDERSMESVAWMANELHHRIAAAYPETTVMVYRGSITAAARKAASIESRINLIGEKGRKDRLDRRHHAVDASVVALMEPSVAKTLAERSSLRGEQRLTGQEQTWKQYTGLTVGARERFEAWRGHMHRLTELFNESLAADEVYVTQNIRLRLSDGSAHTVKASKLVSHRLGDGLTVQQIDRACTPALWCALTREIDFDEKNGLPAREDRVIRVHGQEISSADCIQVFSKRKKTKSDRDEAPFGAIAVRGGFVEIGSSIHHARIYRIEGEKPAYAMLRVFTHDLLSQRHGDLFSAVIPPQSISMRCAATELRQAISEGRATYLGWIVSGDELHIPVETFTTHKIGSFLKDYPNTTRWRICGYDSETMLILKPRILSAEGLNNSSDIAEYVIKNKGWRVAINKLAKVHPTVVRRDALGRPRHSSRSNLPVTWSIE

SEQ ID NO: 8053 - protein, 1095 aa, synthetic construct
  REGION 1..1095: note = Synthetic
MSAHHLRVGIDVGTHSVGLATLRVDDHGTPIELLSALSHIHDSGVGKEGKKDHDTRKKLSGIARRARRLLHHRRTQLQQLDEVLRDLGFPIPTPGEFLDLNEQTDPYRVWRVRARLVEEKLPEELRGPAISMAVRHIARHRGWRNPYSKVESLLSPAEESPFMKALRERILATTGEVLDDGITPGQAMAQVALTHNISMRGPEGILGKLHQSDNANEIRKICARQGVSPDVCKQLLRAVFKADSPRGSAVSRVAPDPLPGQGSFRRAPKCDPEFQRFRIISIVANLRISETKGENRPLTADERRHVVTFLTEDSQADLTWVDVAEKLGVHRRDLRGTAVHTDDGERSAARPPIDATDRIMRQTKISSLKTWWEEADSEQRGAMIRYLYEDPTDSECAEIIAELPEEDQAKLDSLHLPAGRAAYSRESLTALSDHMLATTDDLHEARKRLFGVDDSWAPPAEAINAPVGNPSVDRTLKIVGRYLSAVESMWGTPEVIHVEHVRDGFTSERMADERDKANRRRYNDNQEAMKKIQRDYGKEGYISRGDIVRLDALELQGCACLYCGTTIGYHTCQLDHIVPQAGPGSNNRRGNLVAVCERCNRSKSNTPFAVWAQKCGIPHVGVKEAIGRVRGWRKQTPNTSSEDLTRLKKEVIARLRRTQEDPEIDERSMESVAWMANELHHRIAAAYPETTVMVYRGSITAAARKAAGIDSRINLIGEKGRKDRIDRRHHAVDASVVALMEASVAKTLAERSSLRGEQRLTGKEQTWKQYTGSTVGAREHFEMWRGHMLHLTELFNERLAEDKVYVTQNIRLRLSDGNAHTVNPSKLVSHRLGDGLTVQQIDRACTPALWCALTREKDFDEKNGLPAREDRAIRVHGHEIKSSDYIQVFSKRKKTDSDRDETPFGAIAVRGGFVEIGPSIHHARIYRVEGKKPVYAMLRVFTHDLLSQRHGDLFSAVIPPQSISMRCAEPKLRKAITTGNATYLGWVVVGDELEINVDSFTKYAIGRFLEDFPNTTRWRICGYDTNSKLTLKPIVLAAEGLENPSSAVNEIVELKGWRVAINVLTKVHPTVVRRDALGRPRYSSRSNLPTSWTIE

SEQ ID NO: 8054 - protein, 1095 aa, synthetic construct
  REGION 1..1095: note = Synthetic
MSAHHLRVGIDVGTHSVGLATLRVDEQGTPIELLSALSHIHDSGVGKEGREKHKTRKKVSGVARRAQRLLRNRRKRLQQLDEVLLDLGFPIPTPGEFLDPNEPADPYRVWRVRARLVEEQLPEELRAPAISMAVRHIARHRGWRNPYSKVESLLLPADESPFMKALRERIMTKTGEVLDDGITPGQAMTQVALTHAVKMRGPEGILGKLHQSDNANEIRKICDRQGISSDVCKQLLRAVFKADSPRGSAVSRVAPDPLPGQGSFRRAPKCDPEFQRFRIISIVANLRISEATGKNRPLTVDERRQVVAFLMKDSQADLTWVDVAEKLDVHRRDLRGTAVLTDDGERSAARPPIDATDRIMRQTKISSLKTWWEAADSERRGAMIRYLYEEPADLECAEIIAELPEKDQAKLDSLHLPAGRAAYSRESLTALSDHMLATTDDLHEARKQLFGVDDSWLPPVEAINAPVGNPSVDRTLKIVGRYLSAVESMWGTPEVIHVEHVRDGFTSERMADERDKANRSRYNDNQKAIEKIQHDYGKEGYISRGDIVRFHALKLQGSACLYCGTTIGYHTCQLDHIVPQAGPGSNNRRGNLVAVCERCNHSKSNTPFAVWAQKCGIPHVGVKEAISRVNGWVEHNHSTSSGDLTRLKKEVIARLRRTQKDPEIDERSMESVAWMANELHHRIAAAYPETTVMVYRGSITAAARKAAGIESRINLIGEKGRKDRIDRRHHAVDASVVALMEPSVAKTLAERSSLRGEQRLTGQEQTWKQYTGLTVGAQERFEMWRSRMLHLTELFNERLAEDKVYVTQNIRLRLSDGNAHTVNPSKLVSHRLGDGLTVQQIDRACTPALWCALTREKDFDEKNGLPAREDRVIRVHGHEIKSSDYIQVFSKRKKTDSDRDEDPFGAITVRGGFVEIGSSIHHARIYRIEDKKPSYAMLRVFTHDLLSKRHSDLFSVDIPPQSISMRCATTELRQAISEGRATYLGWIIAGDELHVPVETFTTHKIGSFLKDYPDTTHWRICGYDSETMLILKPRVLSAEGLNNSSNIAKYVIKDKGWRIAINKLVKVHPTVVRRDALGRPRYSSKSNLPISWTIE

SEQ ID NO: 8055 - protein, 1093 aa, synthetic construct
  REGION 1..1093: note = Synthetic
MSAHRLRVGIDVGTHSVGLATLRVDDQGAPIELLSALSHIHDSGIGKEGQKDHDTRKKLSGVARRTRHLLRNRRKRLQQLDKVLLGLGFPIPKPEEFLDPSEQTDPYQVWRVRARLVEETLPEELRGPAISMAVRHIARHRGWRNPYSKVESLLSPAEESPFMKALRKRIMTKTGEVLDDDITPGQAMAQVALTHKIYMRGPEGILGKLHQSDNANEIRKICARQGISSDVCKQLLRAVFEAESPRGSAVSRVAPDPLPGQGSFRRAPKCDPEFQRFRIISIVANLRISETKGENRPLTVDERREVVAFLMEDSQADLTWVDVAEKLGVHRRNLRGTAVLTDDGERSAARPPFDATDRIMRQTKIRSLKTWWEKANSEQRGAMIRYLYEDLTDPECAEVIAELPEEDQAKLDSLHLPAGRAAYSQESLTALSDHMLTTTDDLHEARKRLFGVDDSWTPPAEAINAPVGNPSVDRTLKIVGRYLAAVESMWGTPDLIHVEHVRDGFTSERMAEERDKADRRRYDDNQKAIQKIRQDYGKEGYISRGDIVRHDALELQGSACLYCGTTIDLHTCQLDHIVPQAGPGSNNRRGNLVAVCERCNRSKSNTPFAVWAQTCGIPDVGVKEAIGRVRGWRKQTPNTSSEDLTRLKKEVIARLRRTQEDPEIDERSMESVAWMANELHHRIAAAYPETTVMVYRGSITAAARKAAGIDSRINLIGEKGRKDRLDRRHHAVDASVVALMEPSVAKTLAERSSLRGEQRLTGKEQTWKQYTGSTVGAREHFEMWRGHMLHLTELFNERLAEDKVYVTQNIRLRLSDGNAHTVNPSKLVSHRLGDGLTVQQIDRACTPALWCALTREKDFDGKNGLPAREDRLIRVHGQELTSNDHIKLFSKKRGNDTKEKPFGAITVRGGFVEIGPSIHHARIYRIEGKKPVYAMLRVFTHDLLSQRHGDLFSAVIPPQSISMRCAEPKLRKAITTGNATYLGWVVVGDELEINVDSFTSGQIASFLEEYPRTTRWRIRGFFNETQIRLRPAYLASEGLIEPSEAVRKTLSIPGWLPTINKVAETHPRVIRRDALGRVRKSSRSGLPTSWIIK

SEQ ID NO: 8056 - protein, 1087 aa, synthetic construct
  REGION 1..1087: note = Synthetic
MAAMRIRVGVDVGTHSVGCCAIAVDPAGAPVRILSALSLIHDAGIGEDGKEKATSRRELAGVARRARRLLRRRRKRLQQLDTLLVRLGYPIVDFAEQKDPYLVWRVRAQLVQEVFPEKTRRYAISMALRHIARHRGWRNPYARTESLLAPAPESDFMRAMRKRVMNTTGEVLDEGFTPGQAMAVVALNNRVAMRGPDGVLGKLHQTDNANEIRRICKTQGVSEQECRELILAVFASESPRGSSRSRVASDPLPGQGDFLRAPKCDPEFQRFRVISIVANLRIAGRDGAQRPLLPRERKKVVTFLLESMSEDLAWGDVAERLGVRRQNLRGTASMTADGERASAQPPVDVTNQVMGSCRIKPLRLWWADADAERRGAMVRYLYEGADDSECAEFVGSLSEEEQGKLDSIHLPAGRAAYSRESLALLSEQMLATDDDLHAARKHVFHVDDSWKPPAEPVGAPVGNPSVDRTVKAVARFLNGVADVWGTPEAIQIEHVRAGFSSERTARELDHDNNRRFRQNQTAVDDIKKAYGIQGEVRHSDVVRYTAVMVQDSVCVYCGGTIGYLTCQLDHIVPQAGPGSNNRRENLVAVCERCNRSKSNTPFATWAQDCGISGVSVEEAVARVRRWRNIQDGRAQSAQLRRLQKNVIARLRRTDEDPEIDARSMESVAWMANELHHRVQSAYPSAEVAVYRGSLTAGARRAAGIDSRVNLLGERGKKDRLDRRHHAVDAAVIALMNPSVAKTLAERSSQRWAQRLSGQEETWKSFTGATPGARDRFDSWRDHMLRLTELLNAALAEDRVCVTENLRLRLGSGNAHHEIVRPLARHRLGDGLTAVQVDRASSPALWCALTRQPDFTPRGGLPPSENRVIKVHERRVTADDNITVFSQKPGDDAAEKPFAAIAVRGGFATIGLTIHHARLYRIEGRKPVYAMLRVFSHDLLPYRRDDLFSVPLALQTISVRCAWPKLRAALAEEAATYLGWVVVGDELEVPMESFTGGYIGGFRKEFPNITRWRIRGFESATVVKLRPNVLAAEGLTESVGDVAKIVGRGWRMSVNVLFSTHPTVVRRDALGRVRHSSAAGLPTTWTVR

SEQ ID NO: 8057 - protein, 1087 aa, synthetic construct
  REGION 1..1087: note = Synthetic
MSAHHLRVGIDVGTHSVGLATLRVDDQGTPIELLSALSLIHDSGIGEDGKKTASTRKEISGVARRTRRLLRRRRKRLQQLDKVLLDLGFPIPDLGGQTDPYLVWRVRAQLVEETLPEELRGPAISMAVRHIARHRGWRNPYSKVESLLSPAEDSPFMEALRERIMKGPGVLLDDDITPGQAMAQVALTQRITMRGPDGILGKLHQSDNANEIRKICARQGISPDVCKQLLRAVFKAESPRGSAVSLVAPDPLPGQGSFRRAPKCDPEFQRFRIISIVANLRISEAGNRDRPLTADERRQVVTFLLEDPREDLSWVDVAEKLGISRQALRGTATLTADGERSAAQPPVNVTDQIMRKTKISLLKTWWAKADAERQGAMVRYLYEGLEDSECAEVIADLPEEDQAKLDSLHLPAGRAAYSRESLTALSDHMLATTDDLHEARKQLFGVDDSWTPPAEPVGAPVGNPSVDRTLKVVARYLAAVENVWGKPEVIQVEHVRDGFASERAARERDRANNRRYEVNQRAIKDIQQSYGVEGHVRPGDVMRHHAITLQDSACLYCGGTIGYHTSQLDHIVPQAGTGSNNHRENLVAVCERCNRSKSNTPFAVWAQTCGIPDVGVKKAVERVRGWRNRPGGMTSGELKRLKKEVIARLQRTQEDPEIDARSMESVAWMANELRHRIAATYPDTDVMVYRGSVTAAARKATGIDSRINLIGEKGRKDRIDRRHHAVDASVVALMERSVAKTLAERSSLRWAQRLTGQEETWKQYTGLTVGAREHFETWRNHMLRLTELFNAKLTADEVHVVENLRLRLGSGNAHDDTIRKYAIPRLGDGLTANQVDRACSPALWCALTREKDFDEKNGLPAREDRFIRVHGQELTSNDHIQIFAKKPGNDAKEKPFGAIAVRGGYAEIGSTIHHARIYRIEGKKPVYAMLRVFTHDLLSQRHDDLFSAVVPPQSISMRCAEPKLRQAIAAGNATYLGWVVVGDELEIDIDSFKTGQIADFLSEYPGTTRWRIRGFYNDRQLRLRPAYLAAEGLIDPSEAISKTLSIPGWLPAINQVAATHPRVIRRDALGRVRSSSRSGLPTSWTIE

SEQ ID NO: 8058 - protein, 771 aa, synthetic construct
  REGION 1..771: note = Synthetic
VAEKLGVSRQALRGTAKLTADGERSAAQPPVNVTDQIMRKTKIGALKTWWVEADAERQGAMARYLYEGLEDSECAEVIAELPEEDQTKLDSLHLPTGRAAYSRESLTALNDHMLATTDDLHEARKQLFGVDDSWAPPAEPVGAPVGNPSVDRTLKAVARYLAAVENVWGKPEVIQVEHVRDGFASERAARERDRANNRRYEVNQRAIKEIQQSYGVEGHVRPGDVMRHHAITLQDSACLYCGGTIGYHTSQLDHIVPQAGTGSNNHRENLVAVCERCNRSKSNTPFAVWAQTCGIPDVGVKEAIGRVRGWRNRPGGMSPGDLKRLKKEVIARLQRTQEDPEIDERSMESVAWMANELRHRIAAAYPDADVMVYRGAITAAARKAAGIDSRINLIGEKGRKDRIDRRHHAVDASVVALMERSAAKTLAERSSLRWAQRLTGQEETWKQYTGLTVGAREHFESWRSHMLRLTELFNERLAADEVHVVENLRLRLGNGNAHDDTIRKYDTPRLGDGLSVNQIDRASSPALWCALTREADFDAENGLPAREDRLIRVHGQELTSNDRIKLFSKKRGNDAKEKPFGAIAVRGGYAEIGSTIHHARIYRIEGKKPVYAMLRVFTHDLLSHRHRDLFSAVVPPQSISMRCAEPKLRQAIAAGNATYLGWVVVGDELVINIDSFTKDTIGRFLKDYPNTTRWRICGYDANNKLTLKPRILAAEGLGNPSSAVSEIVDRKGWRVAINVLAKVQPTVVRRDALGRPRYSSRFGLPVSWTLE

SEQ ID NO: 8059 - protein, 1093 aa, synthetic construct
  REGION 1..1093: note = Synthetic
MPTRRIRAGIDVGTHSVGLATLRVDDQGTPIELLSALSLIHDSGIGEDGKKTASTRKEISGVARRARRLLRRRRKRLQQLDRVLLDLGFPIPEPGEFLDLGGQTDPYLVWKVRARLVEETLPEELRGSAISMAVRHIARHRGWRNPYSKVESLLSPAEDSPFMEALRERIMTGTGVLLDDDITPGQAMAQVALTQRITMRGPDGILGKLHQSDNANEIRKICARQGISPDVCKQLLLAVFKAESPRGSAVSRVAPDPLPGRGAFRRAPKCDPEFQRFRIISIAANLRISETGGKDRPLTADERRRVVTFLLEEPRDDLSWVDVAEKLGISRQTLRGTAALTVDGERAAAQPPVDVTDQIMRKTKIRSLRTWWKQADAERRGAMTRYLYEGLEDSECAEVIADLPEEDQAKLDSLHLPAGRAAYSQESLAALSDHMLATTDDLHEARKQVFDVDDSWSPPAEPVGAPVGNPSVDRTLKVVARYLAAVENVWGAPEAIQVEHVRDGFASERAARERDRANNHRYQVNQRAVKEIQQSFGVEGHVRSGDVMRYHAISLQDCVCLYCGDTISYHTSQLDHIVPQAGTGSNNHRENLVAVCERCNRSKSNTPFAVWAETCGIHGVGVEEAIDRVRAWRNRPVGMSPRDLGRLKKEVISRLRRTQEDPEIDARSMESVAWMANELRHRIAAAYPDTDVMVYRGTVTAAARKAAGIDSRINLIGEKGHKDRIDRRHHAVDASVVALMERGVAKTLAERSNLRWAQRLTGQEETWKQYTGLTVGAREHFETWHGHMLRLTELFNEHLADDEVHVVENLRLRLGSGNAHDDTIRKYATPRLGDSLTVNQIDRACSPALWCALTREADFDEKNGLPASEDRFIRVHGQELTSNDHIQIFTKKPGNDTKEKPFGAIAVRGGYAEIGSTIHHARIYRIEGKKPAYAMLRVFTHDLLSQRHSDLFSAVVPPQSISMRCAEPKLRQAIVLGSATYLGWIVVGDEVNIIVDPFKKNTVGEFLKEYPNTIRWRVCGYDTNSKLTLKPRILAAEGLQNPSDAVKEIVEGKGWRVAINTLASTKPTIVRRDALGRPRRTSRSGLPTSWTIE

SEQ ID NO: 8060 - protein, 1099 aa, synthetic construct
  REGION 1..1099: note = Synthetic
MWYASLMSAHHLRVGIDVGTHSVGLATLRVDEQGTPIELLSALSHIHDSGVGKEGKQKHKTRKKLSGIALRTRRLLRNRRKRLQQLDEVLLDLGFPIPKPEEFLDLSEPADPYRVWRVRARLVEEQLPEELRAPAISMAVRHIARHRGWRNPYSTVESLLSPAEESPFMRALRERIMTTTGNVLDDDITPGQAMAQVALTHDITMRGPKGILGKLHQSDNANEIRKICARQGVSSEVCKLLLRAVFKAESPRGSAVSRVARDPLPGQGSFRRAPKCDPEFQRFRIISIVANLRISETKGENRPLTVDERRQVVAFLTEDSQADLAWVDVAEKLGVHRRNLRGTAALTDDGERSAARPPFDATDRIMRQSKIRSLRTWWTKSDAEQRNAMICYLYEKSADSECAEVIAELPEEDQAKLDSLHLPAGRAAYSRESLTALSDHMLATTDDLHEARKQLFGVDDSWVPPAQPVGAPVGNPSVDRTLKIVARYLSAVKSIWGTPEVIHVEHVRDGFTSERMAEERDKADRRRYDDNQKVIQKIHQDYGKEGYISRGDIVRHDALELQGSACLYCGTTIDRHTCQLDHIVPQAGPGSNNRRGNLVAVCERCNRSKSNTPFAEWAQNCGIPDVGLKEAIGRVRSWRKQTPSTSSGDLTRLKKEVIARLRRTQEDPEIDERSLESVAWMANELHHRIAAAYPDTTVMVYRGSITAAARKAAGIDSRINLIGEKGRKDRLDRRHHAVDASVVALMEPSVAKTLAERSSLRGEQRLSGQKQTWKQYTGSTVGAREHFEMWRSHMLHLTELFNERLTADDVYVTENIRLRLSDGNAHTVEPSKLVSHRLGDGLTVQQIDRACTPALWCALTREKDFDAENGLPAREDRLIRVHGQEFTSNDCIELFSKKRGNDPKEKPFAAITVRGGFVEIGPSIHHVRIYRIEGKTPVYAMLRVFTHDLLSQRHGDLFSAVIPPQSISMRCAKPKLRQAIAEDNATYLGWVVAGDELEIDVKSFTKDTIGGFLEDHPNTTRWRICGYETNSKLILRPRILAAEGLDNPSSAVREIVKGDGWRVEISVLSAVHPTVVRRDALGRPRHSSRSNLPVSWTIE

SEQ ID NO: 8061 - protein, 1088 aa, synthetic construct
  REGION 1..1088: note = Synthetic
MPPKHIRVGIDVGSYSVGLSTIEVDDNDAPIRILSSVSHIHDSGLDKDGKEKATTRRKASGVARRARRLMRERRRRLKNLDATLMHLGYPLPDFDDGEDPYLIWRVRSELVEARLPEETRRYAIAMAIRHIARHRGWRNPYTKTESLLVPAPDSPFMEAMRERIKERTGEILDEDLTPGQIMQRVALTTRLPMRGKEGLLGKLHQSDNANEIRRICAVQGVSEAECREIILAVFKAKSPRGSSVGRVGHDPLPGQESLPRAPKCDPEFQRYRIVSIVANLKVRDDSGQRSLNADERRRLVNFLLTSTTDDLGWVDVADVLGIPRQNLQGTAQLTADGERSAAQPPIDATDRVMRKCKIKALQSWWTDADSERRSAMVRYLYEGTEDSECAEFLSSLSEEEQGKLDNLHLPAGRAAYSLDSLARLNDHMLATTDDLHTARKNVFGVDESWTPPAEPIGAPVGNPAVDRTLKVVARYLDAVRSVYGIPVSIQIEHVRDGFKSERTARELERASNQRFEQNQKTVAEIRKSLGVDGEVRQSDVRRYEAITLQDCTCVYCGQVIDYFTAQLDHIVPQAGVGSNNHRENLVAVCERCNKAKSKTVFSVWADSCEIPGVSVEEAVKRVRSWRNRPGSMRPAQLSRLKKDVIARLRRTQEDPELDSRSMESVAWMANELRHRVAAAFPEPGTRVSVYRGSITAAARYAAGIDSRVNLLGERGQKDRLDRRHHAVDAAIVALMRPEIAKALAERSSLRAAQFLTGEEQTWKQYTGRYPGDRDNFERWREGMRRLTELLNVALADDNIHVVENLRLRLGNGAAHDDTIRKLSHVRLGDGLTAAQIDRASSEAVWCALTRESDYDQTEGLPPNSARSIRVHGRTFDADDDVTIFAKGSGKPNDKPFAAIAVRGGYAEIGSTIHHARIYRIEGKKPAYAMLRVFSCDLQKHRREDLFAVPILPQSISMRCAPPKLRDAIHNHAAVYLGWIVVGDELEISVSRFTTGQIGSFLAEYPDTTRWRVHGFFNESRLRLRPSQMSSEGLADDAPDAVRKTLSIPGWLPAVNVLCSSHPAVIRRDALGRPRMTSASRLPVSWVVE

SEQ ID NO: 8062 - protein, 1086 aa, synthetic construct
  REGION 1..1086: note = Synthetic
MTAMRIRVGVDVGTNSVGCCALTVDEAGVPMRILSCLSLIHDSGIGEDGQKTASSRREVSGVARRARRLLRRRRKRLQQLDALLERRGYPIVDTSTQKDPYLVWRVRAQLAQEVLPNETRKHALSMVLRHIARHRGWRNPYANAQSLLSPSPESEFMRAMRQRVMEKTGEVLDENITPGQAMARTALSTMVPMRGPNGVLGKLHQTDNANEIRRICEQQGISAEECKELILAVFASESPRGSASKRVASDPLPGQGAHKRAPKCDPEFQRFRIISVVANLRIAESEKAARPLSPDERRRVVDFLLESTSEDLAWTDIAKLLGIRRQNLRGTATTTADGERASAQPPTDATNRIMSSCSIKTLRSWWKRADADRRSAMVRYLYEGAEDSECATFLGNLPEKEQGKLDSLHLPAGRAAYSPNSLARLNDQMLRTADDLHDARKHVFGVDDTWRPPAESIGAPVGNPSVDRTVKAVARFLNAVDDVWGTPDTIQIEHVRDGFMSERTAREIDRENNRRFKQNQDTVAEIQKIYGIQGDVHRSDVMRYTAVTQQDCACVYCGDTITYLSCQLDHIIPQAGIGSNNHRENLVAVCERCNRSKSNIPFAVWAEKCGIPGVSVEKAIARVRKWRNTQSGRAQAARLKKLQKDVIARLRRTDEDPAIDARSMESVSWMANELHHRVKAAYPSADVAVYRGSITAGARRAAGIDSRVNLLGERGRKDRLDRRHHAVDAAVIAMMTPGIAKTLGERSNLRWAERLSGGVETWKSFTGATPGARESFEAWRNRMLRLTELLNLALAEDQIHVTENLRLRLGSGKAHGEVQPLKLHQLGNGLTPAQIDRASSPALWCALTREPDFDIRKGLPASETRIIRVHGRRLTADDSASFFSKKSDDSKEKPFAAISVRGGFAEIGSTIHHARIYRINGRKPVYAMLRVFTQDLLPYRNSDLFSAPVPLQSISVRCAEPKLKTAISAGTATYLGWVVTGDELEVPMESFTTGTIGEFRKDFPTITRWRIRGFFSATRFRLRPSTLAPEGLSDANDSVKKILTIPGWLISINGICSVHPTVARRDSLGRIRSSSSVNLPVSWTIL

SEQ ID NO: 8063 - protein, 676 aa, synthetic construct
  REGION 1..676: note = Synthetic
MAAMRIRVGVDVGTHSVGCCAIAVDPAGAPVRILSALSLIHDAGIGEDGKEKATSRRELAGVARRARRLLRRRRKRLQQLDTLLVRLGYPIVDFAEQKDPYLVWRVRAQLVQEVFPEKTRRYAISMALRHIARHRGWRNPYARTESLLAPAPESDFMRAMRKRVMNTTGEVLDEGFTPGQAMAVVALNNRVAMRGPDGVLGKLHQTDNANEIRRICKTQGVSEQECRELILAVFASESPRGSSRSRVASDPLPGQGDFLRAPKCDPEFQRFRVISIVANLRIAGRDGAQRPLLPRERKKVVTFLLESMSEDLAWGDVAERLGVRRQNLRGTASMTADGERASAQPPVDVTNQVMGSCRIKPLRLWWADADAERRGAMVRYLYEGADDSECAEFLGSLSEEEQGKLDSIHLPAGRAAYSRESLALLSEQMLATDDDLHAARKHVFHVDDSWKPPAEPVGAPVGNPSVDRTVKAVARFLNGVADVWGTPEAIQIEHVRAGFSSERTARELDHDNNRRFRQNQTAVDDIKKAYGIQGEVRHSDVVRYTEGYSGIVRVCWWDSWDDPGRGRVQICHKGALGRDQPREEARNINDSLRALRPDPGLCGRFGQLGAVAGPGRGRHVPTGDHDGHSGERTGPTGRVAGLPGRRPAPRRALRTRKCSSNRHFRVQNAPLGKEAD

SEQ ID NO: 8064 - protein, 1121 aa, synthetic construct
  REGION 1..1121: note = Synthetic
MLHRLAGPTARSHIETGQFSYRNLMIPWVWYVFLMPAHHLRVGIDVGTHSVGLATLRVDDQGTPIELLSALSLIHDSGIGEDGKKTASTRKEISGVARRARRLLRRRRKRLQQLDKLLLDLGFPIPDLGGQTDPYLVWRVRAQLVEETLPEELRGPAISMAVRHIARHRGWRNPYSKVESLLSPAEDSPFMEALRERIMTGPGEILDDGITPGQAMAQVALSHRITMRGPEGILGKLHQSDNANEIRRICDRQGISSDVCKQLLRAVFKAESPRGSAVSRVAPDPLPGQGSFRRAPKCDPEFQRFRIISIVANLRISEANGKDRPLTADERRHVTTFLLEDPRDDLTWVDVAEKLGVPRQALRGTAKLTADGERSAAQPPLNITDQIMRKTKINALKTWWAEADAERQGAMVRYLYEGLEDSECAEVIAELPEEDQAKLDSLHLPAGRAAYSRESLTALSDHMLATTDDLHEARKQLFGVDDSWAPPAESVGAPVGNPSVDRTLKAVARYLAAVENVWGKPEIIQVEHVRDGFASERAARERDRANNRRYDVNQRAIKEIQQSYGVEGHVRPGDVMRYHAITLQDSACLYCGGTIGYHTSQLDHIVPQAGTGSNNHRENLVAVCERCNRSKSNTPFAVWAQTCGIPDVGVKEAIGRVRAWRNRPGGMSPGDLKRLKKEVIARLQRTQEDPEIDARSMESVAWMANELRHRIAAAYPDADVMVYRGAITAAARKAAGIDSQINLIGEKGRKDRLDRRHHAVDASVVALMERSAAKTLAERSSLRWAQRLTGQEETWKQYTGSTVGAREHFEMWRGHMLRLTELFNERLAADEVHVVENLRLRLGSGNAHDDTIRKYDTPRLGDGLSVNQIDRASSPALWCALTREVDFDAENGLPAREDRLIRVHGLELTSNDRIELFSKKRGNDAKEKPFGAIAVRGGYAEIGSTIHHARVYRIEGKKPIYAMLRVFTHDLLSQRHGDLFSAVVPPQSISMRCAEPKLRQAIATGNATYLGWVVVGDELEINVDSFTSGQIANFLKEYPGTTRWRIRGFYNDHVLRLRPALLSAEGLIDASEAVSKTLSIPGWLPAINQVAATHPRVIRRDALGRVRKSSRSGLPASWIIR

SEQ ID NO: 8065 - protein, 788 aa, synthetic construct
  REGION 1..788: note = Synthetic
MPTRRIRVGIDVGTHSVGLATLRVDDQGTPIELLSALSLIHDSGIGEDGKKTASTRKEISGVARRARRLLRRRRKRLQQLDRVLLDLGFPIPEPGEFLDLGGQTDPYLVWKVRARLVEETLPEELRGSAISMAVRHIARHRGWRNPYSKVESLLSPAEDSPFMEALRERIMTGTGVLLDDDITPGQAMAQVALTQRITMRGPDGILGKLHQSDNANEIRKICARQGISPDVCKQLLLAVFKAESPRGSAVSRVAPDPLPGRGAFRRAPKCDPEFQRFRIISIVANLRISETGGKDRPLTADERRRVVTFLLEEPRDDLSWVDVAEKLGISRQTLRGTAALTVDGERAAAQPPVDVTDQIMRKTKIRSLRTWWKQADAERRGAMTRYLYEGLEDSECAEVIADLPEEDQAKLDSLHLPAGRAAYSQESLAALSDHMLATTDDLHEARKQVFDVDDSWSPPAEPVGAPVGNPSVDRTLKVVARYLAAVENVWGAPEAIQVEHVRDGFASERAARERDRANNHRYQVNQRAVKEIQQSFGVEGHVRSGDVMRYHAISLQDCVCLYCGDTISYRTSQLDHIVPQAGTGSNNHRENLVAVCERCNRSKSNTPFAVWAETCGIHGVGVEEAIDRVRAWRNRPVGMSPRDLGRLKKEVISRLRRTQEDPEIDARSMESVAWMANELRHRIAAAYPDTDVMVYRGTVTAAARKAAGIDSRINLIGEKGHKDRIDRRHHAVDASVVALMERGVAKTLAERSNLRWAQRLTGQEETWKQYTGLTVAGGRQSRVRCLAG

SEQ ID NO: 8066 - protein, 818 aa, synthetic construct
  REGION 1..818: note = Synthetic
MRIRVGIDVGTNSVGCCALVVDEAGAPTNILSCLSLIHDSGIGEDGQKTASSRREQSGVARRARRLLRQRRKRLRQLDALLEKRGYPIVDPSAQKDPYLVWRVRAKLAQETLPEESRRYALSMALRHIARHRGWRNPYANVQSLLLPAPESEFIKAMRQRIMEKTGEILDESITPGQAMAETALTTSIPMRGPNGVLGKLHQTDNANEIRRICEKQGISAEECKELLLAVFASKSPRGSSLGRVASDPLPGQGGLKRAPKCDPEFQRFRIISIVANLRVTEQNKGSRPLSPDERERVVNFLLESTSEDLAWADIAELLGIRRQDLRGTATTTADGERASAQPPTDVTNRIMSGCSVKALRTWWKKADADRRSAMIGYLYESAEDSECADFLGSLTEKEQGKLDSLHLPAGRAAYSHDSLARLSERMLQTDDDLHAARMHVFGVDDAWRPPVEAIGAPVGNPSVDRTVKAVARFLKAVDNVWGYPESIQIEHVRDGFASERTARELDRENNRRFKQNQDTVTEIQKVYGVQGEVHRSDVMRYTTVTQQDCTCVYCGSTITYLTCQLDHIIPQAGIGSNNHRENLVAVCEPCNRSKSNLSFAVWAEKCDAPGVSVEEAVARVRKWRNIQPGRAQATRLKKLQKDVIARLRRTDEDPAIDTRSMESVAWMANELHQRVKSAYPSAKVAVYRGSITAGARRAAGIDSRVNLLGERGRKDRLDRRHHAVDAAVIAMMSPGIAKTLAERSNLRWSEWLSGKVETWKSFTGATPGARENFGPGVSICFDLLSCLISRSQRTGFMLPRTCGCDSGVGTPTTRPCVL

SEQ ID NO: 8067 - protein, 1279 aa, synthetic construct
  REGION 1..1279: note = Synthetic
LAFDIGISSIGWAFSENDELKDCGVRIFTKAENPKTGESLALPRRLARSARKRLVRRKARLNHLKHLIANEFKLNYEDYQSFDESLAKAYKGSLISPYELRFRALNELLSKQDFARVILHIAKRRGYDNIKNSDNEEKSEILKAIKQNEEKLVNYQSVGEYLYKEYFQKFKENSKEFINVRNKKESYERCIAQSFLKDELKLIFQKQREFGLSFSKKFEEEVLSVAFYKRALKDFSHLVGNCSFFTDEKRAPKNSPLAFMFVALTRIINLLNNLKNTEGILYTKDDLNALLNEVLKNGTLTYKQTKKLLGLSDDYEFKGEKGTYFIEFKKYKEFIKALGDHSLSQDDLNEIAKDITLIKDEIKLKKALAKYDLNQNQIDSLSKLEFKDHLNISFKALKLITPLMLEGKKYDEACNELNLKVAINEDKKDFLPAFNETYYKDEVTNPVVLRAIKEYRKVLNALLKKYGKVHKINIELAREVGKNHSQRAKIEKEQNENYKAKKDAELECEKLGLKINNKNILKLRLFKEQKEFCAYSGEKIKLSDLQDEKMLEIDHIYPYSRSFDDSYMNKVLVFTKQNQEKLNKTPFEAFGNDSTKWQKIEVLAKNLPTKKQKRILDKNYKDKEQKDFKDRNLNDTRYIARLVLNYTKDYLDFLPLSDDENTKLNDIQKGSKVHVEAKSGMLTSALRHTWGFSTKDRNNHLHHAIDAVIIAYANNSIVKAFSDFKKEQESNSAELYAKKISELDYKNKRKFFEPFSGFRQKVLDKIDEIFVSKPERKKPSGALHEETFRKEEEFYQSYGGKEGVLKALELGKIRKVNGKIVKNGDMFRVDIFKHKKTNKFYAVPIYTMDFALKVLPNKAVVQGKDKKSGLIKDWILMDENYEFCFSLYKDSLILIQTKDMQEPELVYFNAFTSSTVSLIVSKHDNKFETLSKNQKILFKNANEKEVIAKSIGIQNLKVFEKYIVSALGEVTKAEFRQREDFKKMSYDEAFKTLLISSNAKLNLELNHLVIKQDENIAKLFLKDINIIILESLQASLSSALFNAFAKHKIILLTCDETHSINGVFTPFLGHFQSAKIAKEQINVSAQKKAILWQKIIKNKILNQAFVLKKHNKIEQSNELINLAKKVSLNDSKNIEAVAAALYFKTLFGVSFSRDELCFENSALNYGYAIIRACIIRAVCISGLLPWLGIKHDNIYNSFALCDDLIEVFRASVDDCVLKLKGESEFLSKDDKRALIGNLQSKINFDGQNYPLNRAINHYVANFKNALLYEDELKIVKFDD

SEQ ID NO: 8068 - protein, 1116 aa, synthetic construct
  REGION 1..1116: note = Synthetic
MSQNQNPNTQSHLNPTTQSSTQSNPQPTTQESLKILGFDIGVASIGWAFVEGGELKDCGVRIFTKAENPKDGSSLALPRREARGVRRRLARRKGRLNALKVLICKEFGLNRSDYLATAGELPKAYATSKETKSPYQLRAESLERKLSADEFARVILHIAKHRGYGNKHAKESSDDDSGKVKKAISENQKVMSEKGYTTAGQYLYGEFYQKARNFSEAEPKSPKNARGTQEFKNVRNKSENYARCLAQSELQKELEIIFAKQREFGFQFSDKKHKTINANGKLKELDFADAVLEIAFLQRPLKSFADKVGKCTFYEDKPRAPKDSLSAIEFVALTRIINTLANITKRSGEVYSADKVREILSIVLDKGEITYKNLRKVIALDERLQFPKDSKLDYAKEDAEKAKAIEFSKLKAFRKALGGSFEGFIRAELDSIATDIALIKSKDELKAKLANYQSLNDEQREKLSELSFDKFIDLSFKALEAILPLMRGDKDDKIYRYDEAWREAGLVEVAKKTQKGDSLPPLIEYEKDLANPVVARALAEYRKVLNALLKKHGKVHKIHLEFTRQAGVSSKERGEIIAEQNKRLKANEEARKRCEEYGLIPSGKNILKLKLWQEQGEFCVYSGKKITQSDLRDESTLQIDHIYPYSRSYDDSQNNKVLVFTDANQNKLNQTPYEAFGKDISKWNQILGRIEKLPKAKKNRITNKNFANKEAGFIARNIVDTSYIARLSASYTDAFIEFCPLAENEDTTLGRGEKGSKKHISVVNGSLTATMRHYWGLNTLLDGENSESKDRSNHLHHALDAIIIAYVNDSVIKAFSDFKKTQEQNKARLIAKEIESAEYKISRRFFSPSGFENNEAFRQAIKRKILGQSLESRENDMTINSEALGEKVGGIFVSKPPRKRARGALHKETFSSIDDKDLLKTYGGKEGVNRAIKLGKVRQIGSKIADNGTMVRVDIFRHKVSGKFYGVPIYTMDFALGILPNKAVVGGKDKSGVIKDWLPMDSNYEFCFSLFKDDLILVQKKEMSKAELCYFAGFDTSGGQIKVEKHDNHFATLTDNQRLLFNIATPKEVAGKSIGIQNLKVFEKWQVSPLGEVSKAEFKEREPIALKSTPKRFLQG

SEQ ID NO: 8069 - protein, 1110 aa, synthetic construct
  REGION 1..1110: note = Synthetic
MRILGFDIGITSIGWAYVEGEELKDCGVRIFTKAENPQNGDSLAAPRREARGVRRRLARRKVRLNVIKRLLCKEFGLNLSDYFANDGELPKAYETTKDTKSPYELRSLALEQKLEPKELARVILHIAKHRGYGNKHAKRDLEAEEKAKKAAEKAPQEKESTTTNGDSKKEQEKVLKALYQNETLLKKYQTNYQTNNKTNDETNNKTIFLVGKYLYKEFQDKGQRIRNTTNNYQHTMRQEWLKDELEFIFKKQKDFGATFSENFESQILETAFYQRDLKSFEDKVGKCVFYENENRAPKDSLSAMEFVALTRIINTLKNLEKKSKNLGIGETYGKDKIQEILKIVLDKGEMSYKELRKILKLNESILFAKDSKLDYTKGMQEAEKAKFIELKNLKAFKKAMGGDFSKFPREELDKIATDIVLIKSKENLAKKLQNYSALSKEQVEALSNLNFAKHIDLSLKALDKILPFMREGLSYDEVVKKVGLQEHRKYKQKGEFLIPLKEYEPYLANPVVARALSEYRKVLNALLRKYGNVHKIHLEFTREAGKNYDERKKIEKEQREHFEANQKAIKQREILGLPINGANILKMKLWIEQGECCVYSGEKITSKHFFDSNALQVDHIYPYSRSFDDSYMNKVLVFAKENQNKLNKTPFEAFGSDKEKWDRILSLSAKLPKQKQRRISNKDFKDKELGFIARNINDTGYIARLASQWTNNCLKFEDLRENEVTIAGEKGSKNHLEVISGQLTSMLRHYWGLGDKDRNNHLHHAVDAVIIAYTNAKTIKAFADFKKNQEQNRAKFYAKQISEQEYKRQRNPFEPCANFRQRVEEKINKIFVSKPPRKRARGALHKETFGSICLDGNNNWVARFKIKSKKEQEDITKEKATKAKYKDEFKGEENIRKALKLGKIRRINNTQKDIAIGDKIVKNETMVRVDIFKDKKGKFYAVPIYTMDFALGILPNKAVATGEDEDGVIKDWIEMDKTKYEFCFSLFKDDLIKVRKKKMKEAELCYFVGFDTDGSRIIVAKHNNDYQTMTENECKLFTLKEKKKKQKTLNDEEDNQERIETEYKIIGGRTGIQNLETFEKHQVSPLGEVQKAEFEDRQEIKLKSSPKGKD

SEQ ID NO: 8070 - protein, 1082 aa, synthetic construct
  REGION 1..1082: note = Synthetic
VKILSFDIGVTSIGWAYVEGEKLKDCGVRIFTKAENPENGDSLAAPRREARGVRRRLARRKVRLNVIKRLLCKEFGLNLSDYFANDGELPKAYETTKDTKSPYELRSLALEQKLEPKDLARVILHIAKHRGYGNKHAKRDLEAEEKAKKAAEKVPQEKESTTTNGDSKKEQEKVLKALYQNETLLKNYQINYQTNDETNNKTIFLVGKYLYKEFQDKGQRIRNTTNNYQHTMRQEWLKDELEFIFAKQREFGFPFSEKLYKVATENNKTKELDFASAIMETAFYQRDLKSFEDKVGKCVFYENENRAPKDSLSVMEFVALTRIINTLKNLEEKSKNLGIGETYGKDKIQEILKIVLDKGEMSYKELRKILKLNESILFAKDPKLDYTKGVQEAEKAKFIELKNLKAFKKAMGGETEQKANKKTKKTIEVSLESFDRKELDLIATHIALIKSKENLAERLRNYPALSKEQVEALSNLNFAKHIDLSLKALDKILPLMREGLRYDEAVKKAGLQEHRKHKQKGEFLIPLKEYEPYLANPVVARALSEYRKVLNALLKKYGKVHKIHLEFTREAKLSAKERQKYEKEQREHFEANQNAIKQCEKLDLRLNGANILKMKLWIEQGEYCAYSVKKITTEDLKDSNKLQIDHIYPYSRSFDDSYMNKVLVFSKENQNKLNKTPFEAFGSDKEKWDRILSLSAKLPKQKQRRISNTNFKDKEGGFLARNIVDTGYIARLASQWTNHCLKFEDLRENEVTITGEKGSSVHIEVVSGSLTATLRHYWGLGDKDRNNHLHHAVDAIILAYVNDTMIQAFANFRKNQEQNKAKFYAKQIAESEYKAKKAFFEPCENFRDKVLKKLDSIFVSKPPRKRARGALHKETFYSFEDEKLLKSYGGKQGVQRAIDLGKIRRIGTKIVSNGAMVRVDIFKHKEGKFYAVPIYTMDFAFGEWPNKAVATGKDEDGVIKDWIEMDSDYDFCFSLFKDDLIKVKKKKMKEAEFCYFKRFKTSGASIEIVKHDNRADNLNGNQEKIFKVKLENNQKILDKSLISIQNLEIFEKWQVSPLGKVQKAVPESRQGIKLKSSLKRKG

SEQ ID NO: 8071 - protein, 1076 aa, synthetic construct
  REGION 1..1076: note = Synthetic
MKVLGFDIGVASIGWALVEDSVLKDCGVRIFTKAENPKNGSSLALPRREARSVRRRLARRKARLNELKRLVAAEFGLNLEDFLANAGELPRAYGTSSETKSPYELRFEALNRKLEPLEFARVILHIAKHRGYGNKHAKDSNDDDSGQVKKAISQNADIMSQKGYKSVGEYLYKEFYQQKRDLSEKSPKNAFATQEFQNVRNKKDNYARCVAQSELKRELELIFETQKRLGWKFSEQKYQIFDENRKIKEADFERAVMEVAFLQRPLKSFADKVGKCTFFENEPRAPKDSLSAMEFVALTRIINTLANISKKTGEIYSTDKVGKVLEAVLEKGELTYKNLRKIISLDDKIQFPKDSKLDYAKGDEAEKAKFIEFKNLKEFKKKLGGSFEGFSRDELDKIANKIALIKSKDELKAELASFKGLNEAQKEALSELSFDKFIDLSFKALGKILPFMRGENGECKRYDEAWRAAGLQEAAKQTQKGDILPPLKDYEKDLANPVVARALSEYRKVLNALLEKHGKVHKIHLEFTREAGVSSKERGELIAEQNKRFKANEEARKRCAEFGLNPSGKNILKLKLWQEQNEFCVYSGEKITREHLRDESALEIDHIYPYSRSFDDSQNNKVLVFKSANQNKRNQTPFEAFGGDSEKWSRIMSSIAKLPKPKRNRIANKNFADKESGFIARNIVDTSYIATLTASYTDAFIEFLPLAESEDTTLGRGEKGSKKHISVVSGSLTATIRHYWGLDSLLNGESEVKDRSNHLHHALDAIIIAYTNDKIIKAFSDFKKTQEQNTARLIAKEISSAEYKTSRRFFAPENFANNEAFRQSIKGKIFGELGENGELSGGIFVSKPPRKRARGALHAATFKSLNNSELLKTYGGEEGVKRAINLGKIRQIGSKVAENGTGAMVRTDIFRHKSSGKFYGVPIYTMDYALGKLPNKAVVSGKDKAGVIKEWLEMDEKYEFCFSLFKDDLLLVQKKEMSKAELCYFAGFDSSGGRIQIEKHDNLFINLNPDEAVLFNEVEKQQGRIGIQNLEIFEKWQVSPLGEVKKAEFKKRENISLKSTPKIAKHSMPNSNLETQ

SEQ ID NO: 8072 - protein, 1068 aa, synthetic construct
  REGION 1..1068: note = Synthetic
MRGKMKILSFDIGITSIGWAYVEGEELKDCGVRIFTKAENPKNGKSLALPRREARGARRRLARRKTRLNVVKRLLCKEFGLNVSNYFANDGELPKAYETTKETKSPYELRSLALEQKLEPKELARAILHIAKHRGYGNKHAKRDLEAEEKAKKAAEKAPQEKESTTTNGDSKKEQEKVLKALYQNETLLKNYQTNYQTNNKTNDETNNKTIFLVGKYLYEEFQDKGQRIRNTTNNYQHTMRQEWLKDELEFIFKKQKDFGATFSENFESQILETAFYQRDLKSFEDKVGKCVFYENENRAPKDSLSAMEFVALTRIINTLKNLEKKSKNLGIGETYGKDKIQEILKNVFDKGEMSYKELRKILKLNESILFAKDPKLDYTKGVQEAEKANTAKFIELKNLKVFKKAMGKDFDKFSREELDKIATNIALIKSKENLAKQLKDYPSLTDKQKDDLSNLSFAKHIDLSFKALYEILPLMRGEKTDECLRYDEAWKKAGLQEYRKHKQKSEFLIPLKEYEPYLANPVVARALSEYRKVLNTLLRKYGNVHKIHLEFTREAGKSYDERKKIEKEQKEHFEANQRAIQQCEILGLPINGTNILKMKLWIEQREHCAYSNKKITREHLLDSNALQVDHIYPYSRSFDDSYMNKVLVFAKENQGKGNKTPFEAFGNDKEKWDRILSLSANLPKQKQRRISNKDFKDKELGFIARNINDTGYIARLASQWTKDCLKFENLSENEVSIAGEKGSKNHIEVISGKLTSTLRHYWGLGDKDRNNHLHHAVDAVIIAYTNAKTIKAFADFKKNQEQNKAKFYAKQISESEYKTQRAFFEPCANFRQKVLEKLDSIFVSKPPRKRARGALHEETFYSLEDKNLLKTYGGRKGVQKAIALGKIRQVGTKIVSNGTMVRVDIFKDKTGKFYGVPIYTMDFALGILPNKAVTTGKDKEGVIKDWIEMDSNYEFCFSLFKDDLILLQKKEMEKAELCYYKRFKTSGASIEIIKHDNRADNITENQIKIFKLKFDNDKKILDESLIAIQNLKTFEKYQVSPLGEVQKAEFEPRQTISLKSSPKNRKK

SEQ ID NO: 8073 - protein, 1057 aa, synthetic construct
  REGION 1..1057: note = Synthetic
MSDKSKILGFDIGITSIGWAYVEGEELIDCGVRIFTKAENPKTKESLALPRREARGVRRRLARRKGRLNAIKQLICKEFGLNYQDYIAQDGELPKAYAGKLINPYELRSKALREKLEKEELARVILHIAKHRGYGNKHAKETDDAESGKIKKAISNNEKILNEKGYQSAGEYLYQEFFQKERLQEEKKGNNTTKEFKNVRNKAGDYEHCIAQTQMQNELRLIFEKQREFGLNFSEEFKKKVLETAFFQRPLKDFSDKIGDCTFIEGAKRAPKDSLSAIEFVALGRIINTLKNLQNTSGEVYSRDKINEILQIVLDKGEISYKKLREILDIESSVRFKDSKLDYTKELKEAEKTKLFESKNLQKFKKALGSFEGISREILDSIAKEIMITKDKEKLAKELKKFPLDETQIQNLSNLSFSQTINLSLEALSQILPFMRGEREDKCLRYDEAVEKAGLKEVAKNKSKDDFLPPLENYEPYLANPVVARALSEYRKVLNALLRKYGKMHKIHIEFTREVGKSKEERNKIEKEQKENFAKNQEAQKQCEILGLPINGANILKMKLWREQQESCVYSGKEIAIDDLKNPAILQVDHIYPYSRSFDDSYNNKVLVFSKENQNKLNKTPFEAFGENKDKWEKILSLASKLPKPKRQRIYNMQFKDKEQGFLTRNINDTGYIARLVSQWTKNCLSFEKLSEDEVSIAGEKGSKVHVEVISGSLTAMLRHYWGLGDKNRDNHLHHAVDAIIIAYSNEKVIKAFSDYKKHREQNKAKFYAKEIAESEYKKQKVFFEPTNHFRQKVLEKIDSIFVSKPPRKRARGALHEETFYSFERLCNDKEYAKKEKMDYGGKAGIQKAIALGKIRQVGTKIVSNGTMVRVDIFQHKSNGKFYGVPIYTMDFALGVLPNKAVVSGKDKQGVIKDWLEMDSNYEFCFSLFKDDLILVQKKEMEKAELCYYTDFNSNTAGIKFEKHNNLYVNLNENERKLFTSKEVVKGGKKNVWKDKTPKEIEQLEKNRKIIGGFVTIEDLKTFEKYQVSPLGEVQKADFAPRQAITLKSSPKHRINK

SEQ ID NO: 8074 - protein, 1050 aa, synthetic construct
  REGION 1..1050: note = Synthetic
MKILGFDIGIASIGWAFVENGELKDCGVRIFTKAENPKTGDSLAMPRREARSVRRRLARRKGRLETLKRLLAKEWDLCYEDYIAADGELPKAFMGKNLTNPYVLRYEALQRLLGKEELVRVVLHIAKHRGYGNKNAKITKSEESKREQGKILSALATNASAIARYRTVGEYFYKEFYEVIKKPQGLNTNEHCTQPKVRVLKPIRNKGGEYTNCILQEDLQRELRCIFEHQKGFGFPITQEFQDKILKIAFYQRSLKDFSHLVGKCTFYPDEFRAPKCSLSAVEFITLSKTINVLTYISKESGEVYSKGQYEQMLDSVFKAVCEKGSLSFAQLRKILHIDERIRFKEVDYMARKSKNTSGDSTHKQKTSNSETKKFIEHKNLKKFCEILSEIAGDRALADSIARDMTLVKDEEKLAQKLRGYGKFSQEQIMQLSALDFSHHINLSLKALSEILPFMREGMRYDEACKLAGLKARHNDKKSKFLPPFCESIYADELTNPVVHRAIAEYRKILNALIAKYGSVHKIHIELTRDVGKNFQEREKYKKEIESNYKARVQAMQECEKLGLTLSEGNILKLRLFMEQNGICVYSGRKITLANLKEQGALEIDHILPYSRSSDDSYMNKVLVFTNENQNKGNKTPYEAFGGDSQKWGEIESLALRSGYPKKKAKRILDKGFGDREAGFKSRNIVDSGYIARLIANYTKEYLKFLPLDSHENTALIAGEKDSKIHVEAVKGMLTATMRHFWGLGSKNRYEHTHHAIDAIIIAYINAAMIQRFSQFRQNQESLKARFYAKELAKEEFKTQRAFFEPFSGFREQVLAKVGQIFVSRPPRKRARGALHEETFYSIDDKKLSETYGGKEGVQRALSLGKIRQIGTKIVANGPMVRVDIFKHKKNGRFYAVPIYTMDFALGILPNKAVVSGKDTKSKVIKDWLEMDSCYEFCFSLFKDDLIEVQKKDMEKPELAYFVSLDASDGRIKVRHHCNDITKINENQKKLFSETIEKEVVGRGSIQNLKVFKKYKVSPLGEIKEAKYEPRQPIALKTSPKKHRKQNNAQ

SEQ ID NO: 8075 - protein, 1049 aa, synthetic construct
  REGION 1..1049: note = Synthetic
MKILGFDIGITSIGWAFVENGELRDCGVRIFTKAENPKTGDSLAMPRREARSVRRRLARRKGRLETLKRLLAKEWDLCYEDYIAADGELPKAFMGKNLNNPYVLRYEALQRILSKEEFARVVLHIAKHRGYGNKNTKMTKSEESKREQGKILSALATNASAIAHYRTVGEYFYKEFCEVIKNPQGLNTNEHCIQSKVRVLKPIRNKGGEYTNCILQEDLQRELRCIFEYQKGFGFPITQEFQDKILKIAFYQRPLKDFSHLVGKCTFYPDEFRAPKCSLSAVEFITLSKTINVLTYISKESGEVYSKGQYEQMLDSVFNAVCEKGSLSFVQLRKILHIDERIRFKEVDYMARKSKNTSGDSTHKQKTSNPETKKFIEHKNLKKFCEILSEIAGDRALADSIARDITLIKDEEKLAQKLRGYGKFSQEQITQLSALDFSHHINLSLKALSEILPFMREGMRYDEACKLAGLKARHNDKKSKFLPPFCESIYADELTNPVVHRAIAEYRKILNALIAKYGSVHKIHIELTRDVGKNFQEREKYKKEIESNYKARVQAMQECEKLGLTLSEGNILKLRLFREQNEICVYSGRKITLANLKEQGALEIDHILPYSRSSDDSYMNKVLVFTNENQNKGNKTPYEAFGGDSQKWGEIESLALRSGYPKKKAKRILDKGFGDREAGFKSRNIVDSGYIARLIANYTKEYLKFLPLDSHENTALIAGEKDSKIHVEAVKGMLTATMRHFWGLGSKNRYEHTHHAIDAIIIAYINAAMIQRFSQFRQNQESLKARFYAKELAKEEFKTQRAFFEPFSGFREQVLAKVGQIFVSRPPRKRARGALHEETFYSIDDKKLSETYGGKKGVQRALSLGKIRQIGTKIMANGPMVRVDIFKHKQSGRFYAVPIYTMDFALGILPNKAVVSGKDNDRIIKDWLEMDSCYEFCFSLFKDDLIEVQKRDMEKPELAYFVSLDASDGRIKVRHHCNDITKINENQKNLFSEAIEKEVVGRGSIQNLKVFKKYKVSPLGEIKEAKYEPRQPIALKTSPKKHRKQNNAQ

SEQ ID NO: 8076 - protein, 1046 aa, synthetic construct
  REGION 1..1046: note = Synthetic
MKIYSFDIGVASIGWAFIENEVLQDCGIRIFTKAENPKNGASLALPRREARGVRKRLARRRGRLNTIKQLLCKEFGLQLEDYLSNDGELPKAYTASKANPLKSPYELRTLALSQKLDSKDLVRVILHIAKHRGYGNKHAKDSKDTESGKVKKAIEFNRKTLAEKGYRSVGEYLYREFFQQSRISQNNGATEFVNVRNKTGNYEHCVAQDMLKDELELIFRKQKELGLHLSDGFEKQLLDKIFEQRPLKSFADKVGKCQFIAGAKRAPKDSISAIEFVALSRIINTLANLSKKSGEMYDKAMVLTILDSVLEKGEMSYYALREAINLDEKIRFADSRLDYSKEIKETEKVKFVECKNLKSFKKVLGNCYKTLERKHIDSIAERIAVIKDVEKLHKELESYCATEQLSLTSEQIQALSHLNFSSHISLSLKALEQILPFMRGEREARSSDADYCIGIDESGESQCLRYDESVEKAGLKALSKDTLKGQILPPLNEFEPYLANPVVARALAEYRKVLNALLKQYGSPHKIHIEYAREAKLNTTERQKYEKEQKDNYAANQAAHKKCQELGLEPSSTNLLKLKLWQEQGGLCLYSGAKITISYLQDPTALQVDHIYPYSRSFDDSYMNKCLVLTKANQEKGNRTPFEAFGTDSAKWGVITTLAQKLPHKKRRRILNTAFNDKEAGFKLRNLNDTSYIARLVADYTETYLEFLSLVESENTTLGKGQKGSKKHIAIVNGALTSTMRYYLGFASKDRDNHLHHALDAVIIGFMNDSVIKAFSDFKKTQETSKAAYYAHTLSKQEYKKQRAFIQLPSGENFRANVLEKAESVFVSKPPRKRVRGALHEESFYSQNDTKLLKSYGGAEGIEKALQLGKIRQIGTKIVSNGAMVRVDIFKHRKSGKFYGVPVYTMDFALGILPNKAVVQGKDKNDVIKDWLEMDSSYEFIFSLYKDDLLLVQKKEMAEPELCYFVSFDTSGASIKVAKHDNNFSTLTENQKLLFSNATKEEVVGKSIGIQNLKVFEKWQVSVLGEVKRTQSYPRENISLASKAKK

SEQ ID NO: 8077 - protein, 1038 aa, synthetic construct
  REGION 1..1038: note = Synthetic
MKKLAFDIGIASIGWAFVEDDELRDCGVRIFTKAENPKNGKSLALPRREARAVRRRLARRKTRLNSLKRLLCKELGFNLNDYLSNDGVLPKAYETNKDTKSPYELRTLALSQKLDSKDFARVVLHIAKHRGYGNKHAKIGSDKDSGKVLSAIKANKQAMEDKEYKSVGEYLYNEFYQKQRLESEKKVSNHASEFKNVRNKGKSYEHCVAQEQLKAELELIFKRQREFGVSLSKEFEDKVIDIAFFQLPLKDFSDKVGECVFCEGQKRAPKDSLSAMEFVALTRIINTLRNLEKRISNKTYSKEKVQEILQIVLDKGEISYKKLREILSLPDYVRFSDSKLDYTKELKEVEKAKFIELKNLKAFKKALGRSFDEFSRDSLDKIAEAIALNKSRENLKKELEKNFAQILRQEQKEALSDLSFAKHIDLSLKALNEILPFMRGESSNECLRYDEAVERAGLKEIAKNKEQGNFLLALKEYEPYLANPVVARALSEYRKVLNALLRKYGQVHKIHLEFTREVNLSHEERKKVEKEQQANFTKNQEAEKLCKEIGLHISKDSILKAKLFIEQGEFCAYSCYKITSDHLKDPNMLQIDHIYPYSRSFDDSYMNKVLVFNKENQNKGNRTPFEAFGSDKDKWEKILSLADRLPKAKRKRIYNKDFKDKEAGFILRNIVDTGYIARLASQWTKHCLKFLPLSENEVTIAGEKGSKVHVEIISGKLTSMLRHYWGLGNKDRSNHLHHAVDAIIIAYASAKTIKAFADFRANQDKNTAEFYAEQISELEYVEKRAFFNPCKNFRKKVLEKLNSIFVSKPPRKRARGALHEETFYSFDDKNLLKSYGGEKGIQKAIELGKIRQIGTKIVSNGTMVRVDIFKDKKGKFYGVPIYTMDFALGILPNKAVVGGKDKEGVIKDWKEMDSNYEFCFSIFKDDLILVQKNEMEEAELCYYKRFKTSGASIEVVKHDNRVDNITENQEKIFKLKFDNGKKILDESLIAIQNLKIFEKYQVSPLGEVQKAEFIPRQSISLKSTPNKNKLNKVNEVKS

SEQ ID NO: 8078 - protein, 1036 aa, synthetic construct
  REGION 1..1036: note = Synthetic
MRIFGFDIGITSIGWAYVESNELKDCGVRIFTKAENPKNGKSLALPRREARGARRRLARRKARLNAIKRLLCKEFGLNVSDYFANDGELPKAYETTKDTKSPYELRSLALEQKLEPKELARVILHIAKHRGYGNKHAKTGSDKDSGKVLSAIKVNETAMKDKYQSVGEYLYKEFYQKLRLESEKKGNNITKEFKNVRNKGENYEHCVAQEQVRAELELIFAKQKDFGATFSENFESQIIETAFYQRDLKSFEDKVGKCVFYENENRAPKDSLSAMEFVALTRIINTLKNLEEKSKNLGIGEVYGKDKIQEILKIVLDKGEMSYKKLREILHLDEHILFAKDSKLDYTQGVQEAEKAKFIELKNLKAFKKAMGGDFSNFAREELDKIATDITLVKSKENLAKKLQNYSALSKEQVEALSNLSFAKHIDLSLKALEQILPFMRGDKTGKCLRYDEAVKKAELQEHRKHKQKGEFLIPLKDYEPYLANPVVARALSEYRKVLNALLRKYGKVHKIHLEFTREAKLSAKERQKYEKEQKEHFEANQRAIQQCEILGLPINGTNILKMKLWLEQGECCAYSGEKITREHLLDSNALQVDHIYPYSRSFDDSYMNKVLVFAKENQDKGNKTPFEAFGGDKEKWDRILSLSAKLPKQKQRRISNTNFKDKEGGFLARNLNDTGYIAKLASQWTKDCLEFEDLRENEVTIAGEKGSSVHIEVVSGQLTSMLRHYWGLGNKDRNNHLHHAVDAVILAYTNNAMIKAFANFRKNQEENKKKFYAKQIAESEYKAKKAFFEPCKNFRQRVEEKIKEIFVSKPPRKRVRGALHQETFYPFEKLCNDKEYSEKLKMDYGGEKGMQKAIALGKIRQIGTKIVSNGAMVRVDIFKDKKGKFYAVPIYTMDFALGILPNKAVAIGKDKDGVIKDWIEMDSNYDFCFSLFKDDLILVQKKEMERAELCYFVSFGSTNAQINVEKHNNKFEGLSENEKILYSNATQKEVAGKSIGIQNLKTFEKYQVSPLGEVQKAEFEPHQEIKLKSSPKRKD

SEQ ID NO: 8079 - protein, 1032 aa, synthetic construct
  REGION 1..1032: note = Synthetic
MKILGFDIGISSIGWAFVENEELRDCGVRIFTKAENPENGESLALPRREARGVRRRLARRKARLNGVKKLLCQEFGLKLNDYFSNDGELPKAYQMSKNTKSVYELRTLALSCKLEFKDLARVFLHIAKHRGYGNKHAKISQDSKDIGQIKKALKHNEEELKNYRSVGEYLYKNFYQKVRNFEEIKTKNKNNQSTFEFKNVRNKSGNYKQCVSQEWLKNELKLIFEKQRSFGVKLSKDFENELLDKIFFQRELKDFSDKIGFCIYFEGKKRASKESLSAKEFIALTRMINTFKNLEQQNRKNQSGEIYSQEIIKEILNIILDKGMMKYKELRTLLKLDKSIQFKDSKLSYEKGIEKAEETKFIDFKELRNFKKALGGSFEGLERKHIDEIAHKITLIKSKEKLKIALENYIKEHKLEQRLNECLGNLSELDFSGHIDLSLEALEQILPFMREGFRYDEAVKKAGLREIRKDYLKKDFLPPLKDFENLANPVVVRALAEYRKVLNALLKKYGKMHKIHIELTREIGLNHKERQNYIEEQKNNFNFNEEARKKCEEIGLDAEKYLLKMKLFLEQDEFCIYSGEKIKIEHLRDAKMLEIDHIYPYSRSFDDSYLNKVLVFSKENQNKGNKTPFEAFGNDKEKWDKIKGLTQGLKKLPSKKKKRILNLYFNDKEAGFISRNLNDTAYIARFSANYTKYFLDFLPLSENEVSISGEKGSKVHVEAISGRLTAMLRHYWGLGQKDRNNHLHHAVDAVIVAYTNAKIIKNFADFKKFREQNKAKIYAKEFAQTTDKKIFKPCENFRNKILMKIDEIFVSKPPRKRARGALHKESFMSFDDKKLLKSYGGREGVKKALSLGKIRKIGTKIVENKNMVRVDIFKDKKGKFYGVPIYTMDFALGILPNKAVVSGEDKKTREIKDWKEMDEKYEFCFSLFKDDLIKIQKKDMKEPKFCYYKNFDVSNASICIAKHDNKFENRDEDEKILYSKATYKKVEARGIGIQNLKILEKWQVSPLGEKREFEFEPRKNISLKTTNRKNVF

SEQ ID NO: 8080 - protein, 1031 aa, synthetic construct
  REGION 1..1031: note = Synthetic
MKIVGIDIGITSIGWAFVENGELKDCGVRIFTGAENPKNGESLALPRRQARSVRRRLARRRGRLESLKKLLTNAWHLSYEDYIATDGELPKAFCGKRFLNPYQLRYEALERLLSKEELMRVILHIAKHRGYGNKNIKQDQDKKDKEEGKILSALSENAKKISHYRTAGEYFYKEFCAVQDVRNAQDKTPMIRVLKPIRNKALSYANCVSQVALQNELSLIFEIQRGFGFAMTQELCDEVLHIAFYQRPLKDFSHLVGKCTFYENEYRAPKYSLSAVEFVTISKVVNILASCSKESGEIYTQEQYQKILSSVFEEVCNKGSLSFAQLRKMLNIDESIQFQELKHSNLEKPETKKFVEFKNFKKFCHILGDVKQDRETSDNIARDLTLTKDKEQLKQKLCKYPALTQDQIMQLSEIDFDHHISLSLKALGEILPFMRNGIRYDQACKNANLVTRHNDKKMKFLPPFNESMYAQDLHNPVVLRAISEYRKVLNALIKKYGRFHKIHIELAREVGKSYKDRGRYQKEIDTNYKNREQAKEMCKKISLPLNENNILKLRLFREQDEVCAYSGKKITLDDLKNVGALEIDHILPYSRSFDNGYLNKVLVFTKENQNKGNKTPFEAFGADSIKWSKIVSLARRNGYPKKKAQNITTTTFATRESGFKARNLSDTRYIARLITSYTREYLACLPLDCNEDTMLVAGEKGSKIHVETINGMLTTTMRHFWGLPVKNRFEHTHHAIDAIIIAYSNASMIKRFSDFVKNHQETLKAELYAKALAQDTFKHQRKFFEPFAGFREHVLHKIAQIFVSHSPNKRVRGALHEESFKSFNDATYQKEYGGLAGIQKALELGKIRQIGTKLVANGKMVRVDIFAHKKSKKFYAVPIYTMDIALGVLPNKAVVSGKSDGVIKDWIEMDENYEFCFSLFKGDVVLVQKSSMEKSEFAYFVSLDIATASIALRTHDNNIKTLTPNQQKLFTSATQKEVTAKSLGIQRLKVFEKYKVSPLGELKPSKYEPRHYRTQNHTKRQKPNKGFLGGL

SEQ ID NO: 8081 - protein, 1030 aa, synthetic construct
  REGION 1..1030: note = Synthetic
MKILGFDIGITSIGWAYVEGEELKDCGVRIFTKAENPKNGDSLAAPRREARGVRRRLARRKARLNAIKRLLCKEFGLNLSDYLANDGELPKAYQTSKEHKSPYELRTLALSQKLDSKDLARVILHIAKHRGYGNKHAKTGSDKDSGKVLSAIKVNETAMKDKYQSVGEYLYKEFYQKLRLESEKKGNNITKEFKNVRNKKESYEHCVAQEQVRAELELIFAKQKEFGITFSENFESQIIETAFYQKDLKSFENKVGKCVFYDEPRAPKDSLSAIEFVALTRIINTLKNLEEKSKNLGIGEAYGKDKIQEILKIVLDKGEISYKKLREILHLDECILFAKDSKLDYTKGMQEAEKAKLIEFKNLKAFKKAMGEDFGKFSREELDSIAMDIALIKSKENLAKKLQNYSALSKEQVEALSNLNFAKHIDLSFKALDKILPFMREGLRYDEAVKKAGLQEHRKHKQKGEFLIPLKDYEPYLANPVVARALSEYRKVLNALLRKYGNVHKIHLEFTREAGKNYDERKKIEKEQREHFEANQKAIQQCEILGLPINGANILKMKLWIEQKELCVYSDRKITREHLLDSKVLEVDHIYPYSRSFDDSYMNKVLVFAKENQGKGNKTPFEAFGNDKEKWDRILSLSANLPKQKQRRISNKDFKDKELGFIARNINDTGYIARLASQWTNHCLKFENLSENEVSIAGEKGSKNHLEVISGQLTSMLRHYWGLGNKDRNNHLHHAVDAVILAYTNNAMIKAFANFRKNQEENKKKFYAKQIAESEYKAKKAFFEPCKNFRQMVLDKVDSIFVSKPPRKRARGALHKETFYSFEKLCNDKEYSKDNKMDYGGQKGIERALELGKIRQVGTKIVSNGAMVRVDIFKDKKGKFYAVPIYTMDFALGILPNKAVAIGKDKDGVIKDWIEMDSNYTFCFSLFKDDLILVKKKEMEKAELCYFVSFDTSTASIQVEKHNNKFEGLSENEKILYSNATQKEVVGKSIGIQNLKTFEKYQVSPLGEMQKAEFEPCQDIALKSSPKRKN

SEQ ID NO: 8082 - protein, 1026 aa, synthetic construct
  REGION 1..1026: note = Synthetic
MSSIKILGFDIGVASIGWAFVEGDEIRDCGVRIFTKAENPKTGESLALPRREARGVRRRLARRRVRLNTIKKIICKEFDLRLSDYIADDGELPKAYQTNKDTKSPYELRYKALNERLSKEELARVILHIAKHRGYGNKHAKDGDDKDSGKVKKAIGENKTLLEQKGYESVGEYCFREFFKSIKDKDGETHNIPSQNIRNKKGNYDRCVSQKQLEDELKLIFAKQRKLGFNKEFEDAILEVAFYQRPLKDFDDKIGDCIFFDNEKRAPKESISAIEFVALTRIINTLKYLSKTTGEVYEKEIINKIWQKILENGKMTYAELRKILALDSSVFFKDKDLDYTLGIKEAEKIKFIEFKKLIKFKKALGSFDGLSREILDNIAMQIAITKDRQRLLEKLEVFPLNKEQKENLSQLNFSKYIDLSLKALNQILPFMREGRRYDEAKDDAKLQEKAKNTKKEEFLPPLKEFDLNLTNPVVARALAEFRKVLNALLKKYGKVHKIHLEFARDMRLDFDERERLISIQNDNFNKRQLAEDFCKEHGLEPSNANILKIKLWQEQQWHCMYSGELIGIPDLKDPTKLQVDHIYPYSRSFDDSYTNKVLVRAEWNQEKGNHTPFEAFGGDKNKWDKIVALAEKLPPSKKLNRSEKSKKDKLLDEKFNDKELGFLARNIVDTGYIARLVAKYIDMYLEFLPLEENENTSLARGEKGSKKHIGIVNGRLTSEVRHNWGLDPKDRDNHLHHAIDAIVIAYMNDKRIKAFADFRRLKELKIKRYGREITEDEYQEKKKELSCAPFDDFRNRTLENIDKIFVSRPPRKRARGTLHEETFYSIDDKKLLKAYGGKEGMQRALSLGKIRQIGTKIVKNGTMVRVDIFKDKRGRFYGVPIYTMDFALGVLPNKAAVSGKDKNGLIKEWAEMDSGYEFCFSLFKDDLILVQRKEMQEPELCYFVSFDSSNAQIDVRSHNNHFSVLNENQKLLFKSATQAEVIGESIGIQNLKVFEKWHVSPLGEVRKAEFSPRGEAKLKTSKKRKK

SEQ ID NO: 8083 - protein, 1025 aa, synthetic construct
  REGION 1..1025: note = Synthetic
MKILSFDIGITSIGWAFVEGEELRDCGVRIFTKAENPKNGDSLAAPRREARSTRRRLARRKARLNAIKRLLCKEFGLNLSDYFANDGELPKAYETTKDTKSPYELRTLALEQKLEPKELARVILHIAKHRGYGNKHAKTGGDKDSGKVLSAIKTNEATMNAKNYKSVGEYLYKEFYQKLRLESEKKGNNTTKEFKNVRNKGENYEHCVAQEQVRAELELIFKKQKDFGATFSENFESQILETAFYQRDLKSFEDKVGKCVFYENENRAPKDSLSAMEFVALTRIINTLKNLEEKSKNLGIGETYGKDKIQEILKIVLDKGEMSYKKLRDILRLDMLSSADSKLDEKVKFIEPKRLKNLKDFRKAMGGDFSKFDREELDKIATDITLIKSKESLAKKLQDYPALSKEQVEALSNLSFSQHINLSLKALYEILPFMREGLRYDEAVQKAGLQEHRKYKQKGEFLIPLKEYEPYLANPVVARALSEYRKVLNALLKKYGAVHKIHLEFTREAKLSAKERQKYEKEQKEHFEANEEARKRCEDFGLEANGTNILKLKLWQEQKGVCVYSEQNITRGHLLDSNALQIDHIYPYSRSFDDSYMNKVLVFSKENQNKLNKTPFEAFGSNKEKWDRILSFSAKLPKQKQRRISNTNFKDKEGGFLARNLNDTGYIARLASQWSKDCLEFLPLSENEVSIAGEKGSKKHIEVISGSLTATLRHYWGLGDKDRNNHLHHAVDAIILAYANAKTIQAFADFRKNQEQNKAKFYAKQIAESEYKAKRAFFEPCKNFRQRVEEKIKEIFVSKPPRKRVRGALHQETFYPFEKLCNDKEYSEKLKMDYGGEKGMQKAIALGKIRQIGTKIVKNGAMVRVDIFKDKKGKFYGVPIYTMDFALGILPNKAVATGKDKDGVIKDWIEMDSNYDFCFSLFKDDLILVRKKEMKEPELCYFVSFGVSTASIQVEKHNNKFEGLSENEKILYSNATQKEVAGKSIGIQNLKIFEKWQVSPLGEKQKAEFETRQEIKLKSSPKRKG

SEQ ID NO: 8084 - protein, 1023 aa, synthetic construct
  REGION 1..1023: note = Synthetic
MKILGFDIGVTSIGWAFVEGEELKDCGVRIFTKAENPKNGDSLAAPRREARSTRRRLARRKARLNTIKRLLCEEFGLNLSDYLANDGELPKAYETTKDTKSPYELRTLALEQKLEPKELARVILHIAKHRGYGNKHAKTGSDKDSGKVLSAIKVNEATMNAKRYKSVGEYLYKEFYQKERYEKKGNTLTKEFKNVRNKGENYEHCVAQEQVRAELELIFQKQKDFGATFSENFESQILETAFYQRDLKSFADKVGECVFYKGENRAPKDSLSAMEFVTLTRIINTLKNLEEKSKNLGIGETYGKDKIQEILKVVLDKGEMSYKKLREILHLDERILFAKDPKLDYTKGVQEAEKAKFIELKNLKTFKKAMGGDFGKFAREELDNIATEITLIKSKENLAKKLQNYPALSKEQVEALSNLNFAKHIDLSLKALHRILPFMYEGLRYDEAVQKAGLQEHKKHLQKGEFLIPLKEYEPYLANPVVARALSEYRKVLNALLRKYGAVHKIHLEFTREAKLSAKERQKYEKEQRGHFEANQNAIKQCEILGLPLNGANILKMKLWIEQGECCVYSGDKITESDLKDSNALQIDHIYPYSRSFDDSYMNKVLVFSKENQNKLNKTPYEAFGDDKEKWDRILSFSTKLPKQKQRRISNTNFKDKEGGFLARNLNDTGYIARLASQWSKDCLEFLPLSENEVNIAGEKGSKKHIEVISGSLTTTLRHYWGLGDKDRNNHLHHAVDAIILAYTNAKTIKAFADFRKNQEQNKAKFYAKQIAESEYEEQKAFHKAQVKVFRQRVEEKINEIFVSKPPKKRARGALHEETFYSFEDEKLLKSYGGKQGIEKAISLGKIRQVGTKIVSNGIMVRVDIFKDKKGKFYGVPIYTMDFALGILPNKAVAIGKDKEGVIKDWIEMDSNYDFCFSLFKDDLILVQKKEMKKAELCYFVSFGSANAQINVEKHNNKFEGLSENEKILYSNATQKEVAGKSIGIQNLKTFEKYQVSPLGEVQKAEFESRQEIKLKSSPKRKG

SEQ ID NO: 8085 - protein, 1023 aa, synthetic construct
  REGION 1..1023: note = Synthetic
MKIYSFDIGVASIGWAFIENEVLQDCGIRIFTKAENPKNGASLALPRREARGVRKRLARRRGRLNTIKQLLCKEFGLQLEDYLSNDGELPKAYTASKANPLKSPYELRTLALSQKLDSKDLVRVILHIAKHRGYGNKHAKDSKDTESGKVKKAIEFNRKTLAEKGYRSVGEYLYREFFQQSRISQNNGATEFINVRNKAGNYEHCVAQDMLKEELESILNAQRQFGFSLKQDFENKLLTKIFEQRPLKSFADKVGNCCFIAGEKRAPKDSPSAIEFIALSRTINTLINLSKESGEIYNRAIILQIVESTLKKGEISYKELREIIRLDERLRFKDPRLDYSREIKEAEKVKFLEFKQLKGFKKALGESFTTLAISQLDEIAEHIALIKDRVKLNEKLESYALTKEQREALSNLSFSAHINLSLQALKQILPFMRGDNGEQCLDYDESVEKAGLKALSKDTLKGQMLPPLNEFEPYLSNPVVARALAEYRKVLNVLLKQYGSPHKIHIEYAREAKLSSTERQKYEKEQKDNYAANQAAHKKCQELGLEPSSTNLLKLKLWQEQGGLCLYSGAKITISYLQDPTALQVDHIYPYSRSFDDSYMNKCLVLTKANQEKGNRTPFEAFGTDSAKWGVITTLAQKLPHKKRRRILNTAFNDKEAGFKLRNLNDTSYIARLVADYTETYLEFLPLVESENTTLSKGQKGSKKHIAIVNGVLTSTMRYYLGFASKDRDNHLHHALDAVIIGFMNDSVIKAFSDFKKTQETSKAAYYAHTLSKQEYKKQRAFIQLPSGENFRVSVLEKVESVFVSKPPRKRVRGALHEATFYSPNDPKLLKNYGGTKGVERALALGKMRKVGAKIVSNGAMVRVDIFRHKSSGKFYGVPVYTMDFALGILPNKAVVVGKDQNGVIKDWLEMDSSYEFIFSLYKDDVILVQKKEMQRPELCYFVSFDTSGASIKVAKHDNNFSTLTENQKLLFSNATKEEVVGKSIGIQNLKVFEKWQVSVLGEVKRTQSYPRENISLASKAKK

SEQ ID NO: 8086 - protein, 1007 aa, synthetic construct
  REGION 1..1007: note = Synthetic
MKVLGFDIGINSIGWAFVENNELKDCGVRLFTKAENPKTKESLALPRRNARSSRVRLRRRRSRLLSLKHIISKEFGLHYEDYIALDGNLPKAYTGKIESIYKLRYEALSQAISKEDLARVILHIAKHRGYMNKNQKTSQDSEKGAILSAIKENSNKIKHYQTAGEYFYKELFENLRDGTKEFKNIRNKAMKNEKTGNMESTYYNTILASDLEKELKLILEKQQAYHNYSDTFIKEVLEIAFYQRPLKDFSHLVGSCTFYENEKRACKNSYSAWEFIALGKIINTLESIKKDTGEIFSNEIITQILKEVLDKGSLSYTKLRKMINLDEKVKFKGLKYDKEGVEKTNLIEFKKLKEFKKALGEHNLERKTLDEIATHITLTKDENQLKKQLEQYALSQNQIDALAELDFNDHINLSFKALYEILPLMEKGKRYDEACNELGLKAKTSNQKSEFLPAFCDSIFAQELTNPIVNRAISEYRKVLNRLLKKYGKMHKIHIELARDAGLSKEARNKIEKEQKENKDINDKAEKTCKEFGLKPNAKNILKIKLWREQGEICAYSGKKITIDDLKEDKALEVDHIYPYSRSYDDSYNNKVLVFIKENQLKLNQTPYEAFGSNQEKWSKIQVLAQKLPYKKKNRILDENFKNKDQIEFISRNLNDTRYATSLIAKYTKEYLEFLPLSDDEDISLKSGEKGSKTHVQTMNGMLTSVLRHAWGFSQKDRNNHLHHALDAIIIAYSTNSIIKAFSDFKKNQEILKAKLYAKKLTSEEYKNQSKFTGFEKYRSKILEKLDSIFVSKPPNKNTKGALHEQTFYSYQDILEEYKTQEGLKRALECGKVRKIGTKYVVNDRMVRLDIFKKDNKFYGIPIYTMDFALGVLPNKVVTIGTDKDKIKKEWKTIDETYEFCFSLYKGDLVLIQKKEMQESEFAYYNGFDISSASISLEKHDNKFENLTENQKLLFPKAKEGDVEVRGIGIQGLKVFKKYMVTPLGEIQETRTEARQNIQPRKKHGLR

SEQ ID NO: 8087 - protein, 1000 aa, synthetic construct
  REGION 1..1000: note = Synthetic
MKILGFDIGINSIGWAFVEDNQLQDCGVRLFTKAEDPKTRESLALPRRNARSNRRRLGRRRSRLIALKHIISKELKLNYQDYIANDGELPKAYEGRLISPYELRYKALNEKIEPKDLARVILHIAKHRGYMNKNEKKSSDNEKGKILSALKTNALKLEKYQSVGEYFYKEFFQKYRENTKDFINIRNKEGSYENCVLASDLEKELKLILEKQKEWGYSYNDNFIKEILKVAFFQRPLKDFSYLVGACTFFEDEKRACKNSYSAWEFVALTKIINELKSLEKESGELVSSQIINEILNHILDKGSITYKKFREYIKLHESMKFKSLKYDKDNAESVKLIEFRKLVEFKKALGEHSLSREELDQIATYITLIKDNEKLKIALEKYSLNNEQIKNLLEIDFNDHINLSFKALNLILPLMKEGKRYNEACKLLNLKTKSNNQKFDFLPAFCDSIFAQELTNPIVNRAISEYRKVLNALLKKYGKMHKIHIELARDIGLSKKLRAKIEKEQKENYENNIWALNECEKFGLKANAKNILKLKLWKEQKEFCIYSGKKISIEHLRDEKALEVDHIYPYSRSFDDSFLNKVLVFTKENQEKLNKTPFEAFGANEERWSKIQALAQNLPYKKKNKILDEAFKGKQQQDFISRNLNDTRYISTLIVKYTKEYLDFLPLDEKEDINLKSGEKGSKIHVQTINGMLTSVLRHTWGFAQKDRNNHLHHALDATIVAYSTNAIIKAFSDFKKEQELLKAKLYAKELTSDSYKHQAKFFEPFEGFREQILNQINKLFVSKPPRKRARGALHKETFYPKDEMIKKYNSQEGLEIALNCGKIRKIGTKYVENDTMVRIDIFKKQNKIYAIPIYTMDFALGVLPNKIVIKGKDKKGNPKQWQEIDESYEFCFSLHKDDLVLIQKKDMQEPEFAYYNSFDISNSSICVEKHDNKFENLTDNQKLLFTNAEEGNVKAKKIGIQGLRIFEKYIITPLGEKIKADFKSREDIALKTSKKHGL

SEQ ID NO: 8088 - protein, 995 aa, synthetic construct
  REGION 1..995: note = Synthetic
MKVIGFDIGINSIGWAFVENDELKDCGVRIFTKAENPKNKESLALPRRNARSSRKRLKRRKLRLIAMKHILAKELNLNYKDYIANDGELPKAYEGKLISPYELRYKALNQKLEAKDLVRVILHIAKHRGYMNKNDKKSNDAEKGKILSALKNNALKLEKYQSVGEYFYKEFFQKYKENTKDFIKIRNIKDNYNNCVLASDLEKELKLILEKQKEFGYSYSNDFIEEVIQVAFFQRPLKDFSHLVGTCTFFEEEKRACKNSYSAWEFVALTKIVNELKSLEKISGELISTQTINEILNYILDKGSITYKKFRSYINLYESIKFKSLKYDKDNAESAKLIDFRKLVEFKKALGEHYFNRQELDQISTYITLIKDNVKLKTALEKYNLSNEQINNLLEIEFNDHINLSFKALSMILPLMKEGKKYDEACEIANLKPKTTNQKQDFLPAFCNSIFVHELSNPIVNRAISEYRKVLNALLKKYGKVHKIHLELARDIGLSKKAREKIEKEQKENQAINTWALNECENMGIKANAKNILKLKLWKEQKEICIYSGKKISIEHLKDEKALEVDHIYPYSRSFDDSYMNKVLVFTKENQEKLNKTPFEAFGKNIEKWNKIQTLAQILPYKKKNKILDENFKDNQQQDFISRNLNDTRYIATLIAKYTKEYLNFLPLNENENINLKSGEKGSKIHIQTVNGMLTSVLRHTWGFDKKDRNNHLHHALDAIIVAYSTNSLIKAFSDFKKNQELLKAKLYAKELTNDNYIHQAKFFEPFEGFREKILNKIDEIFVSKPPRKRARGALHKETFYSEKKMIKKYNSKEGLNIALDCGKIRKIGTKYVENDTMVRVDIFKKQNKFYAIPIYTMDFALGILPNKIVVIGKDKNNNPKQWQEIDESYEFCFSLYKNDLILLQKKDMQEAEFAYYNGFDIDSSRINIKKHDNKFENLTSNQKLLFTNKEKNRTGIQNLKIFEKYIVTPLGNKIKADFQPRQNISLKSSKKNGL

SEQ ID NO: 8089 - protein, 994 aa, synthetic construct
  REGION 1..994: note = Synthetic
MKILGFDIGVSSIGWAFVEDNKLQDCGVRIFTQAENPKNKESLALPRRNARSTRRRLSRRSARMRAMKHILSSEFGLKYEDYIAEDGVLPKAFKGKLISPYELRYKAINEALSKEELARVILHIAKHRGYIAKNSKNTNINEKGKILKALKDNGEKLKNYRSVGEYFYKEFFEKMRENSNNFQNIRNKNNSYANCVLASDLEEELKLIFKKQNEFGMKLSKKFIDNVINIAFFQRPLKDFSQSVGVCTFFENEKRAPKNSYSAWEFVALSKIVNEFYSIKNNYGIIFNKEVLLEVLNHILKKGNITYTKLRQIIKLEDGASFKSLKYNKENAESKKFVEFKKLSEFNKALGEHSLTRENLDEISKDITLIKDESKLKEKLQNYPLTQAQLEALVQLDFKEHINLSFKALNLIIPLMKELKRYDEACLELGLKKKENTMQHKLLPPFCETLYAEEINNPVVLRVIKEYRKVLNALIKKYGLVHKIHIEFAREVGVSKEIRNKIEKEQQENAELNKWAEEQCVKLEIKSSSKNKLKLKLWKEQKEFCAYSGKKITLKDLQDEKALEIDHIYPYSRSFDDSYNNKVLVFVKENQEKGNKTPFEAFGSNKAKWEDIKSASSILPFKKRQKILDEKFIDKVQKDFIARNLNDTRYATTLISKYTKEYLEFLPLQEGENKQSGDKGSKIHVQATNGTLTATLRHFLGFGSKNRKGHLHHGLDAVIIAYSTSSMIQAFSQFKKEQELLKLKILANKIDKEQYKIKQKFFDPFEKGFRDEILSKVNAIFVSKPPRKKTRGALHEETFCAKEKFLKLYGGEEGLKKALEYGKVRKIGENKYVSNGDMIRVDIFKHKKSNKFYGVPIYTMDFALGVLPNRAVVSGKKDGIIKDWLEMDENFEFCFSLYKDDLLLLKKKGMQEAEFVYYVSFNVSSVSIRIAKHDNQSENLSDNQKQLFTKLEKDKVETEGIGIQNLEVFEKYIVSPLGEKFKAQFAPREMMKKK

SEQ ID NO: 8090 - protein, 987 aa, synthetic construct
  REGION 1..987: note = Synthetic
VARILAFDIGISSIGWAFSENDELKDCGVRIFTKAENPKTGESLALPRRLARSARKRLARRKARLNHLKHLIANEFKLNYEDYQSFDESLAKAYKGSLISPYELRFRALNELLSKQDFARVILHIAKRRGYDDIKNNGDEEKSEILKAIKQNEEKLVNYQSVGEYLYKEYFQKFKENSKEFINVRNKKESYERCIAQSFLKDELKLIFQKQREFGFSFSKKFEEEVLSVAFYKRALKDFSHLVGNCSFFTDEKRAPKNSPLAFMFVALTGIINLLNNLKNTEGILYTKDDLNTLLNEVLKNGTLTYKQTKKLLGLSDDYEFKGEKGTYFIEFKKYKEFIKALGEHNLSQDNLNEIAKDITLIKDEIKLKKALAKYDLNQNQIDSLSKLEFKDHLNISFKALKLITPLMLEGKKYDEAYNELNLKVAINEDKKDFLPAFNETYYKDEVTNPVVLRAIKEYRKVLNALLKKYGKVHKINIELAREVGKNHSQRAKIEKEQNENYKAKKDAELECEKLGLKINSKNILKLRLFKEQKEFCAYSGEKIKISDLQDEKMLEIDHIYPYSRSFDDSYMNKVLVFTKQNQEKLNQTPFEAFGNDSAKWQKIEVLAKNLPTKKQKRILDKNYKDKEQKDFKDRNLNDTRYIARLVLNYTKDYLDFLPLSDDENTKLNDTQKGSKVHVEAKSGMLTSALRHTWGFSAKDRNNHLHHAIDAVIIAYANNSIVKAFSDFKKEQESNSAELYAKKISELDYKNKRKFFEPFSGFRQKVLDKIDEIFVSKPERKKPSGALHEETFRKEEEFYQSYGGKEGVLKALELGKIRKVNGKIVKNGDMFRVDIFKHKKTNKFYAVPIYTMDFALKVLPNKAVVQGKDKKSGLIKDWILMDENYEFCFSLYKDSLILIQTKDMQEPELVYFNAFTSSTVSLIVSKHDNKFETLSKNQKILFKNANEKEVIAKSIGIQNLKVFEKYIVSALGEVTKAEFRQREDFKK

SEQ ID NO: 8091 - protein, 987 aa, synthetic construct
  REGION 1..987: note = Synthetic
VARILAFDIGISSIGWAFSENDELKDCGVRIFTKAENPKTGESLALPRRLARSARKRLARRKARLNHLKHLIANEFKLNYEDYQSFDESLAKAYKGSLISPYELRFRALNELLSKQDFARVILHIAKRRGYDDIKNSDDKEKGAILKAIKQNEEKLANYQSVGEYLYKEYFQKFKENSKEFTNVRNKKESYERCIAQSFLKDELKLIFKKQREFGFSFSKKFEEEVLSVAFYKRALKDFSHLVGNCSFFTDEKRAPKNSPLAFMFVALTRIINLLNNLKNTEGILYTKDDLNALLNEVLKNGTLTYKQTKKLLGLSDDYEFKGEKGTYFIEFKKYKEFIKALGEHNLSQDDLNEIAKDITLIKDEIKLKKALAKYDLNQNQIDSLSKLEFKDHLNISFKALKLITPLMLEGKKYDEACNELNLKVAINEDKKDFLPAFNETYYKDEVTNPVVLRAIKEYRKVLNALLKKYGKVHKINIELAREVGKNYSQRAKIEKEQNENYKAKKDAELECEKLGLKINSKNILKLRLFKEQKEFCVYSGEKIKISDLQDEKMLEIDHIYPYSRSFDDSYMNKVLVFTKQNQEKLNKTPFEAFGNDSTKWQKIEVLAKNLPEKKQKRILDKNYKDKEQKDFKDRNLNDTRYIARLVLNYTKDYLDFLPLSDDENTKLNDTQKGSKVHVEAKSGMLTSALRHTWGFSTKDRNNHLHHAIDAVIIAYANNSIVKAFSDFKKEQESNSAELYAKKISELDYKNKRKFFEPFSGFRQKVLDKIDEIFVSKPERKKPSGALHEETFRKEEEFYQSYGGKEGVLKALELGKIRKVNGKIVKNGDMFRVDIFKHKKTNKFYAVPIYTMDFALKVLPNKAVARSKKGEIKDWILMDENYEFCFSLYKDSLILIQTKDMQEPELVYFNAFTSSTVSLIVSKHDNKFETLSKNQKILFKNANEKEVIAKSIGIQNLKVFEKYIVSALGEVTKAEFRQREDFKNELR

SEQ ID NO: 8092 - protein, 972 aa, synthetic construct
  REGION 1..972: note = Synthetic
VARILAFDIGISSIGWAFSENDELKDCGVRIFTKVENPKTGESLALPRRLARSARKRLARRKARLNHLKHLIANEFKLNYEDYQSFDESLAKAYKGSLISPYELRFRALNELLSKQDFARVILHIAKRRGYDDIKNSDDKEKGAILKAIKQNEEKLANYQSVGEYLYKEYFQKFKENSKEFTNVRNKKESYERCIAQSFLKDELKLIFKKQREFGFSFSKKFEEEVLSVAFYKRALKDFSHLVGNCSFFTDEKRAPKNSPLAFMFVALTRIINLLNNLKNTEGILYTKDDLNALLNEVLKNGTLTYKQTKKLLGLSDDYEFKGEKGTYFIEFKKYKEFIKALGEHNLSQDDLNEIAKDITLIKDEIKLKKALAKYDLNQNQIDSLSKLEFKDHLNISFKALKLITPLMLEGKKYDEACNELNLKVAINEDKKDFLPAFNETYYKDEVTNPVVLRAIKEYRKVLNALLKKYGKVHKINIELAREVGKNYSQRAKIEKEQNENYKAKKDAELECEKLGLKINSKNILKLRLFKEQKEFCVYSGEKIKISDLQDEKMLEIDHIYPYSRSFDDSYMNKVLVFTKQNQEKLNKTPFEAFGNDSTKWQKIEVLAKNLPEKKQKRILDKNYKDKEQKDFKDRNLNDTRYIARLVLNYTKDYLDFLPLSDDENTKLNDTQKGSKVHVEAKSGMLTSALRHTWGFSTKDRNNHLHHAIDAVIIAYANNSIVKAFSDFKKEQESNSAELYTKKISELDYKNKRKFFEPFSGFRQKVLDKIDEIFVSKPERKKPSGALHEETFRKEEEFYQSYGEKKEFKPNLVKSAKMVKLLAMAICLEWIFLNTKRQINFMLCQFILWILLKYYQIKPWYKVKIKSQVLKTGFWMKIMSFAFLYTKIVFFKLKICKSQNLFILMLLQALLLVLFQNTIINLKRAKIKKYCLKMQMKKKSQKAEFKIKYLKNTFQHLEKQRLSLDKEKILKN

SEQ ID NO: 8093 - protein, 973 aa, synthetic construct
  REGION 1..973: note = Synthetic
VARILAFDIGISSIGWAFSENDELKDCGVRIFTKAENPKTGESLALPRRLARSARKRLARGKARLNHLKHLIANEFKLNYEDYQSFDESLAKAYKGSLISPYELRFRALNELLNKQDFARVILHIAKRRGYDDIKNSDDEEKGKILKAIKQNEEKLANYQSVGEYLYKEYFQKFKENSKEFINVRNKKESYERCIAQSFLKDELKLIFQKQREFGFSFSKKFEEEVLSVAFYKRALKDFSHLVGNCSFFTDEKRAPKNSRLAFMFVALTRIINLLNNLKNTEGILYTKDDLNALLNEVLKNGTLTYKQTKKLLGLSDDYEFKGEKGTYFIEFKKYKEFIKALDEHSLSQDDLNEIAKDITLIKDEIKLKKALAKYDLNQNQIDSLSKLEFKDHLNISFKALKLITPLMLEGKKYDEACNELNLKVAINEDKKDFLPAFNETYYKDEVTNPVVLRAIKEYRKILNALLKKYGKVHKINIELAREVGKNHSQRAKIEKEQNENYKAKKDAELECEKLGLKINSKNILKLRLFKEQKEFCAYSGEKIKISDLQDEKMLEIDHIYPYSRSFDDSYMNKVLVFTKQNQEKLNKTPFEAFGNDSTKWQKIEVLTKNLPTKKQKRILDKNYKDKEQKDFKDRNLNDTRYIARLVLNYTKDYLDFLPLSDDENTKLNDTQKGSKVHVEAKSGMLTSALRHTWGFSTKDRNNHLHHAIDAAIIAYANNSIVKAFSDFKKEQESNSAELYAKKISELDYKNKRKFFEPFSGFRQKVLDKIDEIFVSKPERKKPSGALHEETFRKEEEFYQSYGERRSFKSPRAWNPQSKWNSKWRYVSGYFTQKDKILCCANLYYGFCFKSITKSCSTKKRDKRLDFNGKLVLLFFIQRFDFNSNRYAEPELVYFNAFTSSTVSLIVSKHDNKFETLSKNQKILFKNANEKEVIAKSIGIQNLKVFEKYIVSALGEVTKAEFRQREDFKNELR

SEQ ID NO: 8094 - protein, 956 aa, synthetic construct
  REGION 1..956: note = Synthetic
VARILAFDIGISSIGWAFSENDELKDCGVRIFTKAENPKTGESLALPRRLARSARKRLARRKARLNHLKHLIANEFKLNYEDYQSFDESLAKAYKGSLISPYELRFRALNELLSKQDFARVILHIAKRRGYDDIKNSDDKEKGAILKAIKQNEEKLANYQSVGEYLYKEYFQKFKENSKEFTNVRNKKESYERCIAQSFLKDELKLIFKKQREFGFSFSKKFEEEVLSVAFYKRALKDFSHLVGNCSFFTDEKRAPKNSPLAFMFVALTRIINLLNNLKNTEGILYTKDDLNALLNEVLKNGTLTYKQTKKLLGLSDDYEFKGEKGTYFIEFKKYKEFIKALGEHNLSQDDLNEIAKDITLIKDEIKLKKALAKYDLNQNQIDSLSKLEFKDHLNISFKALKLITPLMLEGKKYDEACNELNLKVAINEDKKDFLPAFNETYYKDEVTNPVVLRAIKEYRKVLNALLKKYGKVHKINIELAREVGKNHSQRAKIEKEQNENYKAKKDAELECEKLGLKINSKNILKLRLFKEQKEFCAYSGEKIKISDLQDEKMLEIDHIYPYSRSFDDSYMNKVLVFTKQNQEKLNKTPPLKPLAMIVQNGRKLKFQKIYLLKSKKEFIKITKTKSKKTLKIEITILATSQGLFTTLKIIIFYLAMMKIQSTTHKKAQKCMKQKAVCLHRLDTLGALALRIEITIFITPSMQLLLMQTTLSRLFQILKKSKKATVQNFMQKKLVNIIKTKGSFLSLLVVLGKRFIKLMKFLSQNLREKSQVELYMKKHLEKKKNSINHTAEKKEFKPSLVKSAKMVKLKMAICLEWIFLNTKRQINFMLCQFILWILLKYYQIKLHEVKKVRKTGFWMKIMSFAFLYTKIVFFKLKICKSQNLFIIMLLQALLLVLFQNTIINLKRAKIKKYCLKMQMKKKSQKAEFKIKYLKNTFQHLGKLQRLSLDKEKILKN

SEQ ID NO: 8095 - protein, 957 aa, synthetic construct
  REGION 1..957: note = Synthetic
VARILAFDIGISSIGWAFSENDELKDCGVRIFTKAENPKTGESLALPRRLARSARKRLARRKARLNHLKHLIANEFKLNYEDYQSFDESLAKAYKGSLISPYELRFRALNELLSKQDFARVILHIAKRRGYDDIKNNGDEEKSEILKAIKQNEEKLVNYQSVGEYLYKEYFQKFKENSKEFINVRNKKESYERCIAQSFLKDELKLIFQKQREFGFSFSKKFEEEVLSVAFYKRALKDFSHLVGNCSFFTDEKRAPKNSPLAFMFVALTRIINLLNNLKNTEGILYTKDDLNTLLNEVLKNGTLTYKQTKKLLGLSDDYEFKGEKGTYFIEFKKYKEFIKALGEHNLSQDNLNEIAKDITLIKDEIKLKKALAKYDLNQNQIDSLSKLEFKDHLNISFKALKLITPLMLEGKKYDEAYNELNLKVAINEDKKDFLPAFNETYYKDEVTNPVVLRAIKEYRKVLNALLKKYGKVHKINIELAREVGKNHSQRAKIEKEQNENYKAKKDAELECEKLGLKINSKNILKLRLFKEQKEFCAYSGEKIKISDLQDEKMLEIDHIYPYSRSFDDSYMNKVLVFTKQNQEKLNQTPFEAFGNDSAKWQKIEVLAKNLPTIKSKKEFIKITKTKSKKTLKIEITILATSQGLFTTLKIIIFYLAMMKIQSTTHKKAQKCMKQKAVCLHRLDTLGALALRIEITIFITPSMQLLLMQTTLSRLFQILKKSKKATVQNFMQKKLVNIIKTKGSFLSLLVVLGKRFIKLMKFLSQNLREKSQVELYMKKHLEKKKNSINHTAEKKEFKPSLVKSAKMVKLKMAICLEWIFLNTKRQINFMLCQFILWILLKYYQIKLHEVKKVRKTGFWMKIMSFAFLYIKIVFFKLKICKSQNLFIIMLLQALLLVLFQNTIINLKRAKIKKYCLKMQMKKKSQKAEFKIKYLKNTFQHLGKLQRLSLDKEKILKN

SEQ ID NO: 8096 - protein, 948 aa, synthetic construct
  REGION 1..948: note = Synthetic
VARILAFDIGISSIGWAFSENDELKDCGVRIFTKAENPKTGESLALPRRLARSARKRLARRKARLNHLKHLIANEFKLNYEDYQSFDESLAKAYKGSLISPYELRFRALNELLSKQDFARVILHIAKRRGYDDIKNNGDEEKSEILKAIKQNEEKLVNYQSVGEYLYKEYFQKFKENSKEFINVRNKKESYERCIAQSFLKDELKLIFQKQREFGFSFSKKFEEEVLSVAFYKRALKDFSHLVGNCSFFTDEKRAPKNSPLAFMFVALTRIINLLNNLKNTEGILYTKDDLNALLNEVLKNGTLTYKQTKKLLGLSDDYEFKGEKGTYFIEFKKYKEFIKALGEHNLSQDDLNEIAKDITLIKDEIKLKKALAKYDLNQNQIDSLSKLEFKDHLNISFKALKLITPLMLEGKKYDEACNELNLKVAINEDKKDFLPAFNETYYKDEVTNPVVLRAIKEYRKVLNALLKKYGKVHKINIELAREVGKNHSQRAKIEKEQNENYKAKKDAELECEKLGLKINSKNILKLRLFKEQKEFCAYSGEKIKISDLQDEKMLEIDHIYPYSRSFDDSYMNKVLVFTKQNQEKLNQTPFEAFGNDSAKWQKIEVLAKNLPTKKQKRILDKNYKDKEQKNFKDRNLNDTRYIARLVLNYTKDYLDFLPLSDDENTKLNDTQKGSKVHVEAKSGMLTSALRHTWGFSAKDRNNHLHHAIDAVIIAYANNSIVKAFSDFKKEQESNSAELYAKKNIRLKQKEVFAFWFAKGFRNNFCLKTEKKAKWSFTRNIKRRRILSIIRRKRRSFKSPRAWNPQSKWNSKWRYVSGYFTQKDKILCCANLYYGFCFKSITKSCSTKKRDKRLDFNGKLVLLFFIRFDFNSNRYARARICLLCFYKLYCFDCFKTRINAKQKSKNIVKCKKRSNRKKHRNSKSKSIKIHSFSTWGSYKGVTKRRFKM

SEQ ID NO: 8097 - protein, 984 aa, synthetic construct
  REGION 1..984: note = Synthetic
VARILAFDIGISSIGWAFSENDELKDCGVRIFTKAENPKTGESLALPRRLARSARKRLARRKARLNHLKHLIANEFKLNYEDYQSFDESLAKAYKGSLISPYELRFRALNELLSKQDFARVILHIAKRRGYDDIKNNGDEEKGKILKAIKQNEEKLVNYQSVGEYLYKEYFQKFKENSKEFINVRNKKESYERCITQSFLKYELKLIFQKQREFGFSFSKKFEEEVLSVAFYKRALKDFSHLVGNCSFFTDEKRAPKNSPLAFMFVALTRIINILNNLKNTEGILYTKDDLNALLNEVLKNGTLTYKQTKKLLGLSDDYEFKGEKGTYFIEFKKYKEFIKALGEHNLSQDDLNEIAKDITLIKDEIKLKKALAKYDLNQNQIDSLSKLEFKDHLNISFKALKLITPLMLEGKKYDEACNELNLKVAINEDKKDFLPAFNETYYKDEVTNPVVLRAIKEYRKVLNALLKKYGKVHKINIELAREVGKNYSQRAKIEKEQNENYKAKKDAELECEKLGLKINSKNILKLRLFKEQKEFCAYSGEKIKISDLQDEKMLEIDHIYPYSRSFDDSYMNKVLVFTKQNQEKLNKTPFEAFGNDSTKWQKIEVLAKNLPEKKQKRILDKNYKDKEQKDFKDRNLNDTRYIARLVLNYTKDYLDFLPLSDDENTKLNDTQKGSKVHVEAKSGMLTSALRHTWGFSTKDRNNHLHHAIDAVIIAYANNSIVKAFSDFKKEQESNSAELYAKKISELDYKNKRKFFEPFSGFRQKVLDKIDEIFVSKPERKKPSGALHEETFRKEEEFYQSYGGKEGVLKALELGKIRKVNGKIVKNGDMFRVDIFKHKKTNKFYAVPIYTMDFALKVLPNKAVARSKKGEIKDWILMDENYEFCFSLYKDSLILIQTKDMQEPELVYFNAFTSSTVSLIVSKHDNKFETLSKNQKILFKNANEKEVIAKSIGIQNLKVFEKYIVSALGEVTKAEFRQREDFKK

SEQ ID NO: 8098 - protein, 968 aa, synthetic construct
  REGION 1..968: note = Synthetic
VARILAFDIGISSIGWAFSENDELKDCGVRIFTKAENPKTGESLALPRRLARSARKRLARRKARLNHLKHLIANEFKLNYEDYQSFDESLAKAYKGSLISPYELRFRALNELLSKQDFARVILHIAKRRGYDDIKNSDDKEKGAILKAIKQNEEKLANYQSVGEYLYKEYFQKFKENSKEFTNVRNKKESYERCIAQSFLKDELKLIFKKQREFGFSFSKKFEEEVLSVAFYKRALKDFSHLVGNCSFFTDEKRAPKNSPLAFMFVALTRIINLLNNLKNTEGILYTKDDLNALLNEVLKNGTLTYKQTKKLLGLSDDYEFKGEKGTYFIEFKKYKEFIKALGDHSLSQDDLNEIAKDITLIKDEIKLKKALAKYDLNQNQIDSLSKLEFKDHLNISFKALKLITPLMLEGKKYDEACNELNLKVAINEDKKDFLPAFNETYYKDEVTNPVVLRAIKEYRKVLNALLKKYGKVHKINIELAREVGKNYSQRAKIEKEQNENYKAKKDAELECEKLGLKINSKNILKLRLFKEQKEFCAYSGEKIKISDLQDEKMLEIDHIYPYSRSFDDSYMNKVLVFTKQNQEKLNQTPFEAFGNDSAKWQKIEVLAKNLPTKKQKRILDKNYKDKEQKDFKDRNLNDTRYIARLVLNYTKDYLDFLPLSDDENTKLNDTQKGSKVHVEAKSAMLTSALRHTWGFSAKDRNNHLHHAIDAVIIAYANNSIVKAFSDFKKEQESNSAELYAKKNSELDYKNKRKFFEPFSGFRQKVLDKIDEIFVSKPERKKPSGALHEETFRKEEEFYQSYGEKKEFKPSLVKSAKMVKLKMAICLEWIFLNTKRQINFMLCQFILWILLKYYQIKLHEVKKVRKTGFWMKIMSFAFLYTKIVFFKLKICKSQNLFIIMLLQALLLVLFQNTIINLKRAKIKKYCLKMQMKKKSQKAEFKIKYLKNTFQHLGKLQRLSLDKEKILKN

SEQ ID NO: 8099 - protein, 954 aa, synthetic construct
  REGION 1..954: note = Synthetic
VARILAFDIGISSIGWAFSENDELKDCGVRIFTKAENPKTGESLALPRRLARSARKRLARRKARLNHLKHLIANEFKLNYEDYQSFDESLAKAYKGSLISPYELRFRALNELLNKQDFARVILHIAKRRGYDDIKNSDDKEKGAILKAIKQNEEKLANYQSVGEYLYKEYFQKFKENSKEFTNVRNKKESYERCIAQSFLKDELKLIFKKQREFGFSFSKKFEEEVLSVAFYKRALKDFSHLVGNCSFFTDEKRAPKNSPLAFMFVALTRIINLLNNLKNTEGILYTKDDLNTLLNEVLKNGTLTYKQTKKLLGLSDDYEFKGEKGIYFIEFKKYKEFIKALGDHSLSQDDLNEIAKDIALIKDEIKLKKALAKYDLNQNQIDSLSKLEFKDHLNISFKVLKLITPLMLEGKKYDEACNELNLKVAINEDKKDFLLAFNETYYKDEVTNPVVLRAIKEYRKVLNALLKKYGKVHKINIELAREVGKNYSQRAKIEKEQNENYKAKKDAELECEKLGLKINSKNILKLRLFKEQKEFCVYSGEKIKISDLQDEKMLEIDHIYPYSRSFDDSYMNKVLVFTKQNQEKLNKTPFEAFGNDSTKWQKIEVLAKNLPEKSKKEFIKTIKTKSKKTLKIEITILATSQGLFTILKIIIFYLAMMKIQSTTHKKAQKCMKQKVCHRLDTLGALALRIEIIIFITPSMQLLLMQTTLSRLFLILKKSKKATVQNFMQKKLVNIIKTKGSFLSLLVVLGKRFIKLMKFLSQNLREKSQAEPYTKKHLEKKKNSINHTAEKKEFKPSLVKSAKMVKLLKMAICLEWIFLNTKRQINFMLCQFILWILLKYYQIKLHEVKKVRKTGFWMKIMSFAFLYTKIVFFKLKICKSQNLFILMLLQALLLVLFQNTIINLKRAKIKKYCLKMQMKKKSQKAEFKIKYLKNTFQHLEKQRLSLDKEKILKN

SEQ ID NO: 8100 - protein, 956 aa, synthetic construct
  REGION 1..956: note = Synthetic
VARILAFDIGISSIGWAFSENDELKDCGVRIFTKAENPKTGESLALPRRLARSARKRLARRKARLNHLKHLIANEFKLNYEDYQSFDESLAKAYKGSLISPYELRFRALNELLSKQDFARVILHIAKRRGYDDIKNSDDKEKGAILKAIKQNEEKLANYQSVGEYLYKEYFQKFKENSKEFTNVRNKKESYERCIAQSFLKDELKLIFKKQREFGFSFSKKFEEEVLSVAFYKRALKDFSHLVGNCSFFTDEKRAPKNSPLAFMFVALTRIINLLNNLKNTEGILYTKDDLNTLLNEVLKNGTLTYKQTKKLLGLSDDYEFKGEKGTYFIEFKKYKEFIKALGEHNLSQDDLNEIAKDITLIKDEIKLKKALAKYDLNQNQIDSLSKLEFKDHLNISFKALKLITPLMLEGKKYDEACNELNLKVAINEDKKDFLPAFNETYYKDEVTNPVVLRAIKEYRKVLNALLKKYGKVHKINIELAREVGKNYSQRAKIEKEQNENYKAKKDAELECEKLGLKINSKNILKLRLFKEQKEFCAYSGEKIKISDLQDEKMLEIDHIYPYSRSFDDSYMNKVLVFTKQNQEKLNKTPFEAFGNDSTKWQKIEVLAKNLPEKSKKEFIKTIKTKSKKTLKIEITILATSQGLFTTLKIIIFYLAMMKIQSTTHKKAQKCMKQKAVCLHRLDTLGALALRIEITIFITPSMQLLLMQTTLSRLFQILKKSKKATVQNFMQKKLVNIIKTKGSFLSLLVVLGKRFIKLMKFLSQNLREKSQAELYMKKHLEKKKNSINHTAEKKEFKPSLVKSAKMVKLKMAICLEWIFLNTKRQINFMLCQFILWILLKYYQIKLHEVKKVRKTGFWMKIMSFAFLYTKIVFFKLKICKSQNLFIIMLLQALLLVLFQNTIINLKRAKIKKYCLKMQMKKKSQKAEFKIKYLKNTFQHLGKLQRLSLDKEKILKN

SEQ ID NO: 8101 - protein, 959 aa, synthetic construct
  REGION 1..959: note = Synthetic
VARILAFDIGISSIGWAFSENDELKDCGVRIFTKAENPKTGESLALPRRLARSARKRLARRKARLNHLKHLIANEFKLNYEDYQSFDESLAKAYKGSLISPYELRFRALNELLSKQDFARVILHIAKRRGYDDIKNSDDKEKGAILKAIKQNEEKLANYQSVGEYLYKEYFQKFKENSKEFTNVRNKKESYERCIAQSFLKDELKLIFKKQREFGFSFSKKFEEEVLSVAFYKRALKDFSHLVGNCSFFTDEKRAPKNSPLAFMFVALTRIINLLNNLKNTEGILYTKDDLNALLNEVLKNGTLTYKQTKKLLGLSDDYEFKGEKGTYFIEFKKYKEFIKALGEHNLSQDDLNEIAKDITLIKDEIKLKKALAKYDLNQNQIDSLSKLEFKDHLNISFKALKLITPLMLEGKKYDEACNELNLKVAINEDKKDFLPAFNETYYKDEVTNPVVLRAIKEYRKVLNALLKKYGKVHKINIELAREVGKNHSQRAKIEKEQNENYKAKKDAELECEKLGLKINSKNILKLRLFKEQKEFCAYSGEKIKISDLQDEKMLEIDHIYPYSRSFDDSYMNKVLVFTKQNQEKLNKTPFEAFGNDSAKWQKIEVLAKNLPTKKQKRILDKNYKDKEQKDFKDRNLNDTRYIARLVLTTLKIIIFYLAMMKIQSTTHKKAQKCMKQKAVCLHRLDTLGALALRIEITIFITPSMQLLLMQTTLSRLFQILKKSKKATVQNFMQKKLVNIIKTKGSFLSLLVVLGKRFIKLMKFLSQNLREKSQVELYMKKHLEKKKNSINHTAEKKEFKPSLVKSAKMVKLKMAICLEWIFLNTKRQINFMLCQFILWILLKYYQIKLHEVKKVRKTGFWMKIMSFAFLYTKIVFFKLKICKSQNLFIIMLLQALLLVLFQNTIINLKRAKIKKYCLKMQMKKKSQKAEFKIKYLKNTFQHLGKLQRLSLDKEKILKN

SEQ ID NO: 8102 - protein, 955 aa, synthetic construct
  REGION 1..955: note = Synthetic
VARILAFDIGISSIGWAFSENDELKDCGVRIFTKAENPKTGESLALPRRLARSARKRLARRKARLNHLKHLIANEFKLNYKDYQSFDESLAKAYKGSLISPYELRFRALNELLNKQDFARVILHIAKRRGYDNIKNSDNEEKSEILKAIKQNEEKLANYQSVGEYLYKEYFQKFKENSKEFINVRNKKESYERCIAQSFLKDELKLIFKKQREFGFSFSKKFEEEVLSVAFYKRALKDFSHLVGNCSFFTDEKRAPKNSPLAFMFVALTRIINLLNNLKNTEGILYTKDDLNTLLNEVLKNGTLTYKQTKKLLGLSDDYEFKGEKGTYFIEFKKYKEFIKALGDHSLSQDDLNEIAKDITLIKDEIKLKKALAKYDLNQNQIDSLSKLEFKDHLNISFKALKLITPLMLEGKKYDEACNELNLKVAINEDKKDFLPAFNETYYKDEVTNPVVLRAIKEYRKVLNALLKKYGKVHKINIELAREVGKNHSQRAKIEKEQNENYKAKKDAELECEKLGLKINSKNILKLRLFKEQKEFCAYSGEKIKISDLQDEKMLEIDHIYPYSRSFDDSYMNKVLVFTKQNQEKLKKPPLKPLAMIVQNGRKLKFWQKIYLKKSKKEFIKTIKTKSKKTLKIEITILATSQGLFTILKIIIFYLEMMKIQSTTHKKAQKCMKQKAVCHRLDTLGALALRIEIIIFITPSMQLLLMQITLSRLFQILKKSKKATVQNFMQKKLVNIIKTKGSFLSLLVVLGKRFIKLMKFLSQNLREKSQAEPYTKKHLEKKKNSINHTAEKKEFKPSLVKSAKMVKLLKMAICLEWIFLNTERQINFMLCQFILWILPKYCQIKLQEVKKVRKTGFWMKIMSFAFLYTKIVFFKLKICKSQNLFILMLLQALLLVLFQNTIINLKRAKIKKYCLKMQMKKKSQKAEFKIKYLKNTFQHLEKQRLSLDKEKILKN

SEQ ID NO: 8103 - protein, 966 aa, synthetic construct
  REGION 1..966: note = Synthetic
VARILAFDIGISSIGWAFSENDELKDCGVRIFTKAENPKTGESLALPRRLARSARKRLARRKARLNHLKHLIANEFKLNYEDYQSFDKSLAKAYKGSLISPYELRFRALNELLSKQDFARVILHIAKRRGYDDIKNSDDKEKGAILKAIKQNEEKLANYQSVGEYLYKEYFQKFKENSKEFTNVRNKKESYERCIAQSFLKDELKLIFKKQREFGFSFSKKFEEEVLSVAFYKRALKDFSHLVGNCSFFTDEKRAPKNSPLAFMFVALTRIINLLNNLKNTEGILYTKDDLNALLNEVLKNGTLTYKQTKKLLGLSDDYEFKGEKGTYFIEFKKYKEFIKALGDHSLSQDDLNEIAKDITLIKDEIKLKKALVKYDLNQNQIDSLSKLEFKDHLNISFKALKLITPLMLEGKKYDEACNELNLKVAINEDKKDFLPAFNETYYKDEVTNPVVLRAIKEYRKVLNALLKKYGKVHKINIELAREVGKNYSQRAKIEKEQNENYKAKKDAELECEKLGLKINSKNILKLRLFKEQKEFCAYSGEKIKISDLQDEKMLEIDHIYPYSRSFDDSYMNKVLVFTKQNQEKLNQTPFEAFGNDSAKWQKIEVLAKNLPTKKQKRILDKNYKDKEQKDFKDRNLNDTRYIARLVLNYTKDYLDFLPLSDDENTKLNDTQKGSKVHVEAKSGMLTSALRHTWGFSAKDRNNHLHHAIDAVIIAYANNSIVKAFSDFKKEQESNSAELYAKKLVNIIKTKGSFLSLLVVLGKRFIKLMKFLSQNLREKSQVELYMKKHLEKKKNSINHTAEKKEFKPSLVKSAKMVKLKMAICLEWIFLNTKRQINFMLCQFILWILLKYYQIKLHEVKKVRKTGFWMKIMSFAFLYTKIVFFKLKICKSQNLFILMLLQALLLVLFQNTIINLKRAKIKKYCLKMQMKKKSQKAEFKIKYLKNTFQHLGKLQRLSLDKEKILKN

SEQ ID NO: 8104 - protein, 955 aa, synthetic construct
  REGION 1..955: note = Synthetic
VARILAFDIGISSIGWAFSENDELKDCGVRIFTKAENPKTGESLALPRRLARSARKRLARRKARLNHLKHLIANEFKLNYEDYQSFDESLAKAYKGSLISPYELRFRALNELLSKQDFARVILHIAKRRGYDDIKNNGDEEKSEILKAIKQNEEKLVNYQSVGEYLYKEYFQKFKENSKEFINVRNKKESYERCITQSFLKDELKLIFQKQREFGFSFSKKFEEEVLSVAFYKRALKDFSHLVGNCSFFTDEKRAPKNSPLAFMFVALTRIINILNNLKNTEGILYTKDDLNALLNEVLKNGTLTYKQTKKLLGLSDDYEFKGEKGTYFIEFKKYKEFIKALGEHNLSQDDLNEIAKDITLIKDEIKLKKALAKYDLNQNQIDSLSKLEFKDHLNISFKALKLITPLMLEGKKYDEACNELNLKVAINEDKKDFLPAFNETYYKDEVTNPVVLRAIKEYRKILNALLKKYGKVHKINIELAREVGKNHSQRAKIEKEQNENYKAKKDAEIECEKLGLKINSKNILKLRLFKEQKEFCAYSGEKIKLSDLQDEKMLEIDHIYPYSRSFDDSYMNKVLVFTKQNQEKLNKTPFEAFGNDSTKWQKIEVLAKNLPEKSKKEFIKITKTKSKKTLKIEITILATSQGLFTTLKIIIFYLAMMKIQNTIRKKAQKCMKQKAVCHRLGTLGALALRIETTIFITPSMQQLLLMQTILSRLFQILKKSKKATVNFMQKKLVNIIKTKGSFLSLLVVLGKRFIKLMKFLSQNLREKSQVELYMKKHLEKKKNSINHTAEKKEFKPSLVKSAKMVKLLKMAICLEWIFLNTKRQINFMLCQFILWILLKYYQIKLREVKKVRKTGFWMKIMSFAFLYTKIVFFKLKICKSQNLFILMLLQALLLVLFQNTIINLKRAKIKKYCLKMQMKKKSQKAEFKIKYLKNTFQHLEKQRLSLDKEKILKN

SEQ ID NO: 8105 - protein, 958 aa, synthetic construct
  REGION 1..958: note = Synthetic
VARILAFDIGISSIGWAFSENDELKDCGVRIFTKAENPKTGESLALPRRLARSARKRLARRKARLNHLKHLIANEFKLNYEDYQSFDESLAKAYKGSLISPYELRFRALNELLSKQDFARVILHIAKRRGYDDIKNSDDKEKGAILKAIKQNEEKLANYQSVGEYLYKEYFQKFKENSKEFTNVRNKKESYERCIAQSFLKDELKLIFKKQREFGFSFSKKFEEEVLSVAFYKRALKDFSHLVGNCSFFTDEKRAPKNSPLAFMFVALTRIINLLNNLKNTEGILYTKDDLNALLNEVLKNGTLTYKQTKKLLGLSDDYEFKGEKGTYFIEFKKYKEFIKALGDHSLSQDDLNEIAKDITLIKDEIKLKKALAKYDLNQNQIDSLSKLEFKDHLNISFKALKLITPLMLEGKKYDEACNELNLKVAINEDKKDFLPAFNETYYKDEVTNPVVLRAIKEYRKVLNALLKKYGKVHKINIELAREVGKNHSQRAKIEKEQNENYKAKKDAELECEKLGLKINSKNILKLRLFKEQKEFCAYSGEKIKISDLQDEKMLEIDHIYPYSRSFDDSYMNKVLVFTKQNQEKLNQTPFEAFGNDSAKWQKIEVLAKNLPTKKQKRILDKNYKDKEQKDFKDRNLNDTRYIARLVTTLKIIIFYLAMMKIQSTTHKKAQKCMKQKAVCLHRLDTLGALALRIEITIFITPSMQLLLMQTTLSRLFQILKKSKKATVQNFMQKKLVNIIKTKGSFLSLLVVLGKRFIKLMKFLSQNLREKSQAELYMKKHLEKKKNSINHTAEKKEFKPSLVKSAKMVKLKMAICLEWIFLNTKRQINFMLCQFILWILLKYYQIKLHEVKKVRKTGFWMKIMSFAFLYTKIVFFKLKICKSQNLFIIMLLQALLLVLFQNTIINLKRAKIKKYCLKMQMKKKSQKAEFKIKYLKNTFQHLGKLQRLSLDKEKILKN

SEQ ID NO: 8106 - protein, 956 aa, synthetic construct
  REGION 1..956: note = Synthetic
VARILAFDIGISSIGWAFSENDELKDCGVRIFTKAENPKTGESLALPRRLARSARKRLARRKARLNHLKHLIANEFKLNYEDYQSFDESLAKAYKGSLISPYELRFRALNELLSKQDFARVILHIAKRRGYDDIKNNGDEEKGKILKAIKQNEEKLVNYQSVGEYLYKEYFQKFKENSKEFINVRNKKESYERCITQSFLKYELKLIFQKQREFGFSFSKKFEEEVLSVAFYKRALKDFSHLVGNCSFFTDEKRAPKNSPLAFMFVALTRIINILNNLKNTEGILYTKDDLNALLNEVLKNGTLTYKQTKKLLGLSDDYEFKGEKGTYFIEFKKYKEFIKALGEHNLSQDDLNEIAKDITLIKDEIKLKKALAKYDLNQNQIDSLSKLEFKDHLNISFKALKLITPLMLEGKKYDEACNELNLKVAINEDKKDFLPAFNETYYKDEVTNPVVLRAIKEYRKVLNALLKKYGKVHKINIELAREVGKNYSQRAKIEKEQNENYKAKKDAELECEKLGLKINSKNILKLRLFKEQKEFCAYSGEKIKISDLQDEKMLEIDHIYPYSRSFDDSYMNKVLVFTKQNQEKLNKTPFEAFGNDSTKWQKIEVLAKNLPEKSKKEFIKTIKTKSKKTLKIEITILATSQGLFTILKIIIFYLAMMKIQSTTHKKAQKCMKQKAVCHRLGTLGALALRIEIIIFITLLMQLLLMQTTLSRLFLILKKSKKATVQNFMQKKLVNIIKTKGSFLSLLVVLGKRFIKLMKFLSQNLREKSQAEPYTKKHLEKKKNSINHTAEKKEFKPSLVKSAKMVKLLKMAICLEWIFLNTKRQINFMLCQFILWILLKYYQIKLHEVKKVRKTGFWMKIMSFAFLYTKIVFFKLKICKSQNLFILMLLQALLLVLFQNTIINLKRAKIKKYCLKMQMKKKSQKAEFKIKYLKNTFQHLGKLQRLSLDKEKILKN

SEQ ID NO: 8107 - protein, 968 aa, synthetic construct
  REGION 1..968: note = Synthetic
VARILAFDIGISSIGWAFSENDELKDCGVRIFTKAENPKTGESLALPRRLARSARKRLARRKARLNHLKHLIANEFKLNYEDYQSFDESLAKAYKGSLISPYELRFRALNELLSKQDFARVILHIAKRRGYDDIKNNGDEEKSEILKAIKQNEEKLVNYQSVGEYLYKEYFQKFKENSKEFINVRNKKESYERCITQSFLKDELKLIFQKQREFGFSFSKKFEEEVLSVAFYKRALKDFSHLVGNCSFFTDEKRAPKNSPLAFMFVALTRIINILNNLKNTEGILYTKDDLNALLNEVLKNGTLTYKQTKKLLGLSDDYEFKGEKGTYFIEFKKYKEFIKALGEHNLSQDDLNEIAKDITLIKDEIKLKKALAKYDLNQNQIDSLSKLEFKDHLNISFKALKLITPLMLEGKKYDEACNELNLKVAINEDKKDFLPAFNETYYKDEVTNPVVLRAIKEYRKILNALLKKYGKVHKINIELAREVGKNHSQRAKIEKEQNENYKAKKDAEIECEKLGLKINSKNILKLRLFKEQKEFCAYSGEKIKLSDLQDEKMLEIDHIYPYSRSFDDSYMNKVLVFTKQNQEKLNKTPFEAFGNDSTKWQKIEVLAKNLPEKKQKRILDKNYKDKEQKDFKDRNLNDTRYIARLVLNYTKDYLDFLPLSDDENTKLNDTQKGSKVHVEAKSGMLTSALRHTWGFSAKDRNNHLHHAIDAAIIAYANNSIVKAFSDFKKEQESNSVELYAKKISELDYKNKRKFFEPFSGFRQKVLDKIDEIFVSKPERKKPSGALHEETFRKEEEFYQSYGEKKEFKPSLVKSAKMVKLLKMAICLEWIFLNTKRQINFMLCQFILWILLKYYQIKLREVKKVRKTGFWMKIMSFAFLYTKIVFFKLKICKSQNLFILMLLQALLLVLFQNTIINLKRAKIKKYCLKMQMKKKSQKAEFKIKYLKNTFQHLEKQRLSLDKEKILKN

SEQ ID NO: 8108 - protein, 962 aa, synthetic construct
  REGION 1..962: note = Synthetic
VARILAFDIGISSIGWVFSENDELKDCGVRIFTKAENPKTGESLALPRRLARSARKRLARRKARLNHLKHLIANEFKLNYEDYQSFDESLAKAYKGSLISPYELRFRALNELLSKQDFARVILHIAKRRGYDDIKNNGDEEKSEILKAIKQNEEKLVNYQSVGEYLYKEYFQKFKENSKEFINVRNKKESYERCITQSFLKDELKLIFQKQRGFGFSFSKKFEEEVLSVAFYKRALKDFSHLVGNCSFFTDEKRAPKNSPLAFMFVALTRIINLLNNLKNTEGILYTKDDLNALLNEVLKNGTLTYKQTKKLLGLSDDYEFKGEKGTYFIEFKKYKEFIKALDEHSLSQDDLNEIAKDITLIKDEIKLKKALAKYDLNQNQIDSLSKLEFKDHLNISFKALKLITPLMLEGKKYDEACNELNLKVAINEDKKDFLPAFNETYYKDEVTNPVVLRAIKEYRKILNALLKKYGKVHKINIELAREVGKNHSQRAKIEKEQNENYKAKKDAEIECEKLGLKINSKNILKLRLFKEQKEFCAYSGEKIKISDLQDEKMLEIDHIYPYSRSFDDSYMNKVLVFTKQNQEKLNKTPFEAFGNDGVKWQKIEVLAKNLPEKKQKRILDKNYKDKEQKDFKDRNLNDTRYIARLVLNYTKDYLDFLPLSDDENTKLTIRKKAQKCMKQKAVCHRLDTLGALALRIEIIIFITPSMQQLLFMQTTLSRLFQILKKSKKATVQNFMQKKLVNIIKTKGSFLSLLVVLGKRFIKLMKFLSQNLREKSQVELYMKKHLEKKKNSINHTAEKKEFKPSLVKSAKMVKLKMAICLEWIFLNTKRQINFMLCQFILWILLKYYQIKLHEVKKVRKTGFWMKIMSFAFLYTKIVFFKLKICKSQNLFILMLLQALLLVLFQNTIINLKRAKIKKYCLKMQMKKKSQKAEFKIKYLKNTFQHLGKLQRLSLDKEKILKN

SEQ ID NO: 8109 - protein, 954 aa, synthetic construct
  REGION 1..954: note = Synthetic
VARILAFDIGISSIGWAFSESDELKDCGVRIFTKAENPKTGESLALPRRLARSARKRLARRKARLNHLKHLIANEFKLNYEDYQSFDESLAKAYKGSLISPYELRFRALNELLNKQDFARVILHIAKRRGYDDIKNSDDEEKGKILKAIKQNEEKLVNYQSVGEYLYKEYFQKFKENSKEFINVRNKKESYERCITQSFLKDELKLIFQKQREFGFSFSKKFEEEVLSVAFYKRALKDFSHLVGNCSFFTDEKRAPKNSPLAFMFVALTRIINLLNNLKNTEGILYTKDDLNALLNEVLKNGTLTYKQTKKLLGLSDDYEFKGEKGTYFIEFKKYKEFIKALDEHSLSQDDLNEIAKDITLIKDEIKLKKALAKYDLNENQIDSLSKLEFKDHLNISFKALKLITPLMLEGKKYDEACNELNLKVAINEDKKDFLPAFNETYYKDEVTNPVVLRAIKEYRKVLNALLKKYGKVHKINIELAREVGKNHSQRAKIEKEQNENYKAKKDAELECEKLGLKINSKNILKLRLFKEQKEFCAYSGEKIKLSDLQDEKMLEIDHIYPYSRSFDDSCMNKVLVFTKQNQEKLNKTPFEAFGNDSTKWQKIEVLAKNLPEKKQKRILDKNYKDKEQKDFKDRNLNDTRYIARLVLNYTKDYLDFLPLSDDENTKLNDTQKGSKVHLEAKSGMLTSALRHTWGFSTKDRNNHLHHAIDAVIIAYANNSIIKAFSDFKKEQESNSAELYAKKISELDYKNKRKFFEPFSGFRQKVLDKIDEIFVSKPERKKPSGALHTAEKKEFKPSLVKSAKMVKLLKMAICLEWIFLNTKRQINFMLCQFILILLKYYQIKLHEVKKVRKTGFWMKIMSFAFLYTKIVFFKLKICKSQNLFILMLLQALLLVLFQNTIINLKRAKIKKYCLKMQMKKKSQKAEFKIKYLKNTFQHLEKQRLSLDKEKILKN

SEQ ID NO: 8110 - protein, 1025 aa, synthetic construct
  REGION 1..1025: note = Synthetic
MKVLGFDIGITSIGWAYVEGNELQDCGVRIFTQAENPKTGAPLALPRREARSTRRRLARRKGRLYALKQLICKEFGLNVDDYLSDDGDLPKAYINTKDTKSPYELRTLALTQRLEHKDLARVILHIAKHRGYGNKHAREMDNAKQSENGKIKAAIEANKRILDEKGYKSVGEYLYKTFYQQERSDSEKKGSTNSKEFQNVRNRGEGYYQRCVAQSELKAELELILHTQNTLGVRLAENFCQKIIDIAFYQRELKDFSDKVGKCVFYEEENRAAKNTLSAMEFIVLTRIINTLQSISKQSGEVYGKDMITQILHIVLEKGEINYKALREILQLPESMRFPKDSKLDYTKELSVAEKAAFIEFKNFKAFKKALSGSFDGLLRMDLDEIATYITLIKDKIKLKSALERYALADTQKESLSTLSFAGHINLSLKALEQILPFMREGLKYDEAVRQAGLKEWRKRAQKDNLLSPLNEYEPYLANPVVARAMSEYRKVLNSLLKKYGQMHKIHIEFTREVGRSFKERNNIIKEQREQFAKNEKAKKQCEILGLPLSAINILKVKLWLEQGEFCVYSGEKITRAHLLNSQILQIDHIYPYSRSFDDSYLNKVLCFTKENQNKHNKTPFEAFGGDTKKWEQIKSYSLKLPKPKQRRICNEHFVEKESGFIPRNLNDTSYIARLCANWTKDCLEFLPLSESEVTISGEKGSKVHIEVVSGNLTAMLRHYWGLGEKDRDNHLHHAFDAIIIAFSNAKMIKAFSDFKKQRELNRARFYAKEMAEADYKKQKVFFEPMAYFRERVLAKVDSIFVSKPPRKRARRALHEETFYSFGDKALMKQYGGQKGIEKAIALGKIRRIGTKIVKNGNMVRVDIFKHKQNGKFYGVPIYTMDFALGILPNKAVVSGKDKEEVIKDWLEMDNSYEFCFSLFKDDLILVQKKDMEKAELCYFVSFDSALAQIQVEKHNNKLEGLSDNEKLLYTNATKEKVVGKSIGIQNLKIFEKYQVSSLGEVQKADFTPRQNIALKLSPKYKKRG

SEQ ID NO: 8111 - protein, 844 aa, synthetic construct
  REGION 1..844: note = Synthetic
LEKYQSVGEYFYKEFFQKYRENTKDFINIRNKEGSYENCVLASDLEKELKLILEKQKEWGYSYNDNFIKEILKVAFFQRPLKDFSYLVGACTFFEDEKRACKNSYSAWEFVALTKIINELKSLEKESGELVSNQIINEILNHILDKGSITYKKFREYIKLHESMKFKSLKYDKDNVESTKLIEFRKLVEFKKALGEHSLSREELDQIATYITLIKDNEKLKITLEKYSLNNEQIKNLLEIDFNDHINLSFKALNLILPLMKEGKRYDEACKLLNLKTKSNNQKFDFLPAFCDSIFAQELTNPIVNRAISEYRKVLNALLKKYGKMHKIHIELARDIGLSKKLRAKIEKEQKENYENNIWALNECENFGLKANTKNILKLKLWKEQKEFCIYSGKKISIEHLRDEKALEVDHIYPYSRSFDDSFLNKVLVFTKENQEKLNKTPFEAFGANEERWSKIQALAQNLPYKKKNKILDEAFKGKQQQDFISRNLNDTRYISTLIVKYTKEYLDFLPLDEKEDINLKSGEKGSKIHVQTINGMLTSVLRHTWGFAQKDRNNHLHHALDATIVAYSTNAIIKAFSDFKKEQELLKAKLYAKELTSDSYKHQAKFFEPFEGFREQILNQINKLFVSKPPRKRARGALHKETFYPKDEMIKKYNSQEGLEIALNCGKIRKTGTKYVENDTMVRIDIFKKQNKIYAIPIYTMDFALGVLPNKIVIAGKDKKGNPKQWQEIDESYEFCFSLHKDDLVLIQKKDMQEPEFAYYNGFDISNSSICVEKHDNKFENLTDNQRLLFTNAKEGSVKAEKLGIQGLRIFEKYIITPLGEKIKADFKPREDIALKTSKKHGL

SEQ ID NO: 8112 - protein, 835 aa, synthetic construct
  REGION 1..835: note = Synthetic
LQKGGGYDDIKNNGDEEKSEILKAIKQNEEKLVNYQSVGEYLYKEYFQKFKENSKEFINVRNKKESYERCIAQSFLKDELKLIFQKQREFGFSFSKKFEEEVLSVAFYKRALKDFSHLVGNCSFFTDEKRAPKNSPLAFMFVALTRIINLLNNLKNTEGILYTKDDLNTLLNEVLKNGTLTYKQTKKLLGLSDDYEFKGEKGTYFIEFKKYKEFIKALGEHNLSQDNLNEIAKDITLIKDEIKLKKALAKYDLNQNQIDSLSKLEFKDHLNISFKALKLITPLMLEGKKYDEAYNELNLKVAINEDKKDFLPAFNETYYKDEVTNPVVLRAIKEYRKVLNALLKKYGKVHKINIELAREVGKNHSQRAKIEKEQNENYKAKKDAELECEKLGLKINSKNILKLRLFKEQKEFCAYSGEKIKISDLQDEKMLEIDHIYPYSRSFDDSYMNKVLVFTKQNQEKLNQTPFEAFGNDSAKWQKIEVLAKNLPTKKQKRILDKNYKDKEQKDFKDRNLNDTRYIARLVLNYTKDYLDFLPLSDDENTKLNDTQKGSKVHVEAKSGMLTSALRHTWGFSAKDRNNHLHHAIDAVIIAYANNSIVKAFSDFKKEQESNSAELYAKKISELDYKNKRKFFEPFSGFRQKVLDKIDEIFVSKPERKKPSGALHEETFRKEEEFYQSYGGKEGVLKALELGKIRKVNGKIVKNGDMFRVDIFKHKKTNKFYAVPIYTMDFALKVLPNKAVVQGKDKKSGLIKDWILMDENYEFCFSLYKDSLILIQTKDMQEPELVYFNAFTSSTVSLIVSKHDNKFETLSKNQKILFKNANEKEVIAKSIGFKI

SEQ ID NO: 8113 - protein, 826 aa, synthetic construct
  REGION 1..826: note = Synthetic
VGEYLYKEYFQKFKENSKEFINVRNKKESYERCIAQSFLKDELKLIFQKQREFGFSFSKKFEEEVLSVAFYKRALKDFSHLVGNCSFFTDEKRAPKNSPLAFMFVALTRIINLLNNLKNTEGILYTKDDLNTLLNEVLKNGTLTYKQTKKLLGLSDDYEFKGEKGTYFIEFKKYKEFIKALGEHNLSQDNLNEIAKDITLIKDEIKLKKALAKYDLNQNQIDSLSKLEFKDHLNISFKALKLITPLMLEGKKYDEAYNELNLKVAINEDKKDFLPAFNETYYKDEVTNPVVLRAIKEYRKVLNALLKKYGKVHKINIELAREVGKNHSQRAKIEKEQNENYKAKKDAELECEKLGLKINSKNILKLRLFKEQKEFCAYSGEKIKISDLQDEKMLEIDHIYPYSRSFDDSYMNKVLVFTKQNQEKLNQTPFEAFGNDSAKWQKIEVLAKNLPTKKQKRILDKNYKDKEQKDFKDRNLNDTRYIARLVLNYTKDYLDFLPLSDDENTKLNDTQKGSKVHVEAKSGMLTSALRHTWGFSAKDRNNHLHHAIDAVIIAYANNSIVKAFSDFKKEQESNSAELYAKKISELDYKNKRKFFEPFSGFRQKVLDKIDEIFVSKPERKKPSGALHEETFRKEEEFYQSYGGKEGVLKALELGKIRKVNGKIVKNGDMFRVDIFKHKKTNKFYAVPIYTMDFALKVLPNKAVVQGKDKKSGLIKDWILMDENYEFCFSLYKDSLILIQTKDMQEPEFVYFNAFTSSTVSLIVSKHDNKFETLSKNQKILFKNANEKEVIAKSIGIQNLKVFEKYIVSALGEVTKAEFRQREDFKK

SEQ ID NO: 8114 - protein, 820 aa, synthetic construct
  REGION 1..820: note = Synthetic
MNYKEYFQKFKENSKEFTNVRNKKESYERCIAQSFLKDELKLIFKKQREFGFSFSKKFEEEVLSVAFYKRALKDFSHLVGNCSFFTDEKRAPKNSPLAFMFVTLTRIINLLNNLKNTEGILYTKDDLNALLNEVLKNGTLTYKQTKKLLGLSDDYEFKGEKGTYFIEFKKYKEFIKALGEHNLSQDDLNEIAKDITLIKDEIKLKKALAKYDLNQNQIDSLSKLEFKDHLNISFKALKLITPLMLEGKKYDEACNELNLKVAINEDKKDFLPAFNETYYKDEVTNPVVLRAIKEYRKVLNALLKKYGKVHKINIELAREVGKNHSQRAKIEKEQNENYKAKKDAELECEKLGLKINSKNILKLRLFKEQKEFCAYSGEKIKISDLQDEKMLEIDHIYPYSRSFDDSYMNKVLVFTKQNQEKLNKTPFEAFGNDSAKWQKIEVLAKNLPTKKQKRILDKNYKDKEQKDFKDRNLNDTRYIARLVLNYTKDYLDFLPLSDDENTKLNDTQKGSKVHVEAKSGMLTSALRHTWGFSTKDRNNHLHHAIDAVIIAYANNSIVKAFSDFKKEQESNSAELYAKKISELDYKNKRKFFEPFSGFRQKVLDKIDEIFVSKPERKKPSGALHEETFRKEEEFYQSYGGKEGVLKALELGKIRKVNGKIVKNGDMFRVDIFKHKKTNKFYAVPIYTMDFALKVLPNKAVARSKKGEIKDWILMDENYEFCFSLYKDSLILIQTKDMQEPEFVYYNAFTSSTVSLIVSKHDNKFETLSKNQKILFKNANEKEVIAKSIGIQNLKVFEKYIVSALGEVTKAEFRQREDFKK

SEQ ID NO: 8115 - protein, 802 aa, synthetic construct
  REGION 1..802: note = Synthetic
VARILAFDIGISSIGWAFSENDELKDCGVRIFTKAENPKTGESLALPRRLARSARKRLARRKARLNHLKHLIANEFKLNYEDYQSFDESLAKAYKGSLISPYELRFRALNALLNEVLKNGTLTYKQTKKLLGLSDDYEFKGEKGTYFIEFKKYKEFIKALGEHNLSQDDLNEIAKDITLIKDEIKLKKALAKYDLNQNQIDSLSKLEFKDHLNISFKALKLITPLMLEGKKYDEACNELNLKVAINEDKKDFLPAFNETYYKDEVTNPVVLRAIKEYRKILNALLKKYGKVHKINIELAREVGKNHSQRAKIEKEQNENYKAKKDAEIECEKLGLKINSKNILKLRLFKEQKEFCAYSGEKIKLSDLQDEKMLEIDHIYPYSRSFDDSYMNKVLVFTKQNQEKLNKTPFEAFGNDSTKWQKIEVLAKNLPEKKQKRILDKNYKDKEQKDFKDRNLNDTRYIARLVLNYTKDYLDFLPLSDDENTKLNDTQKGSKVHVEAKSGMLTSALRHTWGFSAKDRNNHLHHAIDAAIIAYANNSIVKAFSDFKKEQESNSVELYAKKISELDYKNKRKFFEPFSGFRQKVLDKIDEIFVSKPERKKPSGALHEETFRKEEEFYQSYGGKEGVLKALELGKIRKVNGKIVKNGDMFRVDIFKHKKTNKFYAVPIYTMDFALKVLPNKAVARSKKGEIKDWILMDENYEFCFSLYKDSLILIQTKDMQEPELVYFNAFTSSTVSLIVSKHDNKFETLSKNQKILFKNANEKEVIAKSIGIQNLKVFEKYIVSALGEVTKAEFRQREDFKK

SEQ ID NO: 8116 - protein, 771 aa, synthetic construct
  REGION 1..771: note = Synthetic
LAFLFQKKFEEEVLSVAFYKRALKDFSHLVGNCSFFTDEKRAPKNSPLAFMFVALTRIINLLNNLKNTEGILYTKDDLNALLNEVLKNGTLTYKQTKKLLGLSDDYEFKGEKGTYFIEFKKYKEFIKALGDHSLSQDDLNEIAKDITLIKDEIKLKKALAKYDLNQNQIDSLSKLEFKDHLNISFKALKLITPLMLEGKKYDEACNELNLKVAINEDKKDFLPAFNETYYKDEVTNPVVLRAIKEYRKVLNALLKKYGKVHKINIELAREVGKNYSQRAKIEKEQNENYKAKKDAELECEKLGLKINSKNILKLRLFKEQKEFCAYSGEKIKISDLQDEKMLEIDHIYPYSRSFDDSYMNKVLVFTKQNQEKLNQTPFEAFGNDSAKWQKIEVLAKNLPTKKQKRILDKNYKDKEQKDFKDRNLNDTRYIARLVLNYTKDYLDFLPLSDDENTKLNDTQKGSKVHVEAKSGMLTSALRHTWGFSTKDRNNHLHHAIDAVIIAYANNSIVKAFSDFKKEQESNSAELYAKKISELDYKNKRKFFEPFSGFRQKVLDKIDEIFVSKPERKKPSGALHEETFRKEEEFYQSYGGKEGVLKALELGKIRKVNGKIVKNGDMFRVDIFKHKKTNKFYAVPIYTMDFALKVLPNKAVARSKKGEIKDWILMDENYEFCFSLYKDSLILIQTKDMQEPEFVYYNAFTSSTVSLIVSKHDNKFETLSKNQKILFKNANEKEVIAKSIGIQNLKVFEKYIVSALGEVTKAEFRQREDFKK

SEQ ID NO: 8117 - protein, 742 aa, synthetic construct
  REGION 1..742: note = Synthetic
LAFDIGISSIGWAFSENDELKDCGVRIFTKAENPKTGESLALPRRLARSARKRLARRKARLNHLKHLIANEFKLNYEDYQSFDESLAKAYKGSLISPYELRFRALNELLSKQDFARVILHIAKRRGYDDIKNSDDKEKGAILKAIKQNEEKLANYQSVGEYLYKEYFQKFKENSKEFTNVRNKKESYERCIAQSFLKDELKLIFKKQREFGFSFSKKFEEEVLSVAFYKRALKDFSHLVGNCSFFTDEKRAPKNSPLAFMFVALTRIINLLNNLKNTEGILYTKDDLNALLNEVLKNGTLTYKQTKKLLGLSDDYEFKGEKGTYFIEFKKYKEFIKALGDHSLSQDDLNEIAKDITLIKDEIKLKKALVKYDLNQNQIDSLSKLEFKDHLNISFKALKLITPLMLEGKKYDEACNELNLKVAINEDKKDFLPAFNETYYKDEVTNPVVLRAIKEYRKVLNALLKKYGKVHKINIELAREVGKNYSQRAKIEKEQNENYKAKKDAELECEKLGLKINSKNILKLRLFKEQKEFCAYSGEKIKISDLQDEKMLEIDHIYPYSRSFDDSYMNKVLVFTKQNQEKLNQTPFEAFGNDSAKWQKIEVLAKNLPTKKQKRILDKNYKDKEQKDFKDRNLNDTRYIARLVLNYTKDYLDFLPLSDDENTKLNDTQKGSKVHVEAKSGMLTSALRHTWGFSAKDRNNHLHHAIDAVIIAYANNSIVKAFSDFKKEQESNSAELYAKKLVN

SEQ ID NO: 8118 - protein, 742 aa, synthetic construct
  REGION 1..742: note = Synthetic
VGNCSFFTDEKRAPKNSPLAFMFVALTRIINLLNNLKNTEGILYTKDDLNALLNEVLKNGTLTYKQTKKLLGLSDDYEFKGEKGTYFIEFKKYKEFIKALGDHSLSQDDLNEIAKDITLIKDEIKLKKALAKYDLNQNQIDSLSKLEFKDHLNISFKALKLITPLMLEGKKYDEACNELNLKVAINEDKKDFLPAFNETYYKDEVTNPVVLRAIKEYRKILNALLKKYGKVHKINIELAREVGKNHSQRAKIEKEQNENYKAKKDAEIECEKLGLKINSKNILKLRLFKEQKEFCAYSGEKIKLSDLQDEKMLEIDHIYPYSRSFDDSYMNKVLVFTKQNQEKLNKTPFEAFGNDSTKWQKIEVLAKNLPEKKQKRILDKNYKDKEQKDFKDRNLNDTRYIARLVLNYTKDYLDFLPLSDDENTKLNDTQKGSKVHVEAKSGMLTSALRHTWGFSAKDRNNHLHHAIDAAIIAYANNSIVKAFSDFKKEQESNSVELYAKKISELDYKNKRKFFEPFSGFRQKVLDKIDEIFVSKPERKKPSGALHEETFRKEEEFYQSYGGKEGVLKALELGKIRKVNGKIVKNGDMFRVDIFKHKKTNKFYAVPIYTMDFALKVLPNKAVARSKKGEIKDWILMDENYEFCFSLYKDSLILIQTKDMQEPELVYFNAFTSSTVSLIVSKHDNKFETLSKNQKILFKNANEKEVIAKSIGIQNLKVFEKYIVSALGEVTKAEFRQREDFKK

SEQ ID NO: 8119 - protein, 724 aa, synthetic construct
  REGION 1..724: note = Synthetic
MFVALTRIINLLNNLKNTEGILYTKDDLNTLLNEVLKNGTLTYKQTKKLLGLSDDYEFKGEKGTYFIEFKKYKEFIKALGDHSLSQDDLNEIAKDITLIKDEIKLKKALAKYDLNQNQIDSLSKLEFKDHLNISFKALKLITPLMLEGKKYDEACNELNLKVAINEDKKDFLPAFNETYYKDEVTNPVVLRAIKEYRKVLNALLKKYGKVHKINIELAREVGKNHSQRAKIEKEQNENYKAKKDAELECEKLGLKINSKNILKLRLFKEQKEFCAYSGEKIKISDLQDEKMLEIDHIYPYSRSFDDSYMNKVLVFTKQNQEKLNQTPFEAFGNDSAKWQKIEVLAKNLPTKKQKRILDKNYKDKEQKNFKDRNLNDTRYIARLVLNYTKDYLDFLPLSDDENTKLNDTQKGSKVHVEAKSGMLTSALRHTWGFSAKDRNNHLHHAIDAVIIAYANNSIVKAFSDFKKEQESNSAELYAKKISELDYKNKRKFFEPFSGFRQKVLDKIDEIFVSKPERKKPSGALHEETFRKEEEFYQSYGGKEGVLKALELGKIRKVNGKIVKNGDMFRVDIFKHKKTNKFYAVPIYTMDFALKVLPNKAVARSKKGEIKDWILMDENYEFCFSLYKDSLILIQTKDMQEPELVYFNAFTSSTVSLIVSKHDNKFETLSKNQKILFKNANEKEVIAKSIGIQNLKVFEKYIVSALGEVTKAEFRQREDFKNELR

SEQ ID NO: 8120 - protein, 724 aa, synthetic construct
  REGION 1..724: note = Synthetic
MFVALTRIINLLNNLKNTEGILYTKDDLNTLLNEALKNGTLTYKQTKKLLGLSNDYEFKGEKGTYFIEFQKYKEFVKALGEHNLSQDDLNEIAKDITLIKDEIKLKKALAKYDLNQNQIDSLSKLEFKDHLNISFKALKLITPLMLEGKKYDEACNELNLKVAINEDKKDFLPAFNETYYKDEVTNPVVLRAIKEYRKVLNALLKKYGKVHKINIELAREVGKNHSQRAKIEKEQNENYKAKKDAELECEKLGLKINSKNILKLRLFKEQKEFCVYSGEKIKISDLQDEKMLEIDHIYPYSRSFDDSYMNKVLVFTKQNQEKLNKTPFETFGNDRVKWQKIEVLAKNLPTKKQKRILDKNYKDKEQKDFKDRNLNDTRYIARLVLNYTKDYLDFLPLSDDENTKLNDTQKGSKVHVEAKSGMLTSTLRHTWGFSTKDRNNHLHHAIDAAIIAYANNSIVKAFSDFKKEQESNTAELYAKKISELDYKNKRKFFEPFSGFRQKLLDKIDEIFVSKPERKKPSGALHEETFRKEEEFYQSYGGKEGVLKALELGKIRKVNGKMVKNGDMFRVDIFKHKKTNKFYAVPIYTMDFALKVLPNKAVVQGKDKKSGLIKDWILMDENYEFCFSLYKDSLILIQTKDMQEPELVYYERLDSSNASLTVSKHDNKFETLSKNQKILFKNANEKEVIAKSIGIQNLKVFEKYIVSALGEVTKAEFRQREDFKK

SEQ ID NO: 8121 - protein, 710 aa, synthetic construct
  REGION 1..710: note = Synthetic
VWASIFIKSIFKNSKKIPKKIPNVRNKKESYERCIAQSFLKDELKLIFKKQREFGFSFSKKFEEEVLSVAFYKRALKDFSHLVGNCSFFTDEKRAPKNSPLAFMFVALTRIINLLNNLKNTEGILYTKDDLNALLNEVLKNGTLTYKQTKKLLGLSDDYEFKGEKGTYFIEFKKYKEFIKALGEHNLSQDDLNEIAKDITLIKDEIKLKKALAKYDLNQNQIDSLSKLEFKDHLNISFKALKLITPLMLEGKKYDEACNELNLKVAINEDKKDFLPAFNETYYKDEVTNPVVLRAIKEYRKVLNALLKKYGKVHKINIELAREVGKNHSQRAKIEKEQNENYKAKKDAELECEKLGLKINSKNILKLRLFKEQKEFCAYSGEKIKISDLQDEKMLEIDHIYPYSRSFDDSYMNKVLVFTKQNQEKLNKTPFEAFGNDSAKWQKIEVLAKNLPTKKQKRILDKNYKDKEQKDFKDRNLNDTRYIARLVLNYTKDYLDFLPLSDDENTKLNDTQKGSKVHVEAKSGMLTSALRHTWGFSTKDRNNHLHHAIDAVIIAYANNSIVKAFSDFKKEQESNSAELYAKKISELDYKNKRKFFEPFSGFRQKVLDKIDEIFVSKPERKKPSGALHEETFRKEEEFYQSYGGKEGVLKALELGKIRKVNGKIVKNGDMFRVDIFKHKKTNKFYAVPIYTMDFALKVLPNKAVARSKKR

SEQ ID NO: 8122 - protein, 702 aa, synthetic construct
  REGION 1..702: note = Synthetic
MRKILKIDERIQFKEVDYTAKNPENKKFVEFKNLKKFCEILGAIVGDRALADSIARDMTLIKDEEELAQKLRGYGKFSQEQITQLSALHFSHHISLSLKALSEILPFMREGMRYDEACQEAKLQAKHNDKKSKFLPPFCESIYADELTNPVVHRAIAEYRKILNALIAKYGSVHKIHIELTRDVGKNFQEREKYKKEIESNYKARVQAMQECEKLGLTLSEGNILKLRLFREQNEICVYSGRKITLANLKEQGALEIDHILPYSRSSDDSYMNKVLVFTNENQNKGNKTPYEAFGGDSQKWGEIESLALRSGYPKKKAKRILDKGFGDREAGFKSRNIVDSGYIARLIANYTKEYLKFLPLDSHENTALIAGEKDSKIHVEAVKGMLTATMRHFWGLGSKNRYEHTHHAVDAIIIAYINAAMIQRFSQFRQNQESLKARFYAKELAKEEFKTQRAFFEPFSGFREQVLAKVGQIFVSRPPRKRARGALHEETFYSIDDKKLSETYGGKKGVQRALSLGKIRQIGTKIVANGPMVRVDIFKHTQSGRFYAVPIYTMDFALGILPNKAVVSGKDKDRIIKDWLEMDSCYEFCFSLFKDDVIEVQKRDMEKPELAYFVSLDASDGRIKVRHHCNDITKINENQKKLFSEAIEKEVVGRGSIQNLKVFKKYKVSPLGEIKEAKYEPRQPIALKTSPKKHRKQNNAQ

SEQ ID NO: 8123 - protein, 688 aa, synthetic construct
  REGION 1..688: note = Synthetic
VILHIAKRRGYDNIKNSDNEEKSEILKAIKQNEEKLANYQSVGEYLYKEYFQKFKENSKEFINVRNKKESYERCIAQSFLKDELKLIFKKQREFGFSFSKKFEEEVLSVAFYKRALKDFSHLVGNCSFFTDEKRAPKNSPLAFMFVALTRIINLLNNLKNTEGILYTKDDLNTLLNEVLKNGTLTYKQTKKLLGLSDDYEFKGEKGTYFIEFKKYKEFIKALGDHSLSQDDLNEIAKDITLIKDEIKLKKALAKYDLNQNQIDSLSKLEFKDHLNISFKALKLITPLMLEGKKYDEACNELNLKVAINEDKKDFLPAFNETYYKDEVTNPVVLRAIKEYRKVLNALLKKYGKVHKINIELAREVGKNHSQRAKIEKEQNENYKAKKDAELECEKLGLKINSKNILKLRLFKEQKEFCAYSGEKIKISDLQDEKMLEIDHIYPYSRSFDDSYMNKVLVFTKQNQEKLNKTPFEAFGNDSTKWQKIEVLAKNLPEKKQKRILDKNYKDKEQKDFKDRNLNDTRYIARLVLNYTKDYLDFLPLSDDENTKLNDTQKGSKVHVEAKSGMLTSALRHTWGFSTKDRNNHLHHAIDAVIIAYANNSIVKAFSDFKKEQESNSAELYAKKISELDYKNKRKFFEPFSGFRQKVLDKIDEIFVSKPERKKPSGALHEETFRKEEEFYQSYGEKKEF

SEQ ID NO: 8124 - protein, 1067 aa, synthetic construct
  REGION 1..1067: note = Synthetic
MKILGFDIGIASVGWAYVEENELRDCGVRIFTKAENSTGESLALPRREARGTRRRLKRRKQRLNELKRLLCKQFNFNLNDYCSNDGELAKAYQTTKDTKSPYELRALALEQKLDSKDLVRVILHIAKHRGYGNKHAKRDLEAEEKIKAKIEKEDQEITQKATQEKQSTTTKGDSKKEQEQVLKALYRNETALKHYQTVGQYFYKEFKEKGQRIRNTTNNYQHTMRQDWLKKELELIFEKQKEFGAKFSEGFENKIIEIAFFQRDLKSFEDKVGQCTFYPNEPRAPKDSLSAIEFVTLTRIINTLKNLEEKSKNLGIGEVYGKDKIKEILNIVLDKGEISYKKLREILGLNEQITFKDNKLDYAKDMKEEQKVKLIEFKNLKDFKKAIGGSFQAFGSFETFDRKELDLIATDIAVIKSRENLAKKLENYPSLTQEQRESLSELNFSKHINLSLRALEKILPFMREGLRYNEAVEKAGLQEHRKHKQKSDFLPPLQDYEPYLANPVVERALSEYRKVLNALLRKYGQVHKIHLEFTREAKLSSKERQKYEKEQRENFARNQEAEKQCEAIGLPLNDAKNILKMKLWIEQRQLCAYSGEKITIEHLKDSTMLEIDHIYPYSRSYDDSYNNKVLCLARENQNKGNHTPFEAFGKDTEKWDRILSLASKLPKPKYRRISNKQFKDKEAGFLARNIVDTSYIARLASEYTKHSLNFLPLSEDEVMITGEKDSKKHVEVVSGSLTATLRHYWGLGGKNGDKDRDNHLHHVVDAIIIAYTNAKVIKAFSDFRKLQEQNRAKFYAKEIAQSKDKTKKGFEPPCENFRNKIQEKVDSIFVSKPPRKRARGALHEETFYSLNDASLLKSYGGQEGVQRALELGKIRRIGTKVVSNGEMKRVDIFKDKKGKFYGVPIYTMDFALGILPNKAVISGKKDGVIKDWLEMDSNYEFCFSLFKDDLILVQKSEMEEPELCYYVGFDSCSPRIIVDKHNKCYKNMSDNEKKLFTLKERERNNKKEEQKQDDENKEQKIIGGRLGIQNLKTFKKYQVSPLGEVKEVGKETRQAIALKSTKHIKQD

SEQ ID NO: 8125 - protein, 672 aa, synthetic construct
  REGION 1..672: note = Synthetic
LGLSDDYEFKGEKGTYFIEFKKYKEFIKALGDHSLSQDDLNEIAKDITLIKDEIKLKKALAKYDLNQNQIDSLSKLEFKDHLNISFKALKLITPLMLEGKKYDEACNELNLKVAINEDKKDFLPAFNETYYKDEVTNPVVLRAIKEYRKVLNALLKKYGKVHKINIELAREVGKNYSQRAKIEKEQNENYKAKKDAELECEKLGLKINSKNILKLRLFKEQKEFCAYSGEKIKISDLQDEKMLEIDHIYPYSRSFDDSYMNKVLVFTKQNQEKLNQTPFEAFGNDSAKWQKIEVLAKNLPTKKQKRILDKNYKDKEQKDFKDRNLNDTRYIARLVLNYTKDYLDFLPLSDDENTKLNDTQKGSKVHVEAKSGMLTSALRHTWGFSAKDRNNHLHHAIDAVIIAYANNSIVKAFSDFKKEQESNSAELYAKKISELDYKNKRKFFEPFSGFRQKVLDKIDEIFVSKPERKKPSGALHEETFRKEEEFYQSYGGKEGVLKALELGKIRKVNGKIVKNGDMFRVDIFKHKKTNKFYAVPIYTMDFALKVLPNKAVARSKKGEIKDWILMDENYEFCFSLYKDSLILIQTKDMQEPEFVYYNAFTSSTVSLIVSKHDNKFETLSKNQKILFKNANEKEVIAKSIGIQNLKVFEKYIVSALGEVTKAEFRQREDFKK

SEQ ID NO: 8126 - protein, 672 aa, synthetic construct
  REGION 1..672: note = Synthetic
LGLSDDYEFKGEKGTYFIEFKKYKEFIKALGEHNLSQDDLNEIAKDITLIKDEIKLKKALAKYDLNQNQIDSLSKLEFKDHLNISFKALKLITPLMLEGKKYDEACNELNLKVAINEDKKDFLPAFNETYYKDEVTNPVVLRAIKEYRKILNALLKKYGKVHKINIELAREVGKNHSQRAKIEKEQNENYKAKKDAEIECEKLGLKINSKNILKLRLFKEQKEFCAYSGEKIKLSDLQDEKMLEIDHIYPYSRSFDDSYMNKVLVFTKQNQEKLNKTPFEAFGNDSTKWQKIEVLAKNLPEKKQKRILDKNYKDKEQKDFKDRNLNDTRYIARLVLNYTKDYLDFLPLSDDENTKLNDTQKGSKVHVEAKSGMLTSALRHTWGFSAKDRNNHLHHAIDAAIIAYANNSIVKAFSDFKKEQESNSVELYAKKISELDYKNKRKFFEPFSGFRQKVLDKIDEIFVSKPERKKPSGALHEETFRKEEEFYQSYGGKEGVLKALELGKIRKVNGKIVKNGDMFRVDIFKHKKTNKFYAVPIYTMDFALKVLPNKAVARSKKGEIKDWILMDENYEFCFSLYKDSLILIQTKDMQEPELVYFNAFTSSTVSLIVSKHDNKFETLSKNQKILFKNANEKEVIAKSIGIQNLKVFEKYIVSALGEVTKAEFRQREDFKK

SEQ ID NO: 8127 - protein, 671 aa, synthetic construct
  REGION 1..671: note = Synthetic
MDCEKISQTLCEFIQHKVKDSGLNGVVLGLSGGIDSALVATLCKKALGENVFALLMPTKFSNQENLNDALKLCQELNLKYKIIEIQDILEAFLKQSENTDELSRGNFAARIRMSLLYDYSALKKALVVGTSNKSELLLGYGTIYGDLAYAFNPIGELYKSEIYGLARYLNLNEKFIQKAPSADLWIGQSDEKDLGFSYELIDKGLKALENQDMKALENLDCAYSGEKIKISDLQDEKMLEIDHIYPYSRSFDDSYMNKVLVFTKQNQEKLNQTPFEAFGNDSAKWQKIEVLAKNLPTKKQKRILDKNYKDKEQKDFKDRNLNDTRYIARLVLNYTKDYLDFLPLSDDENTKLNDTQKGSKVHVEAKSGMLTSALRHTWGFSAKDRNNHLHHAIDAVIIAYANNSIVKAFSDFKKEQESNSAELYAKKISELDYKNKRKFFEPFSGFRQKVLDKIDEIFVSKPERKKPSGALHEETFRKEEEFYQSYGGKEGVLKALELGKIRKVNGKIVKNGDMFRVDIFKHKKTNKFYAVPIYTMDFALKVLPNKAVARSEKGEIKDWILMDENYEFCFSLYKDSLILIQTKDMQEPELVYFNAFTSSTVSLIVSKHDNKFETLSKNQKILFKNANEKEVIAKSIGIQNLKVFEKYIVSALGEVTKAEFRQREDFKNELR

SEQ ID NO: 8128 - protein, 668 aa, synthetic construct
  REGION 1..668: note = Synthetic
MIMNLKGEKGTYFIEFKKYKEFIKALGDHSLSQDDLNEIAKDITLIKDEIKLKKALAKYDLNQNQIDSLSKLEFKDHLNISFKALKLITPLMLEGKKYDEACNELNLKVAINEDKKDFLPAFNETYYKDEVTNPVVLRAIKEYRKVLNALLKKYGKVHKINIELAREVGKNYSQRAKIEKEQNENYKAKKDAELECEKLGLKINSKNILKLRLFKEQKEFCVYSGEKIKISDLQDEKMLEIDHIYPYSRSFDDSYMNKVLVFTKQNQEKLNKTPFEAFGNDSTKWQKIEVLAKNLPTKKQKRILDKNYKDKEQKDFKDRNLNDTRYIARLVLNYTKDYLDFLPLSDDENTKLNDTQKGSKVYVEAKSGMLTSALRHTWGFSTKDRNNHLHHAIDAVIIAYANNSIVKAFSDFKKEQESNSAELYAKKISELDYKNKRKFFEPFSGFRQKVLDKIDEIFVSKPERKKPSGALHEETFRKEEEFYQSYGGKEGVLKALELGKIRKVNGKIVKNGDMFRVDIFKHKKTNKFYAVPIYTMDFALKVLPNKAVARSKKGEIKDWILMDENYEFCFSLYKDSLILIQTKDMQEPELVYFNAFTSSTVSLIVSKHDNKFETLSKNQKILFKNANEKEVIAKSIGIQNLKVFEKYIVSALGEVTKAEFRQREDFKK

SEQ ID NO: 8129 - protein, 626 aa, synthetic construct
  REGION 1..626: note = Synthetic
VILHIAKRRGYDDIKNNGDEEKSEILKAIKQNEEKLVNYQSVGEYLYKEYFQKFKENSKEFINVRNKKESYERCITQSFLKDELKLIFQKQREFGFSFSKKFEEEVLSVAFYKRALKDFSHLVGNCSFFTDEKRAPKNSPLAFMFVALTRIINLLNNLKNTEGILYTKDDLNALLNEVLKNGTLTYKQTKKLLGLSDDYEFKGEKGTYFIEFKKYKEFIKALDEHSLSQDDLNEIAKDITLIKDEIKLKKALAKYDLNQNQIDSLSKLEFKDHLNISFKALKLITPLMLEGKKYDEACNELNLKVAINEDKKDFLPAFNETYYKDEVTNPVVLRAIKEYRKILNALLKKYGKVHKINIELAREVGKNHSQRAKIEKEQNENYKAKKDAEIECEKLGLKINSKNILKLRLFKEQKEFCAYSGEKIKISDLQDEKMLEIDHIYPYSRSFDDSYMNKVLVFTKQNQEKLNKTPFEAFGNDGVKWQKIEVLAKNLPEKKQKRILDKNYKDKEQKDFKDRNLNDTRYIARLVLNYTKDYLDFLPLSDDENTKLNDTQKGSKVHVEAKSGMLTSALRHTWGFSVKDRNNHLHHAIDVVIIAYANNFIVKAFLDFKKEQESNTGELYAKKLVN

SEQ ID NO: 8130 - protein, 622 aa, synthetic construct
  REGION 1..622: note = Synthetic
LQKRCGYDDIKNSDDEEKSEILKAIKQNEEKLVNYQSVGEYLYKEYFQKFKENSKEFINVRNKKESYERCITQSFLKDELKLIFQKQREFGFSFSKKFEEEVLSVAFYKRALKDFSHLVGNCSFFTDEKRAPKNSPLAFMFVALTRIINLLNNLKNTEGILYTKDDLNTLLNEILKNGTLTYKQTKKLLGLSDDYEFKGEKGTYFIEFKKYKEFIKALDEHSLSQDDLNEIAKDITLIKDETKLKKALAKYDLNQNQIDSLSKLEFKDHLNISFKALKLITPLMLEGKKYDEACNELNLKVAINEDKKDFLPAFNETYYKDEVTNPVVLRAIKEYRKILNALLKKYGKVHKINIELAREVGKNHSQRAKIEKEQNENYKAKKDAELECEKLGLKINSKNILKLRLFKEQKEFCAYSGEKIKLSDLQDEKMLEIDHIYPYSRSFDDSYMNKVLVFTKQNQEKLNKTPFEAFGNDNVKWQKIEVLAKNLPEKKQKRILDKNYKDKEQKDFKDRNLNDTRYIARLVLNYTKDYLDFLPLSDDENTKLNDTQKGSKVHVEAKSGMLTSALRHTWGFSAKDRNNHLHHAIDAAIIAYANNSIVKAFSDFKKEQESNSVELYAKKLVN

SEQ ID NO: 8131 - protein, 615 aa, synthetic construct
  REGION 1..615: note = Synthetic
VARILAFDIGISSIGWAFSENDELKDCGVRIFTKAENPKTGESLALPRRLARSARKRLARRKARLNHLKHLIANEFKLNYEDYQSFDESLAKAYKGSLISPYELRFRALNELLSKQDFARVILHIAKRRGYDDIKNSDDKEKGAILKAIKQNEEKLANYQSVGEYLYKEYFQKFKENSKEFTNVRNKKESYERCIAQSFLKDELKLIFKKQREFGFSFSKKFEEEVLSVAFYKRALKDFSHLVGNCSFFTDEKRAPKNSPLAFMFVALTRIINLLNNLKNTEGILYTKDDLNALLNEVLKNGTLTYKQTKKLLGLSDDYEFKGEKGTYFIEFKKYKEFIKALGDHSLSQDDLNEIAKDITLIKDEIKLKKALAKYDLNQNQIDSLSKLEFKDHLNISFKALKLITPLMLEGKKYDEACNELNLKVAINEDKKDFLPAFNETYYKDEVTNPVVLRAIKEYRKVLNALLKKYGKVHKINIELAREVGKNYSQRAKIEKEQNENYKAKKDAELECEKLGLKINSKNILKLRLFKEQKEFCAYSGEKIKISDLQDEKMLEIDHIYPYSRSFDDSYMNKVLVFTKQNQEKLNQTPFEAFGNDSAKWQKIEVLAKNLSAEK

SEQ ID NO: 8132 - protein, 575 aa, synthetic construct
  REGION 1..575: note = Synthetic
LQAFKFENKIKQSKFDFLPAFCDSIFAQELTNPIVNRAISEYRKVLNALLKKYGKMHKIHIELARDIGLSKKLRTKIEKEQKENYENNIWALNECENFGLKANAKNILKLKLWKEQKEFCIYSGKKISIEHLRDEKALEVDHIYPYSRSFDDSFLNKVLVFTKENQEKLNKTPFEAFGANEERWSKIQALAQNLPYKKKNKILDEAFKGKQQQDFISRNLNDTRYISTLIVKYTKEYLDFLPLDEKEDINLKSGEKGSKIHVQTINGMLTSVLRHTWGFAQKDRNNHLHHALDATIVAYSTNAIIKAFSDFKKEQELLKAKLYAKELTNDSYKHQAKFFEPFEGFREQILNQINKLFVSKPPRKRARGALHKETFYPKDEMIKKYNSQEGVEIALNCGKIRKIGTKYVENDTMVRIDIFKKQNKFYAIPIYTMDFALGVLPNKIVIAGKDKKGNPKQWQEIDESYEFCFSLHKDDLVLIQKKDMQEPEFAYYNGFDISNSSICVEKHDNKFENLTDNQKLLFVNAKEGSVKAKKIGIQGLKIFEKYIITPLGEKIKADFKPREDIALKTSKKHGL

SEQ ID NO: 8133 - protein, 557 aa, synthetic construct
  REGION 1..557: note = Synthetic
MKIKKIFYPHLMKLIIKNEVTNPVVLRAIKEYRKVLNALLKKYGKVHKINIELAREVGKNYSQRAKIEKEQNENYKAKKDAELECEKLGLKINSKNILKLRLFKEQKEFCVYSGEKIKISDLQDEKMLEIDHIYPYSRSFDDSYMNKVLVFTKQNQEKLNKTPFEAFGNDSTKWQKIEVLAKNLPEKKQKRIVDKNYKDKEQKDFKDRNLNDTRYIARLVLNYTKDYLDFLPLSDDENTKLNDTQKGSKVHVEAKSGMLTSALRHTWGFSTKDRNNHLHHAIDAVIIAYANNSIVKAFSDFKKEQESNSAELYAKKISELDYKNKRKFFEPFSGFRQKVLDKIDEIFVSKPERKKPSGALHEETFRKEEEFYQSYGGKEGVLKALELGKIRKVNGKIVKNGDMFRVDIFKHKKTNKFYAVPIYTMDFALKVLPNKAVARSKKGEIKDWILMDENYEFCFSLYKDSLILIQTKDMQEPEFVYYNAFTSSTVSLIVSKHDNKFETLSKNQKILFKNANEKEVIAKSIGIQNLKVFEKYIVSALGEVTKAEFRQREDFKK

SEQ ID NO: 8134 - protein, 555 aa, synthetic construct
  REGION 1..555: note = Synthetic
NKKDFLPAFNETYYKDEVTNPVVLRAIKEYRKVLNALLKKYGKVHKINIELAREVGKNHSQRAKIEKEQNENYKAKKDAELECEKLGLKINSKNILKLRLFKEQKEFCAYSGEKIKISDLQDEKMLEIDHIYPYSRSFDDSYMNKVLVFTKQNQEKLNKTPFEAFGNDSAKWQKIEVLAKNLPTKKQKRILDKNYKDKEQKDFKDRNLNDTRYIARLVLNYTKDYLDFLPLSDDENTKLNDTQKGSKVHVEAKSGMLTSALRHTWGFSTKDRNNHLHHAIDAVIIAYANNSIVKAFSDFKKEQESNSAELYAKKISELDYKNKRKFFEPFSGFRQKVLDKIDEIFVSKPERKKPSGALHEETFRKEEEFYQSYGGKEGVLKALELGKIRKVNGKIVKNGDMFRVDIFKHKKTNKFYAVPIYTMDFALKVLPNKAVARSKKGEIKDWILMDENYEFCFSLYKDSLILIQTKDMQEPEFVYYNAFTSSTVSLIVSKHDNKFETLSKNQKILFKNANEKEVIAKSIGIQNLKVFEKYIVSALGEVTKAEFRQREDFKK

SEQ ID NO: 8135 - protein, 1162 aa, synthetic construct
  REGION 1..1162: note = Synthetic
MSQNQNTQSHLNPTTQPNTQLGAQSSTQLSTQSGTQSLKILGFDIGVASIGWAFVEGGELKDCGVRIFTKAENPKDGSSLALPRREARGVRRRLARRKGRLNALKVLICKEFGLNRGDYLANAGELPKAYHTSKDTKSPYQLRAESLNRKLSADEFARVILHIAKHRGYGNKHAKESNDDDSGKVKKAISENQKVMSEKGYTTAGQYLYGEFYQKERNEQEIQARVETLKAYYKSNKVKVENQNKNKLERQSPNQFNNIRNKSENYARCLAQSELQKELEIIFERQKQFGFEFSDKKHKIIDANGKLQELDFADAVLEIAFLQRPLKSLADKVGKCTFYESEPRAPKDSLSAIEFVALTRIINTLANITKRSGEVYSADKVREILSIVLDKGEITYKNLRKVIALDEKLQFPKDSKLDYAKEDAEKAKAIEFSKLKAFRKALGGSFEGFSRAELDSIATDIALTKSKDELKAKLANYQSLNDEQREKLSELSFDKFIDLSFKALEAILPLMRGDSGECKRYDEAWREAGLVEVAKKTQKGDSLPPLIQYEQNLANPVVARALAEYRKVLNALLKKHGKVHKIHLEFTRQAGVSSKERGEIIAEQNKRLKANEEARKRCEEYGLIPSGKNILKLKLWQEQGEFCVYSGKKICREHFLDPKALEVEHIYPYSRSYDDSQNNKVLVFADANQNKREKTPYEAFGGDTQKWNQILGRIEKLPKAKKNRITNKNFANKEAGFIARNIVDTSYIATLTASYTDAFIEFLPLTENEDTTLGRGEKGSKKHISVVNGSLTATMRHYWGLNTLLDSEDSEKKDRSNHLHHALDAIIIAYVNDSVIKAFSDFKKTQEQNKAHLIAKEIESAEYKISRRFFAPSGFENNEAFRQAIKRKILGQSRESRENDMSINSEAMGEKVGGIFVSKPPRKRARGALHKETFKSPYDEKVYKDFIDNKKLKELEKLKQDKPKEFLEFIETAVNRAIKLGKVRQIGSKIADNGTMVRVDIFRHKVSGKFYGVPIYTMDFALGILPNKAVVGGKDKSGVIKDWLEMDSNYEFCFSLFKDDLILVQKKEMSKAELCYFMGFGIATASISVEKHDNHFDTLTENQKLLFSNATPKEVKGLSIGIQNLKVFEKWQVSPLGEVSKAGFKEREPIALKSTPKRFLQG

SEQ ID NO: 8136 - protein, 1049 aa, synthetic construct
  REGION 1..1049: note = Synthetic
VKILSFDIGITSIGWAYVEGEKLKDCGVRIFTKAENPQNGDSLAAPRREARGVRRRLARRKVRLNAIKRLLCKEFGLNLSDYFANDGELPKAYETTKDTKSPYELRTLALSQKLEVKDLARVILHIAKHRGYGNKHAKSDLTKENKIKEEIKEEQEKQKVALKTTQDKNLLQQREILKKEQELVLKALYRNEAALESCKVSDKYSVGKYFYESFEKRGQRIRNTTNNYQHTMRQEWLKDELEFIFKKQKDFGATFSKNFESQIIETAFYQRDLKSFEDKVGKCVFYENENRAPKDSLSAMEFVALTRIINTLKNLEKKSKNLGIGETYGKDKIQEILKNVFDKGEMSYKELRKILKLNESILFAKDSKLDYTKGMQEAEKAKFIELKNLKAFKKAMGGDFSKFPREELDKIATDITLIKSKENLAKKLQNYSALSKEQVEALSNLNFAKHIDLSLKALDKILRFMREGLSYDEAVKKAGLQEHRKHKQKGEFLIPLKDYEPYLANPVVARALSEYRKVLNALLRKYGNVHKIHLEFTREAKLSAKERQKYEKEQKEHFEANQKAKKQCEILGLPINGANILKMKLWIEQGECCVYSGEKITREHFFDSNALQVDHIYPYSRSFDDSYMNKVLVFAKENQNKLNKTPFEAFGNNKEKWDRILSLSANLPKQKQRRISNKDFKDKELGFIARNINDTGYIARLASQWTNNCLKFENLSENEVTIAGEKGSSVHIEVVSGQLTSMLRHYWGLGDKDRNNHLHHAVDAIILAYTNAKTKNAFANFKKTQEQNKKKFYAKQISESEYKVKKAFFEPCKDFRSKVLEKIDSIFVSKPPRKRARGALHEETFYSFEDEKLLKSYGGKQGIEKAISLGKIRQVGTKIVNNGAMVRVDIFMDKKGKFYAVPIYTMDFALGILPNKAVVQGKSKEDGVIKDWIEMDSNYTFCFSLFKDDLILVQKKEMEKAELCYFVSFGSANAQINVEKHNNKFEGLSENEKILYSNATQKKVEGKSIGIQNLKTFEKYQVSPLGEVQKAEFESRQNITLKSNPKRKN

SEQ ID NO: 8137 - protein, 821 aa, synthetic construct
  REGION 1..821: note = Synthetic
LWKFYFSKWKFYFSADKFTNVRNKKESYERCIAQSFLKDELKLIFKKQREFGFSFSKKFEEEVLSVAFYKRALKDFSHLVGNCSFFTDEKRAPKNSPLAFMFVALTRIINLLNNLKNTEGILYTKDDLNALLNEVLKNGTLTYKQTKKLLGLSDDYEFKGEKGTYFIEFKKYKEFIKALGDHSLSQDDLNEIAKDITLIKDEIKLKKALAKYDLNQNQIDSLSKLEFKDHLNISFKALKLITPLMLEGKKYDEACNELNLKVAINEDKKDFLPAFNETYYKDEVTNPVVLRAIKEYRKVLNALLKKYGKVHKINIELAREVGKNYSQRAKIEKEQNENYKAKKDAELECEKLGLKINSKNILKLRLFKEQKEFCAYSGEKIKISDLQDEKMLEIDHIYPYSRSFDDSYMNKVLVFTKQNQEKLNQTPFEAFGNDSAKWQKIEVLAKNLPTKKQKRILDKNYKDKEQKDFKDRNLNDTRYIARLVLNYTKDYLDFLPLSDDENTKLNDTQKGSKVHVEAKSGMLTSALRHTWGFSAKDRNNHLHHAIDAVIIAYANNSIVKAFSDFKKEQESNSAELYAKKISELDYKNKRKFFEPFSGFRQKVLDKIDEIFVSKPERKKPSGALHEETFRKEEEFYQSYGGKEGVLKALELGKIRKVNGKIVKNGDMFRVDIFKHKKTNKFYAVPIYTMDFALKVLPNKAVARSKKGEIKDWILMDENYEFCFSLYKDSLILIQTKDMQEPEFVYYNAFTSSTVSLIVSKHDNKFETLSKNQKILFKNANEKEVIAKSIGIQNLKVFEKYIVSALGEVTKAEFRQREDFKK

SEQ ID NO: 8138 - protein, 672 aa, synthetic construct
  REGION 1..672: note = Synthetic
LGLSDDYEFKREKGTYFIEFKKYKEFIKALGEHNLSQDDLNEIAKDITLIKDEIKLKKALAKYDLNQNQIDSLSKLEFKDHLNISFKALKLITPLMLEGKKYDEACNELNLKVAINEDKKDFLPAFNETYYKDEVTNPVVLRAIKEYRKVLNALLKKYGKVHKINIELAREVGKNHSQRAKIEKEQNENYKAKKDAELECEKLGLKINSKNILKLRLFKEQKEFCAYSGEKIKISDLQDEKMLEIDHIYPYSRSFDDSYMNKVLVFTKQNQEKLNKTPFEAFGNDSAKWQKIEVLAKNLPTKKQKRILDKNYKDKEQKDFKDRNLNDTRYIARLVLNYTKDYLDFLPLSDDENTKLNDTQKGSKVHVEAKSGMLTSALRHTWGFSTKDRNNHLHHAIDAVIIAYANNSIVKAFSDFKKEQESNSAELYAKKISELDYKNKRKFFEPFSGFRQKVLDKIDEIFVSKPERKKPSGALHEETFRKEEEFYQSYGGKEGVLKALELGKIRKVNGKIVKNGDMFRVDIFKHKKTNKFYAVPIYTMDFALKVLPNKAVARSKKGEIKDWILMDENYEFCFSLYKDSLILIQTKDMQEPELVYFNAFTSSTVSLIVSKHDNKFETLSKNQKILFKNANEKEVIAKSIGIQNLKVFEKYIVSALGEVTKAEFRQREDFKK

SEQ ID NO: 8139 - protein, 846 aa, synthetic construct
  REGION 1..846: note = Synthetic
MKILGFDIGINSIGWAFVEDNQLQDCGVRLFTKAEDPKTKESLALPRRNARSNRRRLGRRRSRLIALKHIISKELKLNYQDYMANDRELPKAYEGRLISPYELRYKALNEKIEPKDLARVILHIAKHRGYMNKNEKKSNDNEKGKILSALKTNALKLEKYQSVGEYFYKEFFQKHKENTKDFINIRNKKGSYDNCVLASDLEKELKLILEKQKEWGYSYDDNFIKEILKVAFFQRPLKDFSYLVGVCTFFEDEKRACKNSYSAWEFVALTKIINELKSLEKESGELVSSQIINEILNHVLDKGSITYKKFREYIKLHESMKFKSLKYDKDNAESTKLIEFRKLVEFKKALGEHSLTREELDQIATYITLIKDNEKLKITLEKYSLNNEQIKNLIEIDFNDHINLSFKALNLILPLMKEGKRYDEGCKLLNLKTKSNNQKFDFLPAFCDSIFAQELTNPIVNRAISEYRKVLNALLKKYGKMHKIHIELARDIGLSKKLRTKIEKEQKENYENNIWALNECENFGLKANTKNILKLKLWKEQKEFCIYSGKKISIEHLRDEKTLEVDHIYPYSRSFDDSFLNKVLVFTKENQEKLNKTPFEAFGANEERWSKIQALAQNLPYKKKNKILDEAFKGKQQQDFISRNLNDTRYISTLIVKYTKEYLDFLPLDEKEDISLKSGEKGSKIHVQTINGMLTSVLRHTWGFAQKDRNNHLHHALDATIVAYSTNAIIKAFSDFKKEQELLKAKLYAKELTSDSYKHQAKFFEPFEGFREQILNQINKLFVSKPPRKRARGALHKETFYSKDEMIKKYNSQEGVEIALNCGKIRKIGTKYVENDTMVRIVSAEK

SEQ ID NO: 8140 - protein, 1039 aa, synthetic construct
  REGION 1..1039: note = Synthetic
VKILSFDIGITSIGWAFVEGEELKDCGVRIFTKAENPKNGDSLAAPRREARGVRRRLARRKARLNVIKRLLCKEFGLNLSDYFANDGELPKAYETTKDTKSPYELRTLALSQKLDSKDLARVILHIAKHRGYGNKHAKTGSDKDSGKVLSAIKVNETAMKDKYQSVGEYLYKEFYQKERLESEKKSNNTTKEFKNVRNKGENYEHCVAQEQVRAELELIFTKQKEFGFPFSAKTYKISYENGEAKELDFTSAIIETAFYQRDLKSFEDKVGKCVFYENENRAPKDSLSAMEFVALTRIINTLKNLEEKSKNLGIGETYGKDKIQEILKNVFDKGEMSYKELRKILKLNESILFAKDSKLDYTKGMQEAEKAKFIELKNLKAFKKAMGGDFSKFPREELDKIATDIALIKSKENLAKKLQNYSALSKEQVEALSNLSFAKHIDLSLKALHKILPLMCEGLCYDEAVKKAGLQEHRKHKQKGEFLIPLKDYEPYLANPIVARALSEYRKVLNTLLRKYGKVHKIHLEFTREAKLSAKERQKYEKEQKEHFEVNQKAIQQCEILELPINGTNILKMKLWLEQGECCIYSGQKITREHLLASNALQIDHIYPYSRSFDDSYMNKVLVFNKENQNKLDKTPFEAFGSDKEKWDRILSFSANLPKQKQRRISNKDFKDKERGFIARNLNDTGYIARLASQWSKDCLEFLPLSENECTISGEKNSKVHIEVVSGQLTATLRHYWGLGDKDRNNHLHHAVDAIILAYTNAKTKNVFANFKKTQEQNKAKFYAKQISEQEYKKQKAFFEPCANFRQRVEEKINEIFVSKPPRKRARGALHEETFYSFEDEKLLKSYGGKQGIEKAISLGKIRQVGTKIVSNGAMVRVDIFKDKKGKFYAVPIYTMDFALGILPNKAVVQGKSKEDGVIKDWIEMDSNYTFCFSLFKDDLILVQKKEMEKAELCYFVGFGVSTASIQVEKHNNKFEGLSENEKILYSNATQKEVVGKSIGIQNLKTFEKHQVSPLGKVQKVEFESRQEIKLKSSSKRKG

SEQ ID NO: 8141 - protein, 1094 aa, synthetic construct
  REGION 1..1094: note = Synthetic
MKIFSFDIGIASIGWAYIEDDVLKDCGVRIFTKAENPKNGDSLAAPRREARSARRRLARRKGRLNALKKLICKEFGLKLGDYLAPDGKLPKAYETSKETKSPYELRALALEQKLDSKDLARVILHIAKHRGYGNKHAKDADDDESGKVKKAIKENEKILLEKGYQSAGQYLYNEFFEKPRDFDVEQKSSNNTRGTQEFRNVRNKAESYARCLNQSELQKELGFIFAKQREFGFNFSDKKYKIIDENGKLKELGFESAIMEIAFLQRPLKSFEDKVGKCTFYADEPRAPKDSLSAMEFVALTRIINILANITKRSGEVYSVDKVHEILDMVLEKGEMSYKKLRKVINLDERIQFPKDSKLDYAKKDAENAKVIEFKKLKSFNKAFGDKCFGGLARNELDKIANDIALIKSKAELKDKLKHYPSLNEEQIENLSELNFDKFIDLSFRALEQILPFMRGDKTGECLRYDEAIKKAGLQEHKKHQQKDNFLLPLKEYEPYLANPVVARALSEYRKVCNALLRKYGQVHKIHLEFTREAGKSYDERKKIEKEQREHFEANQSAQKQCEILELPLNGANILKMKLWIEQGERCAYSGEKITLEHLKDSTMLQIDHIYPYSRSFDDSQNNKVLVFTKENQNKLNKTPFEAFGTYKEKWDRILSLASKLPKPKYRRISNTQFKDKEAGFLARNIVDTGYIARLASQWTKDCLRFLPLSENEVTIAGEKGSKVHVEVMNGSLTAMLRHYWGLGGKNRDNHLHHAVDAVIIGFTNASVIKAFSDFRKIQEQNKAKFYAKQIAESDYKDKRAFFEPCKNFRQMVQEKMDSIFVSKPPRKRARGALHEKTFGSICLENGEWIAKIKNLTENDENNVAKEKYKILYRGEKNVKNAFKWGKIRRIHNKNNSEVQIGDMFAKNDRIVRTDIFKRTIKGKKEDKVEYYAVPIYTMDYALGILPNRACPTSVTNKQDKSLTEWIPVDSNYIFCFSLFTNDLVYVKKKGMKNPVFGYYEGVNPSNSSITIAKHDNYAEKEDLSDLNADEREIFKCKIDKKTGKTKIIGEGVGIRNLEVFEKYQVSPLGEIQKAEFTPRQPISLKSSPKNKKK

SEQ ID NO: 8142 - protein, 1169 aa, synthetic construct
  REGION 1..1169: note = Synthetic
MRVLGFDIGVASIGWALVEDSVLKDCGVRIFTKAENPKDGSSLALPRREARSVRRRLARRKARLNELKRLVAAEFGLNLEDFLANAGELPRVYGGIEKEIRGKMRKTPEGKDKLKKMLAPFHISPYELRAKALEHKLEPSEFARVILHIAKHRGYDNKHTKDTNDDDSGKVKKAISENKAEMQKWAQKNGKNINECTVGEYLYKEFYQQKRDLSEKSPKNAFATQEFQNVRNKKDNYARCVAQSELKRELELIFETQKRLGWKFSEKKYQIFDENRKIKEADFESAVMEVAFLQRPLKSSADKVGKCTFFENEPRAPKDSLSAMEFVALTRIINTLANISKKTGEIYSADKVGKVLEAVLEKGEITYKNLRKIISLDDKIQFPKDSKLDYAKGDEAEKAKFIEFKKLKDFKKALGGSFERFSRDELDKIANKIALIKSKDELKAELASFKGLNEAQKEDLSKLSFDEFIDLSFKALGRILPFMRGENGECKRYDEAWRAAGLQEVAKQTQKGDILPPLKDYEKDLANPVVARALSEYRKVLNALLEKHGKVHKIHLEFTREAGVSSKERGELIAEQNKRFKANEEARKRCAEYGLNPSGKNILKLKLWQEQNEFCVYSGEKITREHLRDESALEIDHIYPYSRSFDDSQNNKVLVFKSANQNKRNQTPYEAFGGDSEKWSRIMSSIAKLPKPKKNRIANKNFADKENGFIARNIVDTSYIATLTASYTDAFIEFLPLAESEDTTLGRGEKGSKKHISVVSGSLTATMRHYWGLDSLLNGESEVKDRSNHLHHALDAIIIAYTNDKIIKAFSDFKKTQEQNTARLIAKEISSAEYKTSRRFFAPANFANNEAFRQSIKGKIFGELGENGELSGGIFVSKPPRKRARGALHEKTFGSICEENGEWVAKIKILKEDKDNTDSQKEKYEILYKGKENIKNAFKWGKIRKVQNKENGRIKEKDEIKIGDTFAKNDKIIHTDIFSRTIKGKKDKVEYYAVPIYRMDYALGILPNNACPTSVTNSKTKNLTEWIPMDSNYTFCFSLFTNDLVCVKKKKTDKKGMENPVIGYYEGINPSNSSITIAKHDNYSQKEDLSDLSSDEREIFKRKVDKKTGKIEIIGEGVGIRNLEIFEKWQVSPLGEVKKAKFKKRKNISLKSTPKNAKHSMSNSNLEAQ

SEQ ID NO: 8143 - protein, 740 aa, synthetic construct
  REGION 1..740: note = Synthetic
LAFDIGISSIGWAFSENDELKDCGVRIFTKAENPKTGESLALPRRLARSARKRLARRKARLNHLKHLIANEFKLNYEDYQSFDESLAKAYKGSLISPYELRFRALNELLSKQDFARVILHIAKRRGYDDIKNNGDEEKSEILKAIKQNEEKLVNYQSVGEYLYKEYFQKFKENSKEFINVRNKKESYERCIAQSFLKDELKLIFQKQREFGFSFSKKFEEEVLSVAFYKRALKDFSHLVGNCSFFTDEKRAPKNSPLAFMFVALTRIINLLNNLKNTEGILYTKDDLNTLLNEVLKNGTLTYKQTKKLLGLSDDYEFKGEKGTYFIEFKKYKEFIKALGEHNLSQDNLNEIAKDITLIKDEIKLKKALAKYDLNQNQIDSLSKLEFKDHLNISFKALKLITPLMLEGKKYDEAYNELNLKVAINEDKKDFLPAFNETYYKDEVTNPVVLRAIKEYRKVLNALLKKYGKVHKINIELAREVGKNHSQRAKIEKEQNENYKAKKDAELECEKLGLKINSKNILKLRLFKEQKEFCAYSGEKIKISDLQDEKMLEIDHIYPYSRSFDDSYMNKVLVFTKQNQEKLNQTPFEAFGNDSAKWQKIEVLAKNLPTKKQKRILDKNYKDKEQKDFKDRNLNDTRYIARLVLNYTKDYLDFLPLSDDENTKLNDTQKGSKVHVEAKSGMLTSALRHTWGFSAKDRNNHLHHAIDAVIIAYANNSIVKAFSDFKKEQESNSAELYAKKN

SEQ ID NO: 8144 - protein, 801 aa, synthetic construct
  REGION 1..801: note = Synthetic
VRNKKESYERCIAQSFLKDELKLIFKKQREFGFSFSKKFEEEVLSVAFYKRALKDFSHLVGNCSFFTDEKRAPKNSPLAFMFVALTRIINLLNNLKNTEGILYTKDDLNALLNEVLKNGTLTYKQTKKLLGLSDDYEFKGEKGTYFIEFKKYKEFIKALGDHSLSQDDLNEIAKDITLIKDEIKLKKALAKYDLNQNQIDSLSKLEFKDHLNISFKALKLITPLMLEGKKYDEACNELNLKVAINEDKKDFLPAFNETYYKDEVTNPVVLRAIKEYRKVLNALLKKYGKVHKINIELAREVGKNYSQRAKIEKEQNENYKAKKDAELECEKLGLKINSKNILKLRLFKEQKEFCAYSGEKIKISDLQDEKMLEIDHIYPYSRSFDDSYMNKVLVFTKQNQEKLNQTPFEAFGNDSAKWQKIEVLAKNLPTKKQKRILDKNYKDKEQKDFKDRNLNDTRYIARLVLNYTKDYLDFLPLSDDENTKLNDTQKGSKVHVEAKSGMLTSALRHTWGFSAKDRNNHLHHAIDAVIIAYANNSIVKAFSDFKKEQESNSAELYAKKISELDYKNKRKFFEPFSGFRQKVLDKIDEIFVSKPERKKPSGALHEETFRKEEEFYQSYGGKEGVLKALELGKIRKVNGKIVKNGDMFRVDIFKHKKTNKFYAVPIYTMDFALKVLPNKAVARSKKGEIKDWILMDENYEFCFSLYKDSLILIQTKDMQEPEFVYYNAFTSSTVSLIVSKHDNKFETLSKNQKILFKNANEKEVIAKSIGIQNLKVFEKYIVSALGEVTKAEFRQREDFKK

SEQ ID NO: 8145 - protein, 779 aa, synthetic construct
  REGION 1..779: note = Synthetic
LAFDIGISSIGWAFSENDELKDCGVRIFTKAENPKTGESLALPRRLARSARKRLARRKARLNHLKHLIANEFKLNYEDYQSFDESLAKAYKGSLISPYELRFRALNELLSKQDFARVILHIAKRRGYDDIKNNGDEEKSEILKAIKQNEEKLVNYQSVGEYLYKEYFQKFKENSKEFINVRNKKESYERCITQSFLKDELKLIFQKQREFGFSFSKKFEEEVLSVAFYKRALKDFSHLVGNCSFFTDEKRAPKNSPLAFMFVALTRIINILNNLKNTEGILYTKDDLNALLNEVLKNGTLTYKQTKKLLGLSDDYEFKGEKGTYFIEFKKYKEFIKALGEHNLSQDDLNEIAKDITLIKDEIKLKKALAKYDLNQNQIDSLSKLEFKDHLNISFKALKLITPLMLEGKKYDEACNELNLKVAINEDKKDFLPAFNETYYKDEVTNPVVLRAIKEYRKILNALLKKYGKVHKINIELAREVGKNHSQRAKIEKEQNENYKAKKDAEIECEKLGLKINSKNILKLRLFKEQKEFCAYSGEKIKLSDLQDEKMLEIDHIYPYSRSFDDSYMNKVLVFTKQNQEKLNKTPFEAFGNDSTKWQKIEVLAKNLPEKKQKRILDKNYKDKEQKDFKDRNLNDTRYIARLVLNYTKDYLDFLPLSDDENTKLNDTQKGSKVHVEAKSGMLTSALRHTWGFSAKDRNNHLHHAIDAAIIAYANNSIVKAFSDFKKEQESNSVELYAKKISELDYKNKRKFFEPFSGFRQKVLDKIDEIFVSKPERKKL

SEQ ID NO: 8146 - protein, 782 aa, synthetic construct
  REGION 1..782: note = Synthetic
VARILAFDIGISSIGWAFSENDELKDCGVRIFTKAENPKTGESLALPRRLARSARKRLARRKARLNHLKHLIANEFKLNYEDYQSFDESLAKAYKGSLISPYELRFRALNELLSKQDFARVILHIAKRRGYDDIKNNGDEEKSEILKAIKQNEEKLVNYQSVGEYLYKEYFQKFKENSKEFINVRNKKESYERCITQSFLKDELKLIFQKQREFGFSFSKKFEEEVLSVAFYKRALKDFSHLVGNCSFFTDEKRAPKNSPLAFMFVALTRIINILNNLKNTEGILYTKDDLNALLNEVLKNGTLTYKQTKKLLGLSDDYEFKGEKGTYFIEFKKYKEFIKALGEHNLSQDDLNEIAKDITLIKDEIKLKKALAKYDLNQNQIDSLSKLEFKDHLNISFKALKLITPLMLEGKKYDEACNELNLKVAINEDKKDFLPAFNETYYKDEVTNPVVLRAIKEYRKILNALLKKYGKVHKINIELAREVGKNHSQRAKIEKEQNENYKAKKDAEIECEKLGLKINSKNILKLRLFKEQKEFCAYSGEKIKLSDLQDEKMLEIDHIYPYSRSFDDSYMNKVLVFTKQNQEKLNKTPFEAFGNDSTKWQKIEVLAKNLPEKKQKRILDKNYKDKEQKDFKDRNLNDTRYIARLVLNYTKDYLDFLPLSDDENTKLNDTQKGSKVHVEAKSGMLTSALRHTWGFSAKDRNNHLHHAIDAAIIAYANNSIVKAFSDFKKEQESNSVELYAKKISELDYKNKRKFFEPFSGFRQKVLDKIDEIFVSKPERKK

SEQ ID NO: 8147 - protein, 724 aa, synthetic construct
  REGION 1..724: note = Synthetic
MFVALTRIINLLNNLKNTEGILYTKDDLNTLLNEVLKNGTLTYKQTKKLLGLSDDYEFKGEKGTYFIEFKKYKEFIKALGDHSLSQDDLNEIAKDITLIKDEIKLKKALAKYDLNQNQIDSLSKLEFKDHLNISFKALKLITPLMLEGKKYDEACNELNLKVAINEDKKDFLPAFNETYYKDEVTNPVVLRAIKEYRKVLNALLKKYGKVHKINIELAREVGKNYSQRAKIEKEQNENYKAKKDAELECEKLGLKINSKNILKLRLFKEQKEFCVYSGEKIKISDLQDEKMLEIDHIYPYSRSFDDSYMNKVLVFTKQNQEKLNKTPFEAFGNDSTKWQKIEVLAKNLPEKKQKRILDKNYKDKEQKDFKDRNLNDTRYIARLVLNYTKDYLDFLPLSDDENTKLNDTQKGSKVHVEAKSGMLTSALRHTWGFSTKDRNNHLHHAIDAVIIAYANNSIVKAFSDFKKEQESNSAELYAKKISELDYKNKRKFFEPFSGFRQKVLDKIDEIFVSKPERKKPSGALHEETFRKEEEFYQSYGGKEGVLKALELGKIRKVNGKIVKNGDMFRVDIFKHKKTNKFYAVPIYTMDFALKVLPNKAVARSKKGEIKDWILMDENYEFCFSLYKDSLILIQTKDMQEPELVYFNAFTSSTVSLIVSKHDNKFETLSKNQKILFKNANEKEVIAKSIGIQNLKVFEKYIVSALGEVTKAEFRQREDFKNELR

SEQ ID NO: 8148 - protein, 1042 aa, synthetic construct
  REGION 1..1042: note = Synthetic
VENEELKNCGVRIFTKAENPKKGKSLALPRREARSARRRLARRKARLGSLKRLICKEFGLNLGDYLAQDGVLPKAYETTKETKSPYELRALALEKKLDSKDLARVILHIAKHRGYGNKHAKTGSDKDSGKVLSAIKTNIKAMEDKSYRSVGEYLYQEFFQKERTQSEKKGSIHTKEFKNVRNKGENYEHCVSQEQVKQELELIFEKQKGFGAKFSEEFEKKIIEIAFFQRDLKSFEDKVGECIFLKGEKRAAKDSLSAMEFVALTSIINLLLNLAKRINPNYKDDDLKNNNLIDKIFGKDKIQEILNLVLDKGEMSYKKLREILNLDERIWFADSKLDYAKGVQKAEGAKGVKFIKFENLKAFKKAMGGSFESFNRKELDLIATDIALIKSKENLAKKLKDYPSLSDEQKEALSELNFAKHIDLSFKALEKILPFMNKGLRYDEAVQKAGLQEHRKHTKKEDFLMPLKDYEPYLANPVVARALSEYRKVLNALLKKYGKVHKIHLEFTREAKLSSKERKDYEGEQRKRFEANQNAQKQCEILGLHLNGANILKIKLWIEQGELCAYSGKKITSEHLKDSTMLQIDHIYPYSRSFDDSQNNKVLVFTKENQNKLNKTPFEAFGEDKEKWEKILSWRNKLPKSKYRRISNTNFKDKEAGFLARNIVDTGYIARLASQWTKDCLEFLPLSEDEVTIEGKKDSKKHVEVVNGGLTAMLRHYWGLGSKNRDNHLHHAVDAVNIGFTNASIIKAFSDFRKLQEQNKAKFYAKEIAESDYKTKRAFFEPCKNFRQMVLDKVDSIFVSKPPRKRARGALHEETFYAFDDKNLLKSYGGEKGIQKAIELGKIRQIGTKIVSNGAMVRVDIFKDKKGKFYGVPIYTMDFALGILPNKAVVTGKDKEVIKDWLEMDVNYEFCFSLFKDDLILVQKKEMEKAELCYYTEFKSSTAGINFEKHNNLYVNLSENECKLFTSKEPVKGGKKNAWKDKTPEEIEQLEKNRKIIGGFVTIEELVVFEKYQVSPLGEVQKAEFTPRQPISLKSSPKNKKK

SEQ ID NO: 8149 - protein, 691 aa, synthetic construct
  REGION 1..691: note = Synthetic
VILHIAKRRGYDDIKNNGDEEKSEILKAIKQNEEKLVNYQSVGEYLYKEYFQKFKENSKEFINVRNKKESYERCIAQSFLKDELKLIFQKQREFGFSFSKKFEEEVLSVAFYKRALKDFSHLVGNCSFFTDEKRAPKNSPLAFMFVALTRIINLLNNLKNTEGILYTKDDLNTLLNEVLKNGTLTYKQTKKLLGLSDDYEFKGEKGTYFIEFKKYKEFIKALGEHNLSQDNLNEIAKDITLIKDEIKLKKALAKYDLNQNQIDSLSKLEFKDHLNISFKALKLITPLMLEGKKYDEAYNELNLKVAINEDKKDFLPAFNETYYKDEVTNPVVLRAIKEYRKVLNALLKKYGKVHKINIELAREVGKNHSQRAKIEKEQNENYKAKKDAELECEKLGLKINSKNILKLRLFKEQKEFCAYSGEKIKISDLQDEKMLEIDHIYPYSRSFDDSYMNKVLVFTKQNQEKLNQTPFEAFGNDSAKWQKIEVLAKNLPTKKQKRILDKNYKDKEQKDFKDRNLNDTRYIARLVLNYTKDYLDFLPLSDDENTKLNDTQKGSKVHVEAKSGMLTSALRHTWGFSAKDRNNHLHHAIDAVIIAYANNSIVKAFSDFKKEQESNSAELYAKKISELDYKNKRKFFEPFSGFRQKVLDKIDEIFVSKPERKKPSGALHEETFRKEEEFYQSYGGKEGVLKA

SEQ ID NO: 8150 - protein, 615 aa, synthetic construct
  REGION 1..615: note = Synthetic
LAFDIGISSIGWAFSENDELKDCGVRIFTKAENPKTGESLALPRRLARSARKRLARRKARLNHLKHLIANEFKLNYEDYQSFDESLAKAYKGSLISPYELRFRALNELLSKQDFARVILHIAKRRGYDDIKNSDNEEKGAILKAIKQNEEKLANYQSVGEYLYKEYFQKFKENSKEFTNVRNKKESYERCIAQSFLKDELKLIFKKQREFGFSFSKKFEEEVLSVAFYKRALKDFSHLVGNCSFFTDEKRAPKNSPLAFMFVALTRIINLLNNLKNTEGILYTKDDLNTLLNEVLKNGTLTYKQTKKLLGLSDDYEFKGEKGTYFIEFKKYKEFIKALGEHNLSQDDLNEIAKDITLIKDEIKLKKALAKYDLNQNQIDSLSKLEFKDHLNISFKALKLITPLMLEGKKYDEACNELNLKVAINEDKKDFLPAFNETYYKDEVTNPVVLRAIKEYRKILNALLKKYGKVHKINIELAREVGKNHSQRAKIEKEQNENYKAKKDAEIECEKLGLKINSKNILKLRLFKEQKEFCAYSGEKIKLSDLQDEKMLEIDHIYPYSRSFDDSYMNKVLVFTKQNQEKLNKTPFEAFGNDSTKWQKIEVLAKNLPEKSKKEF

SEQ ID NO: 8151 - protein, 668 aa, synthetic construct
  REGION 1..668: note = Synthetic
MIMNLKEKKGTYFIEFKKYKEFIKALGEHNLSQDDLNEIAKDITLIKDEIKLKKALAKYDLNQNQIDSLSKLEFKDHLNISFKALKLITPLMLEGKKYDEAYNELNLKVAINEDKKDFLPAFNETYYKDEVTNPVVLRAIKEYRKVLNALLKKYGKVHKINIELAREVGKNHSQRAKIEKEQNENYKAKKDAELECEKLGLKINSKNILKLRLFKEQKEFCAYSGEKIKISDLQDEKMLEIDHIYPYSRSFDDSYMNKVLVFTKQNQEKLNQTPFEAFGNDSAKWQKIEVLAKNLPTKKQKRILDKNYKDKEQKDFKDRNLNDTRYIARLVLNYTKDYLDFLPLSDDENTKLNDTQKGSKVHVEAKSGMLTSALRHTWGFSAKDRNNHLHHAIDAVIIAYANNSIVKAFSDFKKEQESNSAELYAKKISELDYKNKRKFFEPFSGFRQKVLDKIDEIFVSKPERKKPSGALHEETFRKEEEFYQSYGGKEGVLKALELGKIRKVNGKIVKNGDMFRVDIFKHKKTNKFYAVPIYTMDFALKVLPNKAVARSKKGEIKDWILMDENYEFCFSLYKDSLILIQTKDMQEPEFVYYNAFTSSTVSLIVSKHDNKFETLSKNQKILFKNANEKEVIAKSIGIQNLKVFEKYIVSALGEVTKAEFRQREDFKK

SEQ ID NO: 8152 - protein, 1074 aa, synthetic construct
  REGION 1..1074: note = Synthetic
IMKVLGFDIGITSIGWAYIEDDVLKDCGVRIFTKAENPKNGDSLAAPRREARSARRRLARRKARLYALKKLICKEFGLKLGDYLAPDGELPKAYCIQKCKVSKDERKQKRQTEKGKQELEKLNNNPYRLRKEGLERKLNVDELARVILHIAKHRGYGNKHAKDADDSESGKVKKAIKENEKLLLEKDYQSAGQYLYSEFFEKPRDFDVEQKSLKNIQGTQEFRNVRNKAESYTRCLNQSELQKELGLIFEKQREFGFNFSDKKYKIIDENGKLKELDFESAIMEIAFLQRPLKSFEDKVGKCTFYADEPRAPKDSPSAIEFVALTKIINILANITKRSGEVYSADKLHEIRDMVLEKGEISYKKLRKIINLDERIQFPKDSKLDYTKKDAENAKVIEFKKLKSFNKAFGDKGFDGLTRNELDRIANDIALIKSKAELKDKLTHYPNINEKQIENLSELNFDKFIDLSFRALEQILPFMRKGLRYDEAVKEAGLQEHKKHQQKDNFLSPLKEYEPYLANPVVARALSEYRKVCNALLRKHGQVHKIHLEFTREAGKNYDERKKIEKEQREHFEANQNAQKQCENLELPLNGANILKIKLWIEQGERCAYSGEKITLEHLKDSTMLQIDHIYPYSRSFDDSQNNKVLVFTKENQNKLNKTPFEAFGTDKEKWDKILSRASKLPKPKYRRISNTQFTDKEAGFLARNLNDTSYIARLASQWTKDCLEFLPLSENEATIAGEKGSKVHVEVMNGSLTAMLRHYWGLGSKNRDNHLHHAVDAVIIGFTNASVIKAFSDFRKLQEQNKAKFYAKQIAESEYKDKRAFFEPCKNFRQMVLDKVDSIFVSKPPRKRARGALHEATFYSFEKLCKDEEYAKKEKMDYGGQKGIERAVKLGKIRQIGTKIVSNGAMVRVDIFKHKQSGKFYGVPIYTMDFALGILPNKAVVGGKDKEGVIKDWLEMDSNYGFCFSLFKDDLILVQKKEMEKAELCYFKRFKTSGASIEIVKHDNKADNLSGNQEKIFKVKCEDNQKILDESLISIQNLKTFEKYQVSPLGEIQKAESMPRQAISLKSSPKNKNK

SEQ ID NO: 8153 - protein, 1024 aa, synthetic construct
  REGION 1..1024: note = Synthetic
LKIIGFDIGIASIGWAYMEDNELKDCGVRIFTKAENPKTKASLALPRRKARSARRRLARRRGRLYALKQLICKEFGFYLGDYVSDDGDLPKAYIHTKDTKSPYELRTLALTQKLEHKDLARAILHIAKHRGYGNKHAREAEDTEEQNETGKIKAAIKENEKILQEKGYKTIGEYLYKTFYQQERSDSEKKGNKNSKEFQNVRNKAGNYEHCMAQDKLKAELELILQVQNKLGANLKDSFCQKVIDIAFYQRELKDFSDKVGKCIYDENSPRASKDSLSAMEFIALTRILNALQSISKQSGEVYGKDMIAQISHIVLEKGEINYKALREILRLPESIRFPKDSKLDYTKEQKVAEKAAFIEFKNLKAFKKALGGSFAGLSRKELDAIATHITLTKDKIHFQQKLESYALDDNQKEALSKLSFSHHIHLGFEALNQILPFMREGLRYDEAVQQAGLKEWRKITQKENLLSPLHKYEPYLANPVVARAMSEYRKVLNSLLKTYGQVHKIHIEFTREVGRNAKDRSKIEKEQRDKLAKNEAAKKQCENLRLPLSDSNILKMKLWIEQGEFCIYSGKKITCDDLQNPQKLQIDHIYPYSRSFDDSYANKVLVFTKENQNKRNKTPFEAFGEDTKKWEKILSRASTLPKAKYRRISNIKFEDKEAGFIPRNINDTSYIARLCANWTKDCLSFLPLSENEVTISGEKGSKVHVETISGNLTATLRHYWGLGEKNRNNHLHHAIDAIIIVFSNAKTIKAFSDFKKQRELNKARFYAKELAEADYKQQKVFFEPMEDFRQKILAKVDSIFVSKPPRKRARGALHEETFYAFDDKDLMKKYGGQEGVEKAVALGKIRRIGTKIVNNGAMVRVDIFQHKQSGKFYGVPIYTMDFALGILPNKAVIAGKDKQGVIKDWLEMDSSYEFCFSLFKDDLILLQKKDMEKAELCYFVSFGIATATIQVEKHNNKFEDLSENEKLLYTNATAKEVVAKSIGIQNLKIFEKYHVSPLGEVKKAEFAERQNIALPSSPKHKKA

SEQ ID NO: 8154 - protein, 902 aa, synthetic construct
  REGION 1..902: note = Synthetic
MGTNTQGKWIMLSKVKMARLRLPLKQTNVFWTKKATKVWVNISIKHFISNPGRAGFQSSLERSDSEKKGSTNSKEFQNVRNRGEGYYQRCVAQSELKAELELILHTQNTLGVRLAENFCQKIIDIAFYQRELKDFSDKVGKCVFYEEENRAAKNTLSAMEFIVLTRIINTLQSISKQSGEVYGKDMITQILHIVLEKGEINYKALREILQLPESMRFPKDSKLDYTKELSVAEKAAFIEFKNFKAFKKALSGSFDGLLRMDLDEIATYITLIKDKIKLKSALERYALADTQKESLSTLSFAGHINLKALEQILPFMREGLKYDEAVRQAGLKEWRKRAQKDNLLSPLNEYEPYLANPVVARAMSEYRKVLNSLLKKYGQMHKIHIEFTREVGRSFKERNNIIKEQREQFAKNEKAKKQCEILGLPLSAINILKVKLWLEQGEFCVYSGEKITRAHLLNSQILQIDHIYPYSRSFDDSYLNKVLCFTKENQNKHNKTPFEAFGGDTKKWEQIKSYSLKLPKPKQRRICNEHFVEKESGFIPRNLNDTSYIARLCANWTKDCLEFLPLSESEVTISGEKGSKVHIEVVSGNLTAMLRHYWGLGEKDRDNHLHHAFDAIIIAFSNAKMIKAFSDFKKQRELNRARFYAKEMAEADYKKQKVFFEPMAYFRERVLAKVDSIFVSKPPRKRARRALHEETFYSFGDKALMKQYGGQKGIEKAIALGKIRRIGTKIVKNGNMVRVDIFKHKQNGKFYGVPIYTMDFALGILPNKAVVSGKDKEEVIKDWLEMDNSYEFCFSLFKDDLILVQKKDMEKAELCYFVSFDSALAQIQVEKHNNKLEGLSDNEKLLYTNATKEKVVGKSIGIQNLKIFEKYQVSSLGEVQKADFTPRQNIALKLSPKYKKRG

SEQ ID NO: 8155 - protein, 1293 aa, synthetic construct
  REGION 1..1293: note = Synthetic
MSGLKLGLDLGTNSIGWAIRDTNKKGNQIIGANVIVFPQGVGEEKGVEFSLASERTKHRALRKLYKRRKKRKTDLLKLLIENGFCPLTNDELLLWSVYKKGQEMRYPTGNYDFSEWIKINPYEVRAKAVNSIVSKLELGRALYHMCQRRGFKSGRKDADAGKDLIQFQKERELLEKNGFKTLGEYYFDLLVKGEKVRKTKFSADDQEVNSSRISYVEEFNFLMKSQNIEKELADKFFDTIFFQRPLKSQKGSVGKCTLEKTKSRCAISHPLFEEFRMFQYLNSIKIKERNSEKFIFLSEYPEYYKIAEDKFYRLSAKNFKFVDISKGINNQAKKESLFFEFNYNDKYPVVGSPTVSKLIEVFDAENWKDCKRIIQSKYKKQDNKSVDELIDELWHTLFFSGDFVNDVTSDKIKSFIRNRFSISEEKVNYYESINLKQGYSSLSKKAIVKILPYLEEKIIYPYAVFFANIDVIIGKEKWNENKQFIQDTIIDIISRYKDEILKIDIVNGLVGDFIKEYDNSNYDYFLDETDRKNVLEKIKVFYGKYLWDKMSELEKEALQNEIEITFQNQLQKRRVGGYYLSKPRIDEIIKDFLIQEYKVSREQADKLYHPSAMDAYPQSQDGFLGLPFTNSIKNPMAMRTLFYLRKLVNTLLKEKKIAPDTEIIIELARELNDKNKRLAIERWQRERESENKKFREKLEELAKDTNSIVTETDVIKYRLCQEQNNKCLYTNETINCEKLLGSNPQFDIEHTFPRSKSFDNSLVNKTLADKKFNQIKGNQIPQELPDRYKQNFINNTSHWKETIENLEERIEQQKYFSKVASTVEQKNRAIQQRHYLKLELDYWKQKLYRFTATEIKPNFKNSQLVDTGIITKYSELFLKSLFQRVFPAKGTMVADVRKSWGIEAKDRNYHYHHAIDAIVLSCMDKSIRDGLAEAFKESEENRYNDKFKIKKPWNTFTEDVNQLKNNIIVVHNHKNTIDKQTVKKLRKRNKIQYDKLGNIIYEKGQGIRASLHKDTFYGAIERENENSEKEIWFVIRKPVTNAFSDAEVNAIVDEGIKSRIIKHGLKNVKTEEGWILLPSEKDKQGKEIKEMLIKKIRVKTANKNLPKIKAQSHVAQGKRKEYKESYYATLENIFAMAIYETVNDKGKKEQAFNTISAFDLAKHNQGNVKLEMPVEENVFKNKGKKSEILIPLSKVLKVNQMALFYENNPEELKTISNESLSKRLFKITQFESDGRIQFRHHAQGGADKDLKKESSLDFEKSAQKLRISLSNIKAIYEGKDFIIHPSGKIDFLI

SEQ ID NO: 8156 - protein, 1292 aa, synthetic construct
  REGION 1..1292: note = Synthetic
MAKILGLDLGTNSIGWAIRNTEKEGNQIIDTNVLVFPQGVGEEKGVEFSLASERTKHRASRKLYRRRKQRKTDLLKLLIENGYCPLSITELEIWSNYKKDREMKYPTENEAFSEWLKINPYEVRAKAVHATVSKQELGRALYHICQRRGFKSGRKDADVGKDLEQFKKEQELLKQNGFKTLGEYYFDLLNQDRKVRKTKFSADDQEVNSSRISYVQEFNELMKSQGVGKELADKFFNAIFYQRPLKSQKGTVGKCTLEKTKPRCAVSHPMFEEFRMYQYLNSIKVRERNSDNFVFLSEYPEYYKIALDKFYRVSAKNFKFLDISKSINKEAKKNNLFFIFNYKDKYPIVGSPTISRLIEVFDAEDWDDCKQKIKVSYKKKDNKSEEELVDELWHTLFFAGDFVNDITSEKVKSFIRECYALTEDKIEYYEKINLKPGYSSLSKKAIGKILPFLKEKIIYPYAVFFANIDAIIGAVKWNDNKTFIQDTIIDIISNYKDDTLKIDIVNGLVDDFVKEYDNSNYDYVLDDTDKKNVTEKIIAFYGNEAWETKTDAEKDALQTEIEITFQKQLQKRRVGGYFLSKPRVDEIIKDFLVQEYKVSKEEADTLYHPSAMDAYPQSQDGFLDLPFTNSVKNPMAMRTLFYLRKLVNTLLKENKIAPDTEIIVELARELNDKNKRLAIERWQRERENENKKFKDKLEEFAKDTNSVVTETDIVKYRLCQEQNGVCLYTSKTINCEKLLGSNPEFEIEHTFPRSKSFDNSLANKTLADKSINQIKGNRIPQELEDEYKQHFLMNTKHWEERIEDLREKIEQQKYFSKVASTVEQKNRAIQQRHYLKLEQNYWKQKLYRFTATEIKPNFKNSQLVDTGIITKYSVLFLKSLFPKVFPAKGTMVADVRKSWGLDEKDRNYHYHHAIDAMVLSCMDKSIRDSLAQAFKESEENRYSNKFKVKKPWGTFTENINDLKDSIIVVHKHKDNIGVQTKRKWRKRNKIQYNNSGQVIFEKGQGVRGSLHKDTFYGAIERENENNEKEIWFVVRKPVNSSFSESDVKSIVDEGIKARIEKHGLKNIRTEEGFILLPSETDEKGNATQEMLIKRVRVKTRNTDLPKIKAQSHVSQKRRKPYKESYYATLENIFAMAIYETVNNKGKKTLAFKTISAFDFAQHNQGSPKMEIPIEDNLLKNKGKKSELLLPFSKLLKVNQMALFYENNQEELKTLSNKELSKRLFKITQFESDGRIQFRHHAQGGADKDLKKESSLDFEKSAQKLRISLSNINAVYEERDFKLHASGKIDFLS

SEQ ID NO: 8157 - protein, 1405 aa, synthetic construct
  REGION 1..1405: note = Synthetic
MLQIYKTFLNVYSEKTFFLKYFFQYIYKKFENTKMAKILGLDLGTNSIGWAIRDTNKNGNQIVDTNVIVFPQGVGEEKGVEFSLASERTKHRSSRKLYRRRKKRKTDLLKILIENGFCPLIIDELTIWSEYKKGQEMKYPTTNFEFSEWLKINPYEVRKKAVNQIVSKQELGRALYHLCQRRGFKSGRKDADAGKDLEQYKKEQEILGQSGFKTLGEYYFDLFQNDKKVRKTKFSADDQEVNSSRISYIEEFNILMKAQNVSKELADSFFDAIFFQRPLKSQKGSVGKCTLEKTKTRCPISHPLFEEFRMFQYLNSIKIKERKNDKFVFLSEYPEYYKIAMDKFYRVSAKNFKFLDISKSINTAAKKNSLVFEFNYNDKYPIVGSPTISKLIEVFDAEDWTDCKKIIISKYKKQDNKTSYELVDELWHTLFFSGDFVNDVTSEKVKSFIRNRFDVSEERVNYYEAINLKQGYSSLSKKAIGKILPFLENKIIYPYAVFFANVDVIIGKDKWEANKEFIQDTIVDIISNYKAQTLKIDIVNGLVGDFIKESDNSHLDYILDEIDKKNVSDKTKLFYGKYEWDKMPDETKNDLLNEVEITFQEQLQKRRFGGYFLPKPRVDEIIKDFLIQEYKVSKEQADKLYHPSAMDAYPQSQNNLLGLPFTKSIKNPMAMRTLFYLRKLINTLLKEKKIAADTKIIIELARELNDKNKRLAIERWQRERENENKKYREKLEELAKDTNSKVTETDVIKYRLCQEQNGICFYTNNTINCEKLIGSNPEFDIEHTFPRSKSFDNSLANKTLAYKAFNQIKGNRIPQEINEGNYKLNFINNIKDWQKKIDELEEKIEQQKYFSKVASTVEQKNRAIQQRHYLKLELDYWKQKVYRFTATEIKPNFKNSQLVDTGIITKYSELFLKSLFYKVFPAKGTMVADVRKSWGLGIKDRNYHYHHAIDAVVLTCMDKSIRHGLAEAFKESEENRYQVKFKIEKPWQTFTEDVNKLKENIIVVHKHKDKIENQTKKKLRKTNHLQPKVDFKKDEKGNNILDEKGIKIIEKYYYQTDKYGNLIPQKGRKIDVNELTGKILGVDYFKFENDNLISFHEFVMNKKNEIVYKKEYYYEKGQGIRASLHKDTFYGAIERENDNEEKEIWFVIRKPVTNAFTDAEVNTIVDDGIKNRILKHGLKNIKTPEGWILLPSEKDGKGNEIKEMLIKKIRVKTSNKNLPKIKSQSHVSQGKRKEYKEHYYATLENIFAMAIYETVDNKGKRIQKYKTISAFDLAKHNQGKSKLEVPVEENIKIENKKESILVPLSKVLRVNQMALFYENSAEEIKKLSKTDINKRLFKITQFESDGRIQLRHHAQGGADKDLIKESSVNFEKPVQKLRISLSNVKAIFEGQDFILHSSGKIDLKY

SEQ ID NO: 8158 - protein, 1292 aa, synthetic construct
  REGION 1..1292: note = Synthetic
MAKILGLDLGTNSIGWAIRDTNKDGNQIVDTNVLVFPQGVGEEKGVEFSLASERTKHRASRKLYRRRKKRKTDLLKLLIDNGYCPLSTDELFIWSVYRKGQEMRYPTENHEFSEWLKINPYEIRAKAVHSQVTKMELGRALYHMCQRRGFKSGRKDADAGKDLEQYKKEQELLEKNGFKTLGEYYFDLLERDEKVRKTKFTSDDQEVNSSRISYVEEFNYLMKSQKIDKDLANRFFDAIFFQRPLKSQKGAVGKCTLEKTKSRCPVSHPIFEEFRMYQYLNSIKVKERNSDIFVFLSEFPEYYQAALDKFFRVSAKNFKFLDISKGVNALAKKNNLYFEFNYNDKYPIVGSPTISRFIEVFDATDWEECKVIIKSKYKKRDGKTIDELVDELWHTLFFSGDFVNDITSEKVKTFIRDRFELSEEKVEYYEKINLKQGYSSLSKKAIGKILPFLKDKIIYPYAVFFANIDVIIGKEKWLKNKEFIQDTIVDIISRYKEKTLEIDIVNGLVGDFIKEYDNSNYDYVLDEIDKKNVTEKIKLFYGRYLWEHMSDSEKEILQKHIEALFEAQLQKRRTGGYYMSKPRVDEIIKDFLISEFKVSKEQADKLYHPSAMDAYPQSQDGFLGLPFTNSIKNPMAMRTLFYLRKLVNSLLRENKIASDTEIIIELARELNDKNKRLAIERWQRERENENKKYRAKLEELAKDTNSKVTETDVIKYRLCQEQNGVCLYTNKTINCEKLLGSNPEFDIEHTFPRSKSFDNSLANKTLADKSFNQIKANRIPQDLEYEYKQNFTNNIRDWQVKIEDLEEKIEQQKYFSKVASTVEQKNRAIQQRHYLKLELDYWKQKVYRFTATEIKPNFKNSQLVDTGIITKYSELFLKSLFQRVFPAKGSMVADVRNSWGLDEKDRNYHYHHAIDAIVLTCMDKSIRDGLAEAFKESEENRYSDKFKIKKPWSTFTEDINKLKDDIIVVHNHKDKIEKQTKRKLRKRNKIQYDKTGKVIYERGQGIRGSLHKDTFYGAIERENENNEKEIWFVLRKPVNSSFTDADVNNIVDEGIKGRIQKHGLKNIRTEQGWILLPQETDENGKDLKEMLIKRVRVKTSNKNLPKIKSQSHVSQGKRKEYKEHYYATLENIFAMAIYETIDEKGKKDLAFNTISAFDLSKHNQGNSKLEMPIEDNVIKNKGKKSEKLIPLSKILKVNQMAIFYENNPEELKSISNEELSKRLFKITQFESDGRIQLRHHAQGGPDKDLKKESSLDFDKSAQKLRISLSNVKAIFEGNDFVLHPTGAIDLLF

SEQ ID NO: 8159 - protein, 1287 aa, synthetic construct
  REGION 1..1287: note = Synthetic
MARIIGLDLGTNSIGWAIRDSGLDNKNQILHTGVLIFPQGVGEEKGVEFSLASERTKHRASRKLYRRRKWRKIDTLKILIENNMCPLTMEELNVWGTYEKGKENKYPTENEKFREWLKLNPYELRKKASEETVTNNELGRALYHICQRRGFKSGRKDADAGKDMEVYIEEKEKRGDQTLGAYLSDQLYAGIEVRKTKYQADDQEVNSSRISYIEEFDVIVKKQNLDKDLIEKLFDAIFFQRPLKSQKGTIGKCTLEPNKPRCAVSHPLYEAFRMYQFLNSIKIKNTFGNDSQFHFLTEFPHYFEIVKQLFFRKSKPNFKFADISKAINKEAKKRNEHFECNYKDKYPIVGSPTLSQFINLFDAEDWEDCKTKIKNNYKLSNNKSTDELIDELWHTLFFAGDFVNDITSKKVKDFVRERYNVTEEQIETYEAINLKQGYASLSRKAIKNILPFLKAHIIYSHAVFFSNVEAIVGKDVWEANSEFIQDTIIDIITCYKEDNLIVDIVNGLVGDFIKEYDNAHLDYILDETDKNNVEEKIISFYGTSKWNALSEAKKEKFQKEIETLFQEQLQKRRTGGYFLSKARLDEKIKGFLISEYKVTKEQAGKLYHPSAIDIYQDSLSGELESPFTTSVRNPMAMRTLYQLRKLVNTLLEEDKIDADTKIIIELARELNDKNKRLAIERYQREREAENKKHRTLLEPHAKKAKSKVTDFDIVKYRLWIEQNGKCLYTNETIGIADLFGSNPKFDIEHTFPRSKSFDNSLANKSLSEKKFNQIKGNKIPQELSVNYLQNALHNIAHWKENIEALKEKIEQQKYFSKVASTVEQKNRAIQQKHYLKLQYDYWKDKHRRFTDEEIHFRFKNSQLVDTGIITKYAKLYLQTLFKDVFPAKGTMVSDVRKSWGLKEKYRNLHYHHAIDAIVLTCMTKDIREKLATSFLEAETLHKREKFLVEKPWNNFTEDVLNLQEDILVVHKHTDNLLKQTKRKLRKRGKIQYNKNGDVIYEQGQGIRNSLHKDTFYGAIERKNDKSEKEIWHVIRKPVDSSFSESDVKNIVDEGIKERIYKHGLKNIRTDEGFIVLPEEDNKKPMLIKRIRLKTRLKNLPKIKKQSHTSQKSKKPHKEHYYATLENIFAMAVYEAENSKGKKTIAHQTISAFDTAKHNQGNQNMEVPVEANMIKNKGKSSEILLPLNYVLKVNQMVLFYEKNREELKQLNKKELSNRLYKITQFESDGRIQLKHHIQGGADKDLKKESSLDFERPAQKLRISLSNFKAAKENEDFKMSASGKIDFVK

SEQ ID NO: 8160 - protein, 1287 aa, synthetic construct
  REGION 1..1287: note = Synthetic
MTKILGLDLGTNSIGWAVRDSNLDKKNQILHSGVLIFPQGVGEEKGVEFSLASERTKHRASRKLYRRRKWRKVDTLKILIENKMCPLSIEELNLWALYTKGKKNKYPTENEDFRAWLKLNPYKARKKASEGNATKQELGRALYHICQRRGFKSGRKDADAGKDMEVYIKEKEKRGDQTLGAYLSDQLDAGIEVRKTKYQADDQEVNSSRISYIEEFDRIVEKQNLDKELASQLFEAIFFQRPLKSQKGTIGKCTLEPSKSRCAISRPLYEEFRMHQFLNSIKIKNTYGNDSQFQFLTEFSHYFQIVKQLFFRKSKPTFKFGDISKAINREAKKRNEFFECNYKDKYPIVGSPTMSQFVSLFDAEDWENCKEKISKNYKLKDNKTVDELIDELWHTLFFASDFVNDITSKKIKEFIKARYNVTEEQIDAYEDINLKQGYASLSRKAIKNVLPFLKAHIIYSHAVFFANVDAIVGKTIWENNKEFIQDTIIDIIECFKDDNLKVDIVNGLVSDFIKEFDNADSDYVLDETDKKNVKEKIVSFYGVSKWENLSASRKESLQTEIETMFQQQLKKRRTGGYYLTKARLDEKIKQFLIDEYKVGETEANKLYHPSAIDIYQDSLSGELESPFTNSVRNPMAMRTLFQLKTLVNTLLEEDKIDTDTKVIIELARELNDKNKRLAIERYQREREAENKNYRVKLEPHAKKAKSKVTEQDIIKYRLWIEQNGKCLYTNNTISIEDLFGSNPKFDIEHTFPRSKSFDNSLANKTLSEKKFNQIKGNKIPQQLETKYLQNALMNIRHWKENIEALREKIEQQKYFSKVASTVEQKNRAIQQKHYLRLQYDYWKDKYKRFTDEEIHFRFKNSQLVDTGIVTKYAKLYLQTLFKNVFPAKGTMVADVRKSWGLKEKDRNLHYHHAIDAMVLTCMTKDIREKLAQSFLEAETLNKREKFLVEKPWDTFTKDVLSLQDEILVVHKHPDNLLKQTKRKLRKRGKIQYNKNGNVIYEQGQGLRSSLHKDTFYGAIERENEKDEKEIWYVIRKPVDSSFSETDVKNIVDEGIKERIYKHGLKNIRTEQGWIELPKENGKKPMLIKRIRLKTRLNNLPKIKKQSHISQKSKKPHKEYYYATLENIFAMAVYKAVNSKGKKIMAYQTISAFDAAKHNQGNKKMEIPVESNMIKNKGKASEILLPLSYVLKVNQMVLFYEKSKEELKKLKNKDLSNRLYKITQFESDGRIQLRHHIQGGADKDLKKESSLDFNKPAQKLRISLSNVKAGFEGKDFVLHPSGKIDFVN

SEQ ID NO: 8161 - protein, 1036 aa, synthetic construct
  REGION 1..1036: note = Synthetic
MNDYMLGLDIGSKSIGWVLLKTKEKPSIPDIGVRVFPEGVERDKGSETSKYKSRREARGTRRVIQRRRFRKNKLTKILSQAGLLPQNKELLRELLLDRKIDKKQRDLHPYKLRAKGLSEKLELFEFGRVLYHLAQRRGFKSNSKNKQREEKNKISEEISDLQKKINAAGCQTLGQYFSTLDPHDQRIRGWYTSRKMYEDEFNLLWKEQSKYYPDILTGELLKDICDETIFYQRPMRWDPQTIGDCELEPGEKRCPRGDWYARRFRILQDVNNLKIRNRDGSERNLTEKQREMVLGELARKAEVSFSGLRKKLQKLSGNDGMYETELFNLEEEGRKPKVKGDEFAAAMIKILGNKIWDTIEEYKKIEVNTSLLELEDDKFAEKMAKEYNLNQEQIEAILNIDLPSKYMHYSRRAIQKLLPEMEKGSLTTEAVKEVYEEHDDKPKTKYAERDILDMPPNLRNPLVQIALLEVRKLINSLIAEYGKPSKIVIEMARDVKGSKEERLKLQDNMRENEKVNKNAIKKLKELGYQITADNILKYKLWEELRGHICPYTGRSISDVALFGQYPEFQVEHILPYSRSLDNSYMNKTLCEVHENNHVKKKQTPYEAYGHNPEKYEQIKQRTAALPWPKRKRFLPPKEGENSINLDECISRELNDTRYICKEVIKYLKRLGGITIKGTKGRVTSDLRHSWGLDTILDTSGSAVKNRADHRHHAIDAAVTAVTTNEHLHRLAESKCPENNVEFLRPWPHFREELAEKIKHINISHRPTKKTSGKLHEETSYGLTDETRQYFQDGKMTRLSPNAWLCKETLNYIYSRTPAEIFKTVSDLDVISKDSKNVREAIEKKFIQNGINIKDKHAEIPESIFDEKIYIETKGGKKIPVNKIRVRVPMSNMIIFTDQNDSPYRACPAGVKGGNHHVEIFEQTDETGETQRIAKIISRIEAVQRRRERKAVVQKDSVSNTKFICALAINDMVLMPTKNGDRDLYRVQKMDVNGTVCFRHHTAATLDDNSQRIFQQAHLFSGKKVDVDILGRIMSCE

SEQ ID NO: 8162 - protein, 1030 aa, synthetic construct
  REGION 1..1030: note = Synthetic
MKSYTLGLDIGSKSIGWVLLENSGKPSISAIGVRVFPESIGRDKGTEVSKYKSRREARGARRLIQRRRFRKDRLVKILWEAGFLPRDKKELHDLLLDAHTRNGQEPNMYPYKLRAKGISERLERFEFGRVLYHLAQRRGFKSNSKSGQREEKNKISEGANELKKKITDAGCKTLGQYFASLDPHSDRVRGWYTFRDMYQQEFEEIWKKQAEYHSELTEELRKKVQNETIFYQRPLRSSEHLIGKCELEPEEPRCPRGDWYARRFRFLQDVNNLKIRNRDGSERKLTDKQREIVLDELEKKSEVAFSSLRKKLQKLSGCDARDATEIFNLEEDGRKEKLRGDEFAAAMIKIMGIKTWESTTPQKKVAINDALLELDDDSFTKKMAEEHELNQEQIEAILDIELPSKYVHFSRKAIQKLLPFMERGFLTSEAVNEVYKNRDKGVGEKPKEQERLGIPPNLRNPLVQTALQEVRKFINSLIAEYGKPSHIVIEMARDLKGSKNERLELQKKMWENEKVNKTAIVKLKELGYRITSDNILKYKLWEECGYKCLYTGRSISDTALFGQHPEFQVEHILPYSRSLDDSYMNKTLCEVHENIHVKKNKTPYEAYHNKPEKYDQIKQMIAVLPYPKRRKFQQEGINLDECIKRELEDTRYICKEAMKYLKQLSGIKVSGTKGRVTSELRHSWGLNTILDTTGSGIKNRADHRHHTIDAAVVAVTKNGHLRKLAESKYSEIDSEFPQPWPHFREELAEKVKHINVSHRPTKKTSGKLHEATSYGLTTEVKRHFDDGKIMRLSDNAWLCRETFDYVYSRTPAELFKAVADLDIIPGDANNVWEAVEKRLVKSGINIKDKNAEIPEKVFAETVFIETQNGKKIPIKKIRVKVPMSNMIILTDQDGIPYRACPAGVKNGNHHVEIFEQTDGNGQTKRIAKIVSRIEATRRHSEHKAVVQQDHGPDAKFVCALAINDMVMMPTKNGDIDLYRVQKMEINGQVCYRHHTAATLDDNSQRILQKAHLFTGQKVNVDMLGRIKPVE

SEQ ID NO: 8163 - protein, 1126 aa, synthetic construct
  REGION 1..1126: note = Synthetic
MSVPFVIMSVMETMKLGIDVGTNSVGLCALSVDASGRPLKILNSMTVIHDSGVDPEKQKPADTRLATAGTARRMRRLYRNRRKRLRQLDEKIKELGWPIINLETLNDPYAPWKIRARLAKSKLPKEELPAAMSIALRHLARHRGWRSPYERVESLHSKHDDSELFQQLKRRVSDEIGRPVDELSTPAQVICEWGLSPAKRLRNAGKTKYGSDSVKNGVSVSGDLKAGILGGKLMQSDNANEIMRIGKMQELPQHLILELIDLVFHAASPVGSASAKTKKDALPGQGKYPRASKANLEFQRFRIVQVVANLRLTESKTGEIRLLTPSEKTKIIDFLMSADETDGITWGDVAELLGVDREQLNGTAQLSPDGERASSFPPINVTQKRIIESEIKPLLTWWQTADFESKNALVQAISNAEVIDEDSPGFKQAELFLSSCGDDILTKLDGIKLPAGRAAYSEDSLKRLSDRMEKDSVDLFEARKLEFGVPNDWVSPADPIGEPVGNPSVDRVTKIVNRWILAVTKKWGVPASVNIEHIRSGLMSKRQVRAYEQDVKNKREQNLRIMEEINEKITGHKYASRSDITRYLAVQRQNCQCAYCGECITYDTCEIDHIVPRKGPGSTNARNNLVAACLRCNRAKSNTSFSVWAEECGLSAVSVDAAIERVWQWNGDAGLSVQQFKNFQKDVIARLRKRSEDDAIDNRSIESVAWMANELHHRIHAHFKQLGHDVQVNVFRGAITAEARKASGFEGKVNLIGGPGKTRLDRRHHTMDAAVIALMRPKVAQVLAERMNIRTSQRLTRSGENWKAYQGSTIEARQLYAQWLSNMDKLLDLFNFAIANDEIPVTQNVRLRLGNGNAHDASVRKPVPKHVGDSWALDEIDRVITEAAWVALTRDPDFDPGSGLPANPNREIRVKNSWLKAGDNLGLTPRKTAVIAVRGGYANLGKAIHHVRIYRYGTKSPKYAMLRVFAHDLLRDRDKNLFTIPLRESSISLRTTNAKTRKAIVDGTATYIGWLVTGAELELDLSNPYFKKGIIGSFLEDFPNTSKWVVDGFPDQNQLRLRPRQLAGEGIKNIEVSDGSKEILSGKGWRPSVDALLSKALFAHVIWRTALGGSRTKSSAGLPASFSLKN

SEQ ID NO: 8164 - protein, 1123 aa, synthetic construct
  REGION 1..1123: note = Synthetic
MFVYLNSPRGFGPATFLTDLPHFCIIFGNNDFMDNRKYHVGIDVGTNSVGFAAVEVGDSGSPIRFLNTMVVIHDSGVDPEQKKYAITRLASAGTARRTRRLYRTRRQRLRELDDFISNELGYPLVNLENFADPYEPWKVRADLATIKLPADELPEAMSIALRHMARHRGWRSPYQRVEALHLHAEISEEFSALKKRVMEKTGDVFSDDATPAEVLVDLMGRQKIRGADGMLSGKLRQSDNANELRKIASVQGIDDETLNRIIDRVFFSRSPKGKASERVGMDALPGQGSKPRALKAMPSFQKFRIVSVICNLRIKDSGDDNRPLSMEEKEQLIGYLMSSTTDDHVTWTDVAELLHVKRSNLQGTAKEGPDGERPYTRPPVNSAWSKIKDSKIKSLVALWKTGDVDVQSAIVEALSNASVLEDARPGADIVVAYLESLDDKELESLDKVGLPAGRASYSEDSLERLTERMLQDDCDLFEARKREFGVSDDWKPPADPIYAPVGNPGVDRVLKIVNRLLMAAEREWGAPTQINIEHVRSGFSSELMQREFERENERRRAQNEEAVKAILTEKGGNSHVSKYDIIRYYAVKRQNCQCLYCGTPITFSDCELDHIVPRKGVGSTNSRVNLAAACRSCNRDKSNLPFAVWAGKTSNFDVSIDGAVSRVKQWQRSQNEGAREFRAFQNEVISRLLKTTEDPEIDSRSLESVAWMARELHHRVEYYFQSKGAQTQVSVYRGAVTAQARKSSGLEDKVKMIGGGGKTRLDRRHHAMDAATIALMTPGISTTLSEKNNLRDAQKFTGQSETWKDYCGRTETAREHFAVWKSNMERLTDLFNDKLENDAIPVVQPLRLRLSDSKAHDDGIGKLDSKKLGSVWSLADIDRAATPQIWTALTRCDDFDPTKGLPENANRVIRAQGVKYESEDNIPVFPSNVAAIAVRDGYAEIGSTIHHARIYRIDDGKKIFYSMIRVFAVDLLKHQAEDLFTVKLPPSAISIRTCEDSLRRALSNGTAEYLGWLVPGDEIIVDTSDKAFHTGQIGDLLRNFPVNSFRLTGFPSNSRLRLKPVLLAGEGLRDDAEDSIKKILSGQGWRPAINVLFSKGKPRIVRRNSLGIERPSSNNGLPFSWEA

SEQ ID NO: 8165 - protein, 1120 aa, synthetic construct
  REGION 1..1120: note = Synthetic
MSHEIDYKVGIDVGTNSVGFCALQVDANGMPVKLLSSMVKIHDSGVDPEKVKSAVTRLASAGFARRTRRLYRRRKKRLAELDRKLVELGMPIIDLESLPDPYAPWKARLLLVQEKLEASEQKRELSIALRHIARHRGWKNPYERIESLYHVQEDSDLFEDLKKRVSEKTGAVFVGGETLPEVLSHVGFNASERLRSAPSVKYGQRSLIDGENVEGETKDGIIGGKLMQSDNANEIHKIAQVQEIPDEIVKTLIDLVFKAESPKGSASKRVKKDSLPGQNNKPRAEKAHLSFQRFRIVSVIANMRLIDPENGELRKLNAAEKSKLIDFLMLPDDSDGITWGDVAEILDVPRECLQGTSKLAPEGERASSFPPVNVTHSRVTKCGVKPIVEWWEEANFEEKNALITLLSNADELDPDVPGADSANKLMESLSDKQLENLDKIKLPAGRAAYSIDSLDRLTEKMISDSLELHKARKAEFGVPDDWRPPSDPIGEPVGNPAVDRVLKAVNRWLLAAEREWGAPLSVNIEHARSGFTSESQVREYERDLKRRRERNQRVVSEANRKLGSQMVERRSDITRYVSVRRQNCQCAYCGEPITYQSCEMDHIVPRKGPGSTNTRDNLVAVCVRCNRAKTNIPFAVWVESTTIPSVSVKEAIARVRYWIKDEGLTLKQQRNFQNDVINRLKKKSADEEIDNRSIESVAWMANELHARVKGHFESVGAETKVTVFRGAITAEARKATGFEGKVNLIDGHVKTRFDRRHHAMDAAVISLMRPSVAKTLAERSNIKQSQRITRRAEDWKNYRGRDEGSRNIFDRWSRQMDQMLVLFNIALAEDAIPVTQDVRLRVGNGRAHDDTIRPLAAKRVGDSWTLQEIDRAATEQMWCALTQQSDFDPVEGLPENQLRKVRVKNIFYEANDELRILPKQIAAIPVRNGYAEIGNTIHHARIYKFGSKKPKYGMIRVFTHDLLKNKSDDVFTVELKPSSVSMRNAESSVRKAVLKGEAEYLGWLVTGSELELDLSDSYFSQKAIGELLKDFPETNRWVVSGFDSNKQLKLRPRLLAAEGSEKVALNDGSKVIICDKGWRPSVNLLFSKASFLRKICRPALGRERTKSDSGLPISVTLKES

SEQ ID NO: 8166 - protein, 1120 aa, synthetic construct
  REGION 1..1120: note = Synthetic
MNAFCTYRVGIDVGTNSVGFAAIKVDEHNTPQKVLNNLVVLHDSGVDPKKATNAKTRLATSGVARRTRRLYQQRRKRLQDLDNHIQALGWPIIDHEESPDPYLPWKTRASLATEPMEEDKLGEALSIAVRHMARHRGWRSPYERIENLFIEKPASSQFEAMKTEATKATGVLFDDDVTPAQVVVEMGLCPDIRLRTSAGNKYSANSVKGGENVAGKDKIGIFAGKLMQSDNAGELLKIGKIQNLNESLVKDLIRWVFQAKSPKGAATQRAGFDELPGQEKFKRLAKDHPEFQEFKIIQVVANIRVKDGSGLRALSPEEKNTVIDFLMDDHGEDGITWSDVADLLGLKRRQLHGVSSQSPDGERPSTYPPSNSTNRAIYRSKIKSLIEWWKNADTDEQNAMVKLLSNSDVLDTDEPGSESAEAFLSSLDENTLAKIDTDVKLPAGRASYSLDSIRRLNQCMFKNSVDLHEARKIEFGVDDSWVPPTEPIGAPVGNPAVDRVLKIVNRWITATEKKWGTPISVNIEHVRDALQSEKRVREYEKENKQRYERNQKIVQEAHDTFGITIKPGRYDITRYVALRRQNCQCVYCGTPIDFHNAQMDHIIPRKGVGSTSTRDNLVAICEVCNKTKSNLPFGVWAESSARPGVSVKEAVVRVRAWKRDDGLTAKQEANFKKDVIARLTRTVEDAPIDNRSIESVAWMARELRERIAGHYRQQGNETTVNVYRGWITSEARKASGFENKVNFIGGHGKIRLDRRHHAMDAATIALMSDTVAQVLTERNSIREAEYIKNVPTKTWKEYRGSTPTQRVIYGKWLNSMNQLLFLFNEELYHDSIPVMQSLRLRLGNGTAHDAIIRKMVGKQVGSAWSKDEIDRASTPQMWIALSRDPDFSEKDGLPENPHRELRIKNEWFKANETIPVFPKKIAAIAVRNGYAEVGDTIHHVRLYAIPGKKTTYGMVRVFGFDLVQHKDKDLFNVPLGPETLSMRDAKPVTRNAILEGKAEYLGWLVRGTELELDLSHSYFHKNAIGEFLNDFPDNKRWVVKRHDSNSTITLRPLIISSEGLDKFDLSDGSLQIISTKGKGWKIAVNALLGNSLVKKIHRNALGEERETSNCNLPVTTVLKD

SEQ ID NO: 8167 - protein, 1094 aa, synthetic construct
  REGION 1..1094: note = Synthetic
MSDVINFRVGIDVGTNSVGLAAIEIGPDNLPSKILNSVVFTHDGGVDPQNRKTAATRLAVSGVARRTRRLIRRRKQRLRALDVFLQSHGYPCPNLEEFDDPHFPWHARAQLVSEPVAQEELPELFSVAIRHIARHRGWRNPYSRVESLHLPTPPSEELNNLKNRLIEETGVVLDEDATPAEIITEVISDMRKIRGPEGILGGKLRQSDNANEIRKIGEVQGLDSSFINDVIDHVFAAESPKGSSAKRAGKDELPGQHDKFRAEKAHPAFQEFRIVSVVANLRIKDLETGSIRKLTRDEMDTVVTYLMNASAEDSVTWDDVATKLEISRDCLSGTASPGPDGDRPYLIPPTNTTNQRILESKLKPLIAFWKNADLDTRSTLINEMSNSSEITDDSPGAEEVHDFLTSLADTELEKLSTISLPAGRAAYSVDSLQRLSRRMLNDGVDLFTARKLEFDVPDDWRPSAAPIGDPVGNPGVDRVLKIVNRWLMNVTDKWGVPATVNIEHIRGGFGSEAMAREYEREVGQRFKRNQMIIAKIQKDNDISGPVRSADITRYLAVKRQNGACAYCGTTISLGTCEMDHIVPRKGQGSTNSRSNLLATCRSCNHSKGNRLFNLWAKEQNNPNISFEKAKDRITFWIKDDGLSPKQWNQFKRDIIMRLGRVTEDDELDSRSIESVAWMARELRHRIESHYLSTGSDTKVNVFKGMITSEARKASGFEMQVEMIGDRGKTRLDRRHHAMDACTIALMSPYVAQVLAERINLREYQQLTRERFTWKEYRGKDETHRISYGKWLNSMNRLLVLFNEALRSDSIPIMEDLRLRLGNGTAHDATIHKFGKKRLGDAWSFEDIDKASTPQMWLALTRCSDFDQKDGLPENPERTIRVKDVYYTADDELELFRTKAALLSVRGGYAEIGNTIHHARIYRINGKKISYAMVRVFAVDLHKHRHEDLFNVVLPPESISIRTAAPKIKQALADGTAEYLGWVVAGDEIEIIPSDPKAFAKGAIGELFEDFPGLTRFKLVGFDSPSKLRLRPVKLSSEGLNDNFTSGSHDIIAKAGWRPEINVVFSKAQVRVIRRTTLGNIRNTSSSHLPSSWQV

SEQ ID NO: 8168 - protein, 1091 aa, synthetic construct
  REGION 1..1091: note = Synthetic
MKEFNFNVGVDVGTNSVGLCALEIGDNGLPTRILNSMVYVHDSGVDPEQRKKAITRLATSGVARRTRRLYRRRKQRLRALDTFLKENGYPIVDLDQFPDPHTPWHIRAKLAREKVSESELPTALSIAIRHMARHRGWRSPYARVESLHSEAPDSQEFTNLKKRLVEYNGVVPYEDATPAEVIADMISDYTKIRGNDGILGGKLRQSDNANELRKIGEVQGLSADQVNAIIDTVFKAESPKGSAASRTGRDELPGQGHLPRAEKAHPAFQKYRIVSVVANLRIKDDDGTSRILTEEERNKVVAFLMEATSDDAVTWTDVAEVLGIVRDHLEGTAKEGPDGERPFAKPPVNTTNQRILVSKPKSLVSWWKEASDDEQAAMISMLSNAEILEDDAPGAASAQTFLAGLSDKELEEIDGINLPSGRAAYSVDSLTRLTNRMMNDGIDLHSARKIEFGVEDSWKPAAEPIGAPVGNPAVDRVLKIVNRWLMGIVKEYGYPTVVNIEHVRNGFGSEQQAREYERESGKRAERNQQVVDQIHADQGFTGRVRYADVTRYLAVKRQNCQCAYCGTPITLTDCELDHIVPRKGVGSTNKRNNLVAVCISCNRSKGNIPFRVWAGKNPNPDISLEKAIDRVKHWQYEEGFSTKQWYNFKKDVIDRLARSTEDPELDNRSMESVAWMANELRHRVEYFLQQQNPDSRVGVYQGKITAQARKASGFEDRVEMIGGGGKTRLDRRHHAMDAATIALMSPGISKTLAERINLRDTEQLLRKAPTWKEYRGRSDGAKQSFGEWMNKMDRLSFLFNEALATDSIPVMENLRLRLGNGKAHDDGIRKLTYKTIGSVWTVAEIDRASSEQLWVALTRCADFDEKTGLPEDDTRQIRVKNQFFTAEDTVGIFGTGAAAIAVRGGYAEIGNTIHHVRVYRINGKKPVFAMVRVFMCDLISHRDEDLFTVELKPQTISMRTAEPKIRKAIAEGTAEYLGWMVAGDEIEIDISNPKLISGQVKEMLDDFPGQTRFRVAGFYSNSKLRLRPLLLAAEGLNVDCSDGSQKIINGGGWFPALNVIFTYGNPLIIRRNSLGVQRNNSRNSLPISWHA

SEQ ID NO: 8169 - protein, 1090 aa, synthetic construct
  REGION 1..1090: note = Synthetic
MKTMNYNVGVDVGTNSVGLCALEIGENGLPTRILNSVVYVHDSGVDPEQRKKAITRLATSGVARRTRRLYRRRKQRLRALDDFLTAKGYPIINLEEIADPHAPWHIRAKLAREELPADEFPSALSITLRHMARHRGWRSPYASVKSLHLPAADSEEFKKLKERLTEYNGVMPDEDATPAEIIADMIADYTKVRGEGGILGGKLRQSDNANELRKIAAKQGISTEDINDIIDVVFDAKSPVGSAASRTGKDELPGQHHLPRAEKAHPAFQKYRIVSVVANLRIREDAGTTRSLTKDERLKVVEFLMEASSDDAVTWTDVAELLGVVRDNLEGTAKEGPDGERPYAKPPVNVTNQRIVKAKPKALSLWWQDASEDERAALIALMSNADILEDDADGAEAAQSFLAGLSDKELEELSGVDLPAGRAAYSVDSLTRLTNRMLNEGIDLHEARKAEFGVDDSWKPSADPIGLPVGNPGVDRVLKIVNRWLTSAIKEFGYPNVVNIEHMRDGFVSEKMAREYERENGKRAERNRNIVEQIHADQGSGRVRKSDITRYLAVKRQNCQCAYCGAQISMNDCEMDHIVPRKGVGSTNTRNNLAAVCISCNRSKGNIPFRVWAQQNPNPEITLAKAVDRVKHWHYEEGLSTKQWNNFKKDVIDRLSRTSEDPELDNRSMESVAWMANELRHRIEYFLKQENPNSKVGVYQGKITAQARKASGFEDRVEMIGGGGKTRLDRRHHAMDAATIALMSPGISKTLAERINLRDTERMLRKAETWKEYRGRFDGAKQSFGEWINKMDRLSFLFNDALATDSIPVMENLRLGLGNGRAHDDSIRKLTYKEVGSAWTTTEIDRASSEALWCALTRCEDFDAKTGLPENDTRQIRVKNEYFTAKDTVGIFGTGAAAIAVRGGYAEIGNTIHHARVYRINGKKPVFAMVRVFMCDLISHRGEDLFNVELKPQSISIRAAEPKIRKALADGTAEYLGWLVAGDEMVIDISNPKLISGQIKEMLDDFPGQNRFRVAGFYSNARLRLRPAMLSAEGLKDQHCESSYKIIDGGGWFPAINVICQYGSPHVIRRSALGVPRTHSKHGLPESWHA

SEQ ID NO: 8170 - protein, 1120 aa, synthetic construct
  REGION 1..1120: note = Synthetic
MNAMKHYHVGIDVGTNSVGLAAIEVNSKGLPLNILNNMVVLHDSGVDPGKPRYETRLASSGSARRVRRMIARRRKRLQKLDRYIETQGWPLIDLSSLPDPYTPWKIRARLTQDRLEGEEQGRALSIALRHMARHRGWRNPYEEVESLHLPKEASKQFNDLKERVTKVSGVIFDEGATPAEVVCNVGLSPNQRLRSAPSTQYKDGAILAGEPVGGKPKEGLLGGKIMQSDYANELRKIGVVQGLSNEKVNELIDQVFASESPKGQAGKLAKRDELPGQEQYIRAPRAHPAFQYFRIVATVANLRIQEEANSKHKRLLSRGEKTKAIEFLMSADGSDGVTWSDVAKELGIERECLSITAKQGADGEQLSSFPPLNSTKINILQSKVKPLIKWWKKASDNEQAALITALSYADKLADNQPGAETVRQFLSSLDEQLQEKIDKIPLPKGRAAYSVNSLQRLTRRMLEDSVDLFDARKREFDVENDWTPTPDPIGEPVGNPAVDRVLKIVNRWLLATTRKWGPPKVVNIEHIRAGFTSEFQARKYEKENKENRDRNLAILEELCDKYGTSGKIRREDIIRFAALRRQNCQCAYCGEAITFFDCEMDHIVPRKGQGSTNTRNNLVATCERCNKSKSNIPFSLWAENCSIPSVSVESVIDRVRTWIKDPELSPKQYNNFKRDVIERLRKTVDDDAIDNRSIESVAWMATELADRISSHFRGAGTDTQVKVYRGWLTSEARKASGFEGKVNLIGGRGKTRLDRRHHAMDAATIALMHQSVAQTLVERASIRESERLRRVVSSSWKDYRGAGRDKQFSYGSWLNSMNALAELFNRAISADKIPVTQNLRLRLGNGEAHDATIRSLELKRVGASWTMEEIDRASTPQLWLALTRQADFDKKDGLPKNPLREIRVKDQWFNAKENVALFPTKSAAVAIRGGYAEIGNTIHHARLYKLPGKKPTYGMIRVFAIDLLRAQHSDLFSSPLLPESISLRTAETKVRRAVEDGTAMYIGWLVDGDEIVLDPETKTFNSNKIGEYLSEFPGTKRWRVDGFPDKEKLRLRPLQLAGEGLPEDVSAGTEEILSPKGNGWRVAINALFKSSQLVVVRRTALGTVRKLSRRHLPLTTRLRG

SEQ ID NO: 8171 - protein, 1125 aa, synthetic construct
  REGION 1..1125: note = Synthetic
MKGIEMKQHVNLKSNGKHRIGIDVGLYSVGFACIEVDERRAPKRILNSVVYVHDAGVDPSAQKTGITRRAVSGRARRARRLVRNRKKRLGALDSLIESLGWPLPSLEDFENPYEPWLTRKQLVEERLEGEEQKEALAIAVRHMARHRGWRSPWERPESLLRPAPESEFLADFRAKVLERGTGEPLEEGLTPAQVVCALGLDDPLGATKVRFRGVESKSPDVLVVPLQKLHQSDNANELRAIGAMQGLSDEVVAKLIGAVFRADSPKGKAGERAGFDALPGQERFRRAGRWSLAFQQFKIVSVVANLRIRDAGGGRVLSAEEKRGVIGYLMASDGKERVTWYDVAEDVLGIEREDLLGTASLSADGERPSANPPTNTTNERILASKSKAFKAWWKAAGDDAREAMLAFVSNADEMDEEAPGAEEAGAFLAEASEDDLGELDKVARSLPKGRAAYSVDSLSKLTAYMLDHSVDFFEARKAVFEVGNDWRPPADPVGMPVGNPAVDRVLKIIARYLKAAEREFGKPVAINIEHVRDGFGSVKIAREYEAALKRRNARNEKMVDEIRERLEIEGPSRADRERFAAVRRQNCQCLYCGGEIGFTTCEMDHIVPRKGRGSTNTRDNLVAVCRDCNQSKGKIPFAVWAAGTTRANVSLEGARERIDSWLKDDGMSAKEWKNYRRAVFGRLRKASADEEVDNRSIESVAWMANEARARIAAAYPEAEVQVFRGSLTAAARKVSGFEGKVRLIGGNGKTRLDRRHHAMDAATIALMRPGIAHVLAIRENMRISERVSGNLNDWSKFRGHDGAQRAHFEEWVGQMARLRELFNAALENDEIPVMRNLRLRLGNSKAHDDKVRPMKKKAVGASWTLDEIDQAETPALWCALVRCPDFDPAMGLPENPGRVIRVNGTRFSGGDAVGVFGKNIAALKVRGGWVEIGGTIHHARLYRIEGKKPAYAMIRVFACDLQRHCDEDLFSVELAPQSISMRTAEPKLKRALAEGRAVYLGWVVVGDELVLDLSDPVFDKGQIGALKAEFGGQWPLSVSHWRIAGFFSPSRFRLKPAFLAGEGLRNLPHEVDGDVAKIVDGQGWLPAVNIVAGKAGMRVVRRSALGRERWGSDSGLPSSHVLTKS

SEQ ID NO: 8172 - protein, 972 aa, synthetic construct
  REGION 1..972: note = Synthetic
MSNPQSHETPWILGLDLGTNSIGWAAIGLDSDGNPSRIIRTGVRVFPAGTDGDISTGNDASRAVERREARLRRRQTDRRRRRKWLLMKTLQDAGLLPAGPIDTPQSRMSLLRDLDSQLFDDKTRSAHPHTCYYDLRRRALDEELEPYAFGRAIYHLGQRRGFLSNRKSAPKDDEELGAVKGGISELDRMIRESGSRTLGEYFSRIDPKEHRIRQRWTSRAMYQEEFASIWDAQEKYRPDSLSSETRARIEKVIFHQRPLKSQRHLRGRCSLEPNRIRAPKDLLISQRFRLLQKVNDLRVVTPDGEIRLLEPDERAKLIESLEASEHLTFPQTRKLLGLPRGSTFNLELGGETRLPGNRTAARLASAFGEKWGELTDAEKEVVVEDARSIGDRGARVRRAQGKWGLDEERANAFADVVLEEGFMDLSRQAMSRLLPKLEEGVAYATARKEIYGDESRRDPLEKLPALNKFEEWRGEIRNPVVTRTIGQLRLVVNALIREYGKPDMIRLEMARSIKKPRQVRKDITKKNRANQKLRDQAREEIVRNALIAEPTNTDVLKWQLAEECRWICPYTGRQINAKSLYSDFDIEHIIPYHRSFDNSYTNKTLCYHEENRNVKRNQTPFEAYGGTPTYDEILSRVEQFFGQNGVVLAKLKRFRVKDSEEIEGFRNSQLNDTAWATRVAIEFLGTLYGADSMGVDANGSKRIRTTTGGLTASIRNSLDLNGILDDGGTKTREDHRHHAVDAVAIAITTDSMVKRMSDTAKRAPQRESGMPSLEGVTPPWPGFLNEVRASISEIVVSHRTSRKVNGKLHEETNYSPEGRSKGSKKVVKNAVELGGPDSKRYVVPGNNHHIEVFELPNGKWKGRLVTCLEAMGRLRRGEPVIDRELDGARFLFSIAWGDTLELGADGDNKVHSVIRGLESSEGVTMVDVADARLKKDIKAAGALQRPRLNPMRQRGCRKIQVDPIGRALPSND

SEQ ID NO: 8173 - protein, 1102 aa, synthetic construct
  REGION 1..1102: note = Synthetic
MRYRLGLDMGTNSIGFAVIELSKNDYPVDLVTMGVRVFKDGRNPKDKQPLALARRTARGLRRQRDRRLQRKKQILRSLIDNHLFPITEEERQSLKLLDPYTLRKEALDRPLSDFELGRALFHLGSRRGFKSNRITDEQENESSSSGSSKKMTQADKISNLSVEMNENGARTVGEYLYLRIKEGSGARFRGGDFNCYPSREHYVDEFNDIRKKQAEFHKDVDWDSIYNAIFFQRPLRKQERGKCRFYTDKDRAYSALPSAHQFRILSEINNLKFNDEDGNTIGLSDFEKDKLFSALDNCKTMSFSKIRQVLKLGSSCKFNLEDDRKDKLLGNETSFMMRKPEYFGALWDEMSLEAQDDVVDLLLEAETDEEVLEKLALFDLSDSQKDKLLTIKLGRKVGSLSSEFMRDCLAIMKAKHVRYDEAVSDMDLHHSYNPITELQDCLPYYGKVLTQTVSGAHPEADENNPEYKYGKISNPTVHIALNQLRKVVNSIIEHYGKPEQIVVELSRDISESTEKRNEHYREQAQREKENERIREQIKELGIPKPTAWDIKKYKLWEELGKDSNVRKCPYCGKPIPASKLFTKEIEIEHILPYSRTMLDSMSNLTLAHAHCNLKKSNLTPYEAFSSNPDGYDWQEIMQRIQNFPAEKRSKFSKEAIVRFDEGEGFIARQLNDNRYLSKAARDYLACICPSSHIWGIPGFNTSYLRSKWGLNLILNKNGDPYFKNRSDHRHHSIDAVVIGLTDRGMIKEMADLNKTYDSVARMNVPPFPFDEDRVRYLLRNMIVSYKPDHGYQSRFFKETATGLKYVKTRIKVADLSEQLVKEDRLFSKSLSEKLNSLLDSGKSFRAVKKALLDKAKASQKTDEPEIDVYEKVWVTRVNLIDLEEKDIMEGRVFNPKIRKYLIDNTVDVIKDKRALKSRLGELSERAGIKRVRYVPKNQVFSSINSVPNKWYERDGVCFVSIWRISQKGKNPKYQGQFISYQEAYDHESGKLKEYPKPHPAAKKLMSLYKDDVVRIYPNDGSSPYYAICAGFATTRNKIDLQPLFCAKSIGSWIYETNSDIINDYSRWFDKADGQNFISINALFSDNKVVVVKVSPDGRIEHQ

SEQ ID NO: 8174 - protein, 1054 aa, synthetic construct
  REGION 1..1054: note = Synthetic
MAMVLGLDMGSNSLGWALVDPEKNTLIDMGVRIFQAGVDNLNGAKEESRGVSRRLKRGMRRQYRRTRQRKKALRLFLIMNNLLPNDANEFDVLLMTDPYPLRKMGLDEKLTLLELGRVIDHINSRRGFRSNRKASSDEEDTGVIFEGDKTGTKPGINEIEDALDSRLRSMKAYRIIEPEIELSGLQDLDGFRTAGEYLASLDPVVRRRRCRFTLREHFEIEVQILFKKQQQFYPKLLTDEMLTQLNKLIFWQRPLQSSRKLVGNCTFEPGKKRSHKSHPDYQRFRMLQQLNMFTIRGSGRIKDDEAVLMEGERSALYNHLITKGKLKEIQDKSTAVIKLLKLDKNLTWGFGLNQLDAPYTELAMKSALGPDLFVTLCKDEIHDIWNVLNFAVDKDWVIQWMIKQYQLTEDQAKAVAKIKLEDGYGSVSLRAARKILPFLEQGLLYHEACEKAGFKHSQPQTDIPVTNRIPALAPEDARNPIVQTSFAEMRRVVNLLIKTYGPIDTIRIEMGRDVKQPKNERLKSDKINRENKAKNDEVREMLRSEFGLHNPSKNDIQKYKLWDSQNHKCIYTGVNISQDDLFNAPIDVDHVIPYSKSLDDGMANKVVCLRDINAKKGDRTPLEAIQAGLLNEHELRERLEGLVRANKMNPRKARRFFLSKEEVAELVGDDFHIRQLNDTRYVARLTHKYVRHVCSDISISTGVLTSMLRHKWGLSGIIPELAEQGLAWIDAEAVANSQKSRADHRHHAIDALVVALTTRSIVKQFADLNKSNELHNLDKHIGSGRISIPLEPIPGLRALALERTKNILVSHRVNRKVRGQLHEETIYGLHKDYNGVHIANANGMPLYAVRKPIESLSPGDVLSIIDGGIRRAVANRLLELGEDIDNPKFTVPKTAFLTPLFLPKKDGSKGPHIKSVRIARPSTGMVRIREHGAYAETGSNDHITLGPFNEKRKREYFNVKTLFEASSAMKGKQTNTEAMTFRTNEMYVQELDNGEGNSAQFYRVQKINKADGQICFRHHSASGLIDNNSRLLKTPNTATGAKVAIDALGRLLNS

SEQ ID NO: 8175 - protein, 1363 aa, synthetic construct
  REGION 1..1363: note = Synthetic
MKKYKLGLDIGTNSIGWAVVSFEGEVITESQQNTVDVPLEIVKSGVRLFSDGREPDSKVSLAASRSTIKAQRKQKQRKINRVKLLNSYLLKENIISQENLDTHVYTLNAYEARANAVSNNPELNKVLRAILHLNKHRGYYDNSIIKPDLAKIKAEEYKNILKVMEEFLGEDNKFNNLTEEEKEKFVADILSLETYKNDTNKKQEFFNKWQLEGFEFEKEIKFKKDTKKINIFREIKNAKGLNDELSRIKKGIPHLAKILKDGNLTLGQFLYKQYLENEKIKETNFTAQKAVRFTPEGEYFASREMYEDEFERIKELSQKASLPISVNQWNRIHDIIFKQYPLQSKEHLIENCVLEEDEKVAPKTSPIFQKFRSLQFLNNLQYDFVDSESDKPSYKNLNQKQKEDLLNIINQENLTLKKLQDSLGKEYKDKILKTNWKVKDDNVLMKSNNTFAVMNSCLGDKWSNLTLESQDKLVKDILDLEFLDINENKKEDFYTKWQNLGELDNLFIEKGTTKTPKTIFTELTKEKGYANYSNKALLKLIDAWENTNGTIDKIIEQVYPSYSHAEEKGVLPTVKYELPYYGDLEVLKNSLTGEIYGDPVLKSDGNVELSLEIKRGNQTLTKKAIAKHGSQAHKELTTGKINNPTVHIALNQIRVVVNSIIAEMQKKFGEGFKFDDIHLEMARDIINSPATKKEIDDKNLINKNWNEFIDKELGHKASRDENRKLKLWYEQQGYDLRKSPKDNQKVEKAQCIYCGDSIGYTTDVEVDHILPISQTGDDSFTNLVLVCRQCNQIKENKTPYEAFSNHKDYNYDDLVKRAEKIYGKKNPKYLRFTPSGNEIAEKLRENFSNNQLNDTRYITKVAKQYLSALVENNHNVVCMQGKITSSYRHYLGLNEILNVNEENKKNRDDHRHHSLDAITVALINRGLVQKVSGELENRMQKFKEQKIVGEAYLKERKSAMGDILKYSVSNDLIKYGDFYNKVKESLNSIIPSVKVNHKTQSALYKDTAYGIVLDSKGEVIRNKEGQYLIKERKAIDGLSLGDISSVICLNYKANPEEPYNAEEDSLRMDIRKYLAENGLSVFQTDMWNLKKEIKEPKGKEAKELSNLLKTFGEHRGIKKVSLKYYATVKPINQKQKRKDTYSQFTKDVKGTDSPYKAYVVDSYKCVDIYQISKGVDRKTNQENFAYQGNFILYADFAEHKGNRGAESYKNSENFKEILTKDKNPKFLMRLHKEDTVVAYKKEDGKIDSEKDIQFLFVVKGLQRLGGRLDLRPLLLSDNKQQPYNISTVLRKEPKEHDSFFNLKKVAVLPNGEIRGIQMESLPKEYKTWLEDKKKEAKKDKKSQENNNPQENSKESTEENNNSE

SEQ ID NO: 8176 - protein, 1125 aa, synthetic construct
  REGION 1..1125: note = Synthetic
MATGFSQVGEAKWRLGLDLGTNSLGWAALSLSKGSPARPDGLLDLGVRIYSDARDPQSKESNAATRRGPRGARRNRERYLLRRAGFLRALIETGLLPADQAERHALEKSDPWILRARALSEPLTLHEVGRALFHLQQRRGFKSNRLTDKGSDEKGAVESGAETAREEMNECGAETLGELKGRPRQSIQEENRELPQGVRKPMPLARVRAESEGSKLAYSYYPLRSMIEVEFDAIWDAQARHHPDAMTDTARSSLWELLSFQRPLKPQPVGRCTFESEEERAPSALPSMQRLRIYQELNNLRVSRSSGEPQLPLKPDERDKLTVVALSKPKLSLTQMRKTLGLSSTATFSIEAGGRDFLDGDKTHDIITANRKSNSGSWAGWADLSPDEQEALAEILLGRVAPDKGSHPAVVETHQKVVARIAKGLGLTEGQARQLLEAKEDEALVAFLSERYGLEWSGAERIVSLRLPDGHGRLSRTAGAKVLAQLEAPDENGELRTYDRAVVAAGYFHHSLRGTGEVFDHLPYYGVVLEQSVAFGTGDPDDIEEKRIGKLANPTVHVALNQLRKVVNALIERYGPPAEIVVELSRDLPLGAVEKNKLEKRQRDNRQENEKRAERLAEFGVANNYNNRLFLRLWDELDALGRKCPFSGEHLSQDLLVRSMSGSGELEIEHILPFSRTLDDSFNNKALALREANRRKGSLSPWEAVERGIFDRETIERSLRDFPPAKAWRFGPDAMDRFENEERDFLDRQLNDNKYISRLAAQYLKSLGSKVWVINGRLTADLRHHWGLNAVLTGHNRAPADSEAEGVKKNRNDHRHHPVDAFVIGCTDPWMVQQAASEAKKVEEEFAAGQRDHRRLLAGIPDPFADYLLAVKEAVGRIVVSHKPDHGIQGKLHEDTNYGVVRTQAGETRLATRKSIAGLTPGEIKNIGDDRIRRELVALTEGLGDKERKQALIEYSERTGHKRVRVHKVQASFERIEHGPDSKGKRHVRAVIPGDNHCMDIVETSDGKWHGVAVTRFQAHKSGWQRNWRKVHPDALLVMRVRNGDLIRLENEGMERVMRVVRLNPSGNRIYLAAANEAGDYQRRHDDPDDDFRWDLAGIGGLKSRKARLVRVTPDGQLIDPGLPS

SEQ ID NO: 8177 - protein, 1202 aa, synthetic construct
  REGION 1..1202: note = Synthetic
VYLKALIPLKVNTLGGIIYFMLKGVLMEEIKQLNRKTDVPKPTDLNYRIGLDIGIASVGWAVLENDSHDEPFRIIDLGVRIFDAPDNSGELLSAKRREARSTRRRTRRRGHRLERIKKLFETEGLIDIEEFETRYKKAGLPDVYRLRYEGLDRVLTDDELAQVLLHIAKHRGFKSNSKAEETENDSDATKKKEIGAIKESISANKRIMEEKGYRTVGEMLYLDEKFKIDCDLNTNGYIFCPRNKRGEYKVIILRDVLVDEVHKIFESQRKYGNESASDKLEKKYLDIFLSQRSFDQGPGYPSKYALDGFDFGKCPFEEKNGERRAPKAAYTSELFVALQTMNHTKIVDTDGNKRAFTELERKKIIQLFHIQNDVKYSEVRKELALTENEKFYNLTYSKGKKKDSEQSIFIKMTNYHNMAKALKEKCTGEILDDNRADLYDKIAYNFARYKNDDSRLKELRALGIGEAECNDLLKLSCNKAQGLSLVAMNKIIPFLLEGRVYSEACKLAGYGDFVGDNCTGKSILLRDDEGQKIKETLNEITNPVVRRAVSQTIKVINAIIIEYGSPQAVSIELSREMAKNKKERDKIDKDMEKRCAENAKILDEIREFKAIPTGKDIVKYRLWKEQREICLYTGKKISAYELFSGDGGYDIDHILPYSKTFDDSYRNKVLVRSEANRLKGNRTPYEYLISHGGEKDWEEFTIRVEHCINDYKKRQKLLKKTITDEDTNEFKRRNLQDTQYATTFIYNLIRKNLYLKPYQNSTKKKTQQVMALNGSITSFLSRGWGLEKKDRRTHIHHAQDAVVIACTTQGMINSISEYFKYRESKLERINRHVKDESKEKFEDIVVTREQYDKQSGKKFPLPWQNFKEELDIRMARYNGAVGAIDFKTSPLEYLMAYTDVSNRINYPEWMFVKGRPGRRGVLDGIFVSRMPNHKVSGQAHKETIRSAKYYKEGGGVLDKGYVVYKVPIQDIKYINGEIIYDKNAVYFNPDSDRLLYNALISRLEQFNGNAKEAFLEPFYKPKADGTSGPVVKKIKVCEKQTSGVPVGENGIASNGDMVRIDVFCEENKGKKKYYFVPIYVSDVVKKRMPNRAATQAKIQSEWREMREENFIFSLYSKDLIYIESDKGVPLHDINKNVYSENSVFAYYTGANISKASIDGECHDKKAYFDSLGIQGLRKLEKCQVDVLGNISFVHKEKRMLFN

SEQ ID NO: 8178 - protein, 1201 aa, synthetic construct
  REGION 1..1201: note = Synthetic
VYLKALIPSKVNTLGGIIYFMQKGILMEEMKHLNRKAEVPKPTDLNYRIGLDIGIASVGWAVLENNSHDEPFRIIDMGVRIFDTAEQPKTGASLAAPRREARSARRRLRRRGHRLERIKKLFQAEGLIDIEEFEARYKRAGLPDVYRLRYEGLDRKLNNDELAQVLLHIAKHRGFKSTSKAEEAENDSDNAKKKENGAIKESISKNKKLMEEKGYRTVGEMLYLNENFRTECHWTEEGYILTPRNKSGDYKHTVLRDMLADEVRSLFAAQRSMGNMNATEELENAYLDIMLSQRSFDKGPGAPSKYAMEGFEDRVGLCTFEGKNGEKRAPKAAYTSELFVALEKINHTKIVSNDGSTRFFTQDERDTIISLIHRQQTVKYITVRKAIGLAEGERFYNLNYSQKAGSKKSAEETDFVKLENYHKIRKALNEDVVSEHLGQEKIQLYDSIAAILTLFKNDDSRISRLEKLGISPECYDALLEMSPNKFHNLSLKAMGKIIPFLLKGNTYDKACVLAGYDFKAENSSEKSVLLKGRNITDIVNDITNPVVRRSVSQTIKVINAIILEYGSPQAVNIELAREMSKNFDERRKLKSDMESREKENDKFLKRVRELKSNPTGQDIVKYRLWEEQGGICLYSGEKIDINDLFSQGGGYDVDHILPYSITFDDSYRNKVLVKASENRQKGNRTPYEYIMSDKGVDAWNRYEALIKNTVKDYKKQLKLLKKHITDDEKAEFKERNLTDTKYITRIIYNMIRQNLVLKPYLNLERERKKQVVAVNGAITHYLSKRWGLESKDRRTDTHHAQDAVVIACTTDGMINKISRYSKGRELYYSRGFKFVDEETGEILNRDSFSREEWDEKHGVRIPLPWEHFRDELDIRMSRYHGVIEDAILETSPREFILSHRDVYNWIDYPEWMFVKGRPGRRGVLDGIFVSRMPNHKVSGQAHEETIRSAKYYENGGSVFETGGYVVTKKSIQDIKLKDGEIKEFFNPDSDRLLYEALVDRLNQYGNDPKKAFAEPFYKPKSDGTPGPIVKKIKVFEKQTSGVIVRDGNGIAANGSMVRIDVFCEQDKGKKKYYFVPIYTADVVKKRLPNRAATANKMLSEWRVMKEENFIFSLYSRDLVYIESDKGVVSKKVDGQTIRVHNLYSYFMGANTATASISGKFHDSSATYESLGIQGLKDLRKCNVDVLGNISFVKKEKRMPFN

SEQ ID NO: 8179 - protein, 1197 aa, synthetic construct
  REGION 1..1197: note = Synthetic
VYLKALIPSKVNTLGGIIYFMQKGILMEEMKHLNRKAEVPKPTDLNYRIGLDIGIASVGWAVLENNSHGEPFRIIDLGVRIFDAPDNTGELLSGKRREARSMRRRIRRRGHRLERIKKLFQAEGLINIEEFEARYKRAGLPDVYRLRYEGLDRRLANDELAQVLLHIAKHRGFKSTSKAADNENNSDDAKKKENGAIKESISNNKKLMEEKGYRTIGEMLYLDEKFKIDSNWNACGYIFCPRNKMGEYKVIILRDMLVDEVHALFNAQRKYGNTVASDGVEKAFLDIMLGQRSFDLGPGYPSKYAIDGFEFGKCPFEGKNGKRCAPKAAYTSELFVVLQNINHTRIVDDGGNVRNFTEEERNKIIELVHKQNEVKYSAVRKEIGLKNNEKFYNLTYSKGKKKDSEQSTFIKMINYHSITKALKRECTGEILSDECADLYDEIAYNLARYKNDDSRLKELRDLGIEEEQCNDLLKLSCNKPQGLSLDAMKKIIPFLLEGKVYSDACQMAGYGDFAADICTGKSILLNDNGGEKIRETLNGITNPVVRRAVSQTIKVINAIITEYGSPQAVSIELSREMAKNKKERDKIDNDMKKRSEENDKFLDEIREYKPIPTGKDIVKYRLWKEQKEICLYTGKKISADELFSGDGGYDIDHILPYSKTFDDSYRNKVLVRAEANRIKGNRTPYEYLISHGGEKAWEEFTIRVEHCIKDYKKKQKLLKKTITDEDTNEFKKRNLQDTQYATTFLYNLIRKNLYLKPYQNSTNKKTQQVMALNGSITNFLSKGWGLEKKDRRTHLHHAQDAVVIACTTQGMINSISDYFKCRELELERINRHVNKESKKEFDDNIVTREQYDKQFGKKFPLPWQHFKEELDIRMARYHGVAGAIDFETSPLEYLTSHADVCNRINYPEWMFVKGRPGRRGVLDGIFVSRMPNHKVSGQAHEETIRSGKYYENGGCGVEKGYVVYKTAITNLKLDKNGEIPNYFNPESDSLLYNALVKQLKDYENDPKKAFEKAFYKPKSDGTNGPIVKKIKVFEKKTIGVPLKKVNGFANNDSMIRVDIYCVNGRYYFVPVYVSDVVRDRLPNKCAAKNKNSSDWETVDDKNFLFSLYKNDLLYIKKDKLPLKSIDKCKYPIPNSSEGVYMYFGGADVSGLAFSCEAHDKSFSFRSSIVTVDKLYKCQVDVLGNISFVKKEKRMTFN

SEQ ID NO: 8180 - protein, 1191 aa, synthetic construct
  REGION 1..1191: note = Synthetic
MTAVYAEKVIDCLVKRFWRKGLFMEEMLNKKAEVTKPTDLNYRIGLDIGIASVGWAVLENDSYDEPFRIIDLGVRVFDTAEQPKTGASLALPRREARSARRRIRRRRDRVLRIKKLFDAEGLINIDEFEARYEKAGLPDVYRLRYEGLDRRLSNDELAQVLLHIAKHRGYKSTSKAADGADSDTGEVKKSVSANKSLMQEKGYRTVGEMIYLDEKFRTDCSWSDNGYLLTPRNKAGDYKHTVLRDMLADEVEQLFKSQRALGNSSATEELEKAYINIMLSQRSFDMGPAAPSPYAMEGFEDRVGLCTFEGKNGEKRAAKAAYTSELFVALEKINHTKIVGADGSTRFLTDDERRSIVSLIHKQQKAKYTAVRKAIGLAEDKKFYNLNYSPKAGNKKSPEEAEFVKLENYHKICKALNDDMTSEQLPPEKAKQYDDIATVLTLYKNDDSRIKRFAEMGIDKECYGALLELSPSKFQNLSLKAMKNIIPFLLEGKTYDKACELAGYDFKAENSAEKTVLLKGKNITDTVNDITNPVVRRAVSQTIKVINAIILEYGSPQAVNIELAREMSKDFDERRKLKTEMESREHENDKVLQRIREYKLNPTAQDIVKFRLWEEQGGVCLYSGDKIDINDLFSNSGGYDVDHILPYSITFDDSYRNKVLVKASENRQKGNRTPYEYFMSRNDENAWNEYVVRVENENTVKDFKKRLKLLKKQITDEEKAEFKERNLTDTKYITRVIYNLIRQNLVLKPYLNLGKERKKQVMAVNGSITHYLSKRWGLESKDRRTDTHHAQDAVVIACATDGMINRISRYSKGRELRYSRGFRFVDEETGEILNRDNFSREEWDEKYGVKVPMPWEHFRDELDIRMSRYHGIGESMIDSMTPREFIMSHRDVDRWLNYPEWMFVKGRPGHRGVLDGIFVSRMPNHKVSGQAHEETIRSAKYYENGGCGIEKGYVVYKKSIQDIKLDKNDEIAEFFNPDSDRLLYNAMVNRLKKYNNNSKEAFAEPFYKPKADGTQGPLVKKIKVFEKQTSGVIVRNGHGIAANGEMVRIDVFCEESKGKKKYYFVPIYTADVVKKKLPNRAATAAKMPSEWREMDEKNFIFSLYSRDLIYIESEKGIALHNIDGNVYYKNSLFSYYTGANINKASINGVLNDNSAFFDSLGIQGLKSLEKCQVDVLGNISFVHKEKRMIFN

SEQ ID NO: 8181 - protein, 1186 aa, synthetic construct
  REGION 1..1186: note = Synthetic
VSLVAGVITKTRTSRKDENFMENGFTYRLGLDIGIASVGAAVVQTNSFDNPCHLTEPDVRTFPAAECRENGKYYGKSAAVPRRECRTTRRRIKRKQLRMNCIKQTLQKAGLIDVDEFMKRYSDGTLPNVYQLRYEGLDRLLIDDEFAQILIHIAKHRGFLSTRRADKKDKESGAILAATSANQKLMMEKGYRTVGEMMYLDESFHTPCSSNEQGFIVTPRNKAKDYKHTIYRSMLVDEVHALFDAQRKFGNTKATETLESEYLEIMTRQRSYDLGPGLQADGTKSPFAMDGYKSNAGECTFYKEETRAAKGTYTAELSITLQKINNLKLVDRYGDGRFLTDEEKQKILEYISKHKTMKYKTVKTLLGIDPMIRFNLLNYGKKKKTKKESDDKTKDDSTKKKSTKKSKTKAETSEKAGKDANKEETELERINRIEDTVFVSMEFTLSYTDCLKARIKTLSETEKRDLFDEVGELLTSYKTDAARIEKLSNLGLTPEEVDRLLDLNPKGYAKLSHKAMKEIEPYLKQGLTYDKACAAAGLDFQVTYTGEKMKYLKGPEINRIINNIQSPVVRRSVAQTVRVINAIIRKYGSPQAVNVELSREMSKSFLERKKAETAMELRHKENVKFCEEIKKLGINSPNGEDITRYRLWRDQNGICLYSGEKIPARAMFSKEYEIDHIIPYSISLDDRYQNKVLVKAGENWKKGNRLPYEYFGHDKTRWAAYENRVESLIKSDGKKAHLLKKNYTKEDQREFTERNLNDTRYATTVVYNMIMQYLYLEPYNCDGKTKQVYAVNGAVTAYLRKRWGLNKKDRTNDRHHAMDAVVIACCTDEMIAKVTKYMQDRETAYSKNFRITDEETGEILTRSNFTREQYDEAYGVRFPVPWETFREEIDLRIFNDDPFGYLMKDRNLQIKIDYPDWMYGEEESPVAKGKYINYIRPMFVSVACSHKATGRAHEETIRSAKYHDSDSLVISKKALKDLKLNKDNEIKDYYNKECDPLLYEALRNRLLEYGGDGKKAFAEEFHKPKADGTDGPVVKSVKVIEKKTTGVQINHGLAGNGNMVRVDLYQKEGKYYAVPIYISDMVKKEIPRKAATGGKQYKDWRVMDPDDFLFSVYPRDLLHLKKGKPFKDGLSNDIYMYFAGLDPASASFAVTAHDSSISLRGIGIQNLELIEKCQVDMLGDIHVCKR

SEQ ID NO: 8182 - protein, 1175 aa, synthetic construct
  REGION 1..1175: note = Synthetic
MEEMKQTGRKNEAPKLTDLNYRIGLDIGIASVGWAVLENNSHDEPFRIIDLGVRIFDTAEQPKTGASLALPRREARSARRRIRRRRDRIERIKKLFQAEGLINIDEFEARYKIAGLSDVYKLRYEGLDRKLTDDELAQVLLHIAKHRGFKSTSKAEEAENENDAAKKKEAGALKKGISNNKKLMEEKGYRTVGEMMYLDENFRTDCPWNENGYILTPRNKSGDYKHTVLRDMLVDEVREIFKSQRSLGNIHASEELENAYLDIMLSQRSFDMGPGAPSKYAMEGFEDRVGLCTFEGKNGEKRAAKAAYTSELFVALEKINHTKIVSDDGATRFLTTYERKSIIELMHKQQTVKYAAVRKAIGLAEEDKFYNLNYSPKAGSKKSPEDTDFVKLENYHKIRKALGEDIVSEHLPAEKIKLYDSIATILTLFKNDDSRIKRFIELGIGEECFDGLLSLSPSKFHNLSLVAMGKIIPFLLDGNTYDKACELAGYDFKADNKGEKSVLLKGKNITDMVNDITNPVVRRSVSQTIKVINAIILEYGSPQAVNIELAREMSKNFDERRKLKSDMESREKENNNVIKRVKEYKLNPTGQDIVKFRLWEEQDRRCLYSGEKIDINDLFSRDGGYDVDHILPYSITFDDTYRNKVLVKASENRQKGNRTPYEYFMAEKDDDEWNVYETLVRNTVKDYKKVLKLLKKHITEDEKSEFRERNLTDTKYITRIIYNMIRQNLVLKPYLSLEKERKKQVMAVNGSITHYLSKRWGLESKDRRTDTHHAQDAVVIACTTDGMINKISRYSKGRELLYSRGFKFVDEETGEILSRDNFTREEWDEKYGVKIPIPWEHFRDELDIRMSRYNGTGDDSIDKTTPRDFILSHRDAHKWINYPEWMFVEGRPGRRGVLDGIFVSRMPKHKVSGQAHEETVRSAKYYNDGGSVFESGGYVVTKKSIQDIKLKDGEIKEFFNPDSDRLLYNALVDRLNKFENDPKKAFAEPFYKPKADGTQGPIVKKIKVFEKQSSGVFVRDGKGIAANGAMVRIDVFCEEDKGKKKYYFVPIYTADVVKKKLPDRAATANKLISEWRVMKEENFIFSLYSRDLIYIESDKGVQVKDIDGKISKPVNLFAYYLGADTSTASISGKLHDSSANFRSIGIQGLRRFDKCQVDVLGNISFVNKEKRMPFN

SEQ ID NO: 8183 - protein, 1168 aa, synthetic construct
  REGION 1..1168: note = Synthetic
MGEMMHLNRKAEVPKPTDLNYRIGLDIGIASVGWAVLENNTHDEPFRIIDLGVRIFDTAEQPKTGASLALPRREARSARRRLRRRGHRLERIKKLFEVEGLINIEEFEARYKKTGLPDVYKLRYEGLDKRLTNDELAQVLLHIAKHRGFKSTSKAADGADSDTGEVKKSISANKALMQEKGYRTVGEMIYLDEKFRTDCPWNENGYILTPRNKSGDYKHTVLRDMLADEVMKIFKAQRALGNDTATEKLERAYLDIMLSQRSFDLGPGAPSKYAMEGFEDRVGLCTFEGKNGEKRAPKAAYTSEFFVALEKINHTKIVSADGSTRFFTSDERHAIIALLHRQQTVKYTAVRKTIGLEEEDKFYNLNYSPKSGSKKSPEDTDFVKMENYHKIRKALREEVASEHLSPDKIKLYDDIARILTLYKNDDSRIRRLAEHDIASECYDALLEMSPSKFHNLSLKAMGKIIPFLLQGNTYDKACELAGYDFRTENNGEKSILLKGKNITNIVNDITNPVVRRSVSQTIKVINAIILEYGSPQAVNIELAREMSKDFDERRKIKSDMEAREKENDKVLSRVREYKSNPTGQDIVKFRLWEEQGGMCLYSGEKIDINDLFSSNGGYDVDHILPYSITFDDSYRNKVLVKALENRQKGNRTPYEYFMVGKDEPAWNEYEALVKNTIKDYKKQLKLLKKHISDEEKAEFKERNLTDTKYITRIIYNMIRQNLVLKPYLNLERERKKQVMAVNGAITHYLSKRWGLAGKDRRTDTHHAQDAVVIACTTDGMINRISRYSKGRELAYSRGFGFVDEETGEILNRDNFSREDWDEKFGVRLPMPWEHFVDELDIRMSRYSTMGEGVSSGTSPREFILSHRDVFNWINYPEWMFVEGRPGRRGVLDGIFVSRMPNHKVSGQAHEETIRSAKYYEDGGSVFETGGYVVTKKSIQDIKLKDGEIKEFFNPDSDRLLYEALVDRLNQYGNDPKKAFAEPFHKPKSDGTPGPVVKKIKVFEKQTSGVLVREGNGIAANGSMVRIDVFCEENKGKKKYYFVPIYTADVVKKRLPNRAATQAKMPSEWRLMNDENFIFSLYSRDLIYIESDKGVQTKDIDNVTGKVEKMYAYYTGADTSTASIAGKLHDSSAMFRGLGIQSLRKLQKCQIDVLGNISFVSKEKRMTFN

SEQ ID NO: 8184 - protein, 1166 aa, synthetic construct
  REGION 1..1166: note = Synthetic
MEEIRQLNRKLEETKPIDLNYRIGLDIGITSVGWAVLENKNDEPFRIIDLGVRIFKEAEQSNGDPLALPRRKARSARRRTRRRRFRLERIKKLFQTEGLIDIKEFEARYEKAGLPDVYRLRYEGLDRKLTDDELAQILLHIAKHRGFKSNSKAEETENENDDTKKKEAGAIKDSISNNKKIMEEKGYRTVGEMLYLDEKFKIDSNCNTMGYVFCPRNKQGDYKVIMLRDMLVDEVHAIFEAQRNLDNTSASDELEKKYLDIMLSQRSFDQGPGAPSQYAIDGFDFGTCTLEKANGEKRAPKAAYTSELFIALQKINNTRIVDKDGNIRNFSDEERWNIIRLIHKQQEVKYSSIRNALCLSDDEKFYNLTYSKKKDSEQSVFIKMVNYHSIRKALKAECSGELLDDKHAELYDNIAYYLTKYKNDDSRLKELKNLGIGEEKCNNLINLSCTKTQNLSFVAMKKIIPFLLEGKVYSEACKMSGYNNSNEDSCADRLTLLKGEKIKDAINEISNPVVRRAVSQTIKVLNAIILEYGSPQAINIELSREMAKNRIERDKIDKDIKNRNNENQKILDEIREFKPIPSGKDIVKYRLWKEQKEICLYTGKKIPAEELFASDGGYDIDHILPYSKTFDDSYRNKVLVRSEANKNKGNRTPYEYLISQGGEKAWEEFTIRIEHNIKDYKKRQKLLKKHVTDEETNEFKRRNLQDTQYATTFIYNLIRQNLYLKPYQNLTGKKKQQVMALNGAVTHYLSKRWGFESKDRRIDTHHAQDAVVIACTTQGMINTISNYSKFRELELNKINKSRSIKVDELSENEFITREQYDKNFGVEFPLPWDNFKEELDIRMSRYHGAGDEKFLETSPREYIQSHSDVSKRLDYPKWMFVKGRPGRRGVLDGIFVSRMPNHKVTGQAHEETIRSAKYYKDGGCGVDKGYIVYKTALTNLKLDKNNEIANYFNPESDKLLYNALVEQLKEYGNDSKKAFEKNFYKPKADGSKGPVVKKVKVFEKKTTGVYLKKVNGFGYNDSMIRADIYYIDGKYYFVPVYVSDTVKNSLPNQRAAKDKNSCDWEVVSDDNFLFSLYKNDLLFMKNNKLPLKSIDEYKYLVPDSSKGVFMYFCGADVSGLAFKCESNDKTFNFRSSITTIEQLCKCQVDVLGNISFVNKEKRMPFN

SEQ ID NO: 8185 - protein, 1166 aa, synthetic construct
  REGION 1..1166: note = Synthetic
MEEMKYLNRKAEVPKPTDLNYRIGLDIGIASVGWAVLENNTHDEPFRIIDLGVRIFDTAEQPKTGASLALPRREARSARRRLRRRGHRLERIKKLFEAEGLINIEEFEARYKRTGLPDVYKLRYEGLDRRLTNDELAQILLHIAKHRGFKSTSKAADGADSDTGEVKKGISANKTLMQEKRYRTVGEMIYLDEKFRTDCPWNENGYILTPRNKSGDYKHTVLRDMLADEVMKIFKAQRALGNDTATEKLERAYLDIMLSQRSFDMGPGAPSRYAMEGFEDRVGLCTFEGKNGEKRAPKAAYTSEFFVALEKINHTKIVSADGSTRFFTSDERHAIIALLHRQQTVKYTAVRKTIGLAEEDKFYNLNYSPKSGSKKSPEDTDFVKMENYHKIRKALREEVVSEHLSPDKIKLYDDIARILTLYKNDDSRIRRLAEHDIASECYDALLEMSPSKFHNLSLKAMGKIIPFLLEGNTYDKACELAGYDFRAENNGEKSVLLKGKNITNIVNDITNPVVRRSVSQTIKVINAIILEYGSPQAVNIELAREMSKDFDERRKIKSDMEAREKENDKVLSRVREYKSNPTGQDIVKFRLWEEQGGMCLYSGEKIDINDLFSSNGGYDVDHILPYSITFDDSYRNKVLVKALENRQKGNRTPYEYFMVGKDEPAWNEYEALVKNTIKDYKKQLKLLKKHISDEEKAEFKERNLTDTKYITRIVYNMIRQNLVLKPYLNLERDRKKQVMAVNGAITHYLSKRWGLAGKDRRTDTHHAQDAVVIACTTDGMINRISRYSKGRELAYSRGFEFVDEETGEILNSDNFSRKDWDEKFGVRLPMPWEHFADELDIRMSRYSTMGEGVSSGTSPREFILSHRDVFNWINYPEWMFVEGRPGRRGVLDGIFVSRMPNHKVSGQAHEETIRSAKYYEDGGCGVEKDYVVYKTAITNLKLDKNGEISNYFNPESDSLLYNALVKRLKDYENDPKKAFEKAFYKPKSDGTNGPIVKKVKVFEKKTIGVLLEKVKGFANNDSMIRVDIYCVNGKYYFVPVYASDVVRDRLPNKCAAKNKNSSDWEIVDDKYFLFSLYKNDLLYIKKDKLPLKSIDECKYPIPNSSKGVYMYFGGADVSGLAFSCEAHDKSFSFRSSVVTVDKLCKCQVDVLGNVSFVKNEKRMTFN

SEQ ID NO: 8186 - protein, 1161 aa, synthetic construct
  REGION 1..1161: note = Synthetic
MGEMSKTNMDRHRSYRIGLDIGIASVGWAVLENNSQDEPIRILDLGVRIFEAAEVPKTGAALAAERRDARTARRRIRRRRHRLERIKWLFEREGLIQIDSFMERYHSPNLPDVYELRYEGLERKLSNEEFAQVLLHIAKHRGFRSTRKAELKEGDNGKVLKATEENRKRMEEHGYRTVGEMIYKDAYFHTECAWADNGYLLTPRNKADDYSHTMLRALLEEEVHILFECQRKFGNEKATEKLEQEYLEIMLSQRSFDMGPGQQADGTPSPYAMEGFGNKVGYCTLERESGERRAAKATYTAELFVALQKITHMKLVHMDGTSRFFTEEERNILLEMLSSKKEIKYAAVRKKLNLPLEEKFNTLNYNMKRKGKDNKEEEVDEAAIIAATEKATFISMSNCYEYRKRIGEYLETLPEEEQQDLLDEIGTILTCYKNDDSRMNRLTEAGLSKELADSLLELTPAKFQHLSIKAMKKIMPYMKEGMVYDKACEAAGYDFKNDNHGKKMKLLKGENITETINEITNPVVKRSVSQTVKVINAIILKYGSPQAVSIELAREMSKNFEERRKAEKQMEENRKKNEMAKKEIQELGKLSPNGQDILKYRLWHDQQGICLYTGKKIPLEELFQPGYDIDHILPYSITFDDSYRNKVLVTSQANREKGNRTPYEYFGQDEVRWSAYEARVNHFIKDYKKRRNLLKQGFTKEDRREFKERNLNDTKYITRVIYNMIRQNLEMEPLNREDRKKQVFAVNGSITAYLRKRWGLMQKDRSTDTHHAMDAVVVACCTDGMIQKISRSTQYREVLYKGQSHPDYEIVDVETGEIISLEDLSREEWDERYGAQVPPPWEHFKEELEVRMGSDPKNDLDTHPDMYQLFRYPEDVYNNIRPIFVSRMPNHKVTGAAHADTIRSPRHYKDGGEIFADGGYVLSRTNIEDLKLDKDGEIKDYYNKDSDRLLYEALRARLAEYDGDGKKAFAEEFYKPKADGTQGPIVKKVKTYKKMSLGVEINKDEAGVGRGIAENANGGMIRVDVFRENGKYYFVPIYIADALKKRLPNKAAMQNKPYSEWKEMKDENFLFSLYSRDLIGFKNPKGKKVHCTDGTEIVLTNEIVYYIGANIRTASISCKAHDNQYEFGSFGIQSLQELKKYQVDVLGNVTEVRQEKRRGFQ

SEQ ID NO: 8187 - protein, 1156 aa, synthetic construct
  REGION 1..1156: note = Synthetic
MRFREKKGEFMETKYNYRIGLDIGIASVGWAVLENNSKDEPVHIMDLGVRIFDPAEDQQTGDSLAAPRRNARSMRRRLRRRRHRLERIKQLLEREGLIQIEQFMKRYESKDLPDVYQLRYEALNRRLTDDELAQVLIHIAKHRGFKSNRKAELKEDAEAGKVLNATKENRERMQAGNYRTIGEMIYCDEAFRTSCDWVEKGYILTPRNKADSYKHTVERALLVEEVKKIFEAQRTFGNPKATEELEKSYLSIMESQRSFDMGPGLQADGTESPYALNGFEDKVGYCTLEGKPEKRGAKATYTAELFVVSQKLSHLKLIKRGGEGRFLTKEEKAIVLELLHTQKEVKYSAIRKKLAIPVEYHFNALTYTSKKADISQEEREKEVEKVVFGKLENYHKMMSCLNEETKQKPVDELQELLDSIATILTLYKSDDKRRECLNALPLSTEEIENLLELTFAKFMNLSVKAMRKLLPYLQGGEGMTYDKACTAAGYDFKAEGEEHKSKLLKGEQVTEIINEIPNPVVKRSVSQTVKVINAIIQKYGSPQAVYIELAREMSRNFKDRKDIEKKNKAREADNEKAKKQIQEYGILSPTGQDIIKFRLWQEQDGICMYSGKRMSIENLFGKNSSCDIDHILPYSQTFDDSYRNKVLVLSSENRQKGNRTPYEYMGQDEERWSEFVARVSSMVKDGKKRDRFFKEHITDEDKKQFKERNLNDTKYITTIVYNLIRQNLEFAPYNVPALKEGKKKHVKAVNGAITAYLRKRWGLPHKDRSTDTHHAMDAVTIACCTEGMIQKISRSMQILELRYMHNGRMFDEETGEIYDRENYTLQEWKDKFGVHIPRPWEEFKNELDVRMGEDPLNFLDIHPDVAKALDYPEYYYPDSASNWKGFIHPIFVSRMPNHKVTGQANKDTVRSPRLFKEGYVISKVPLTSLKLKDDEIVNYYNKESDMLLYNALKRQLQLYSNDAEKAFAQPFHKPKADGTQGPVVKKVKVIDKQSSGVYVHEGKGITANGDMIRIDIFRENGKYYFVPIYAADVVKKVLPNKSPSRGKSGWIEMKDENFVFSLYPKDLIHVKTKKEDGLKLNLVNGGQIKAQEAVVYYTGADVSKGSIDCSASDKKFKLRGLGIQSLIIFEKCQVDVLGNISVVKHEKRMDFSAKKR

SEQ ID NO: 8188 - protein, 1154 aa, synthetic construct
  REGION 1..1154: note = Synthetic
MRFREKKGEFMESKYNYRIGLDIGIASVGWAVLENNSKDEPVHIMDLGVRIFDTAEDSQTGDSLAAPRRNARSMRRRLRRRRHRLERIKQLLEREGLIQTEQFMKRYESKDLPDVYQLRYEALNRRLTDDELAQVLIHIAKHRGFKSNRKAELKEDAEAGKVLTATKENRERLQSGNYRTIGEMIYCDTAFQTECDWVEKGYILTPRNKADSYKHTIERALLVEEVKKIFEAQRTFGNERATEKLEENYLSIMESQRSFDMGPGLQADGSESPFALNGFEDKVGYCTLEGKSEKRGAKATYTAELFVVSQKLSHLKLLKRGGEGRFLTKEEKATVLALLHTQKEVKYSAIRKKLNIPSEYHFNALTYTSKKKDLSAEEREKEVEKATFGKLENYHKMMKCLNDETKQRPAEELQELLDSIATTLTLYKSDDKRRECLKELPLIDEEIENLLELTFAKFMNLSVKAMRKLIPYLQGEESMTYDKACAVAGYDFKAEGGEYKSKFLKGERVTEIINDIPNPVVKRSVSQTVKVINAIIQKYGSPQAVYIELAREMAKNFKDRKDIERKNKAREADNERIKKQIQEYGISSPTGQDIIKFRLWQEQDGICMYSGERMSIENLFGKNSSCDIDHILPYSQTFDDSYHNKVLVLSRENRQKGNQTPYEYLGQDVKRWNEFVARVSALEKDGKKREHFFKEHITEEDKKQFKERNLNDTKYITTIVYNLIRQHLELAPYNVPGKKKQVKAVNGVITSYLRKRWGLPHKDRSTDTHHAMDAVTIACCTEGMINKISRSMQILELRYMRNGRMVDEETGEIYDRENYTLQEWKDKFGVHIPRPWETFKDELDVRMGEDPLNFLDTHPDVAKELDYPEYYYPDEKSNWKGFIRPIFVSRMPNHKVTGQANKDTVRSPKLFEEGYVISKVPLTSLKLKDGEIANYYNKESDMLLYNALKRQLELYSNDAAKAFAQPFHKPKADGNQGPVVKKVKVVDKQSSGVYVHEGKGITANGDMIRIDIFRENEKYYFVPIYAADVVKKVLPNKAATAHKNYDEWREMKDENFVFSLYPKDLIHVKTKKEDGLKLKMANGGMVKRQEEYVYFSVANISTASIAGFANDKSFSFEGLGIQSLTIFEKCQVDVLGNISVVKHEKRMDFSAKKH

SEQ ID NO: 8189 - protein, 1152 aa, synthetic construct
  REGION 1..1152: note = Synthetic
MNAEHGKEGLLIMEENFQYRIGLDIGITSVGWAVLQNNSQDEPVRITDLGVRIFDVAENPKNGDALAAPRRDARTTRRRLRRRRHRLERIKFLLQENGLIEMDSFMERYYKGNLPDVYQLRYEGLDRKLKDEELAQVLIHIAKHRGFRSTRKAETKGKEGGAVLKATTENQKIMQEKGYRTVGEMLYLDEAFHTECLWNEKGYVLTPRNRPDDYKHTILRSMLVEEVHAIFAAQRALGNEKATEELENAYVEIMTSQRSFDMGPGLQPDGKPSPYAMEGFGDRVGKCTFEKDEYRAPKATYTAELFVALQKINHTKLIDEFGTGRFFTEEERKTIIDLLLSGKELKYGTIRKKLNIDPSLKFNSLNYSAKKEGETEEERVRDTEKAKFASMFWTYEYSKCLKDRNEEMTVGQKADLLDRIGEILTAYKNDDSRSSRLEDLGLSGEEIDGLLELSPAKYQRVSLKAMRKMQPYLEDGLIYDKACEAAGYDFRALNDGNKKHLLKGEEINAIVNDITNPVVKRSVSQTIKVINAIIQKYGSPQAVNIELAREMSKNFQDRTNLEKEMKKRQQENERAKQQIIELGKQNPTGQDILKYRLWNDQGGYCLYSGKKIPLEELFGGGYDIDHILPYSITFDDSYRNKVLVTAQENRQKGNRTPYEYFGADEKHWEDYEARVRLLVRDYKKQQKLLKKNFTEEERKEFKERNLNDTKYITRVVYNMIRQNLELEPFNHPEKKKQVWAVNGAVTSYLRKRWGLMQKDRSTDRHHAMDAVVIACCTDGMIHKISRYMQGRELAYSRNFKFPDEETGEILNRDNFTREQWDEKFGVKVPLPWNSFRDELDIRLLNEDPKNFLLTHADVQRELDYPGWMYGEEESPIEEGRYINYIRPLFVSRMPNHKVTGSAHDATIRSARDYETRGVVITKVPLTDLKLNKDNEIEGYYDKDSDRLLYQALVRQLLLHGNDGKKAFAEDFHKPKADGTEGPVVRKVKIEKKQTSGVMVRGGTGIAANGEMVRIDVFRENGKYYFVPVYTADVVRKVLPNRAATHTKPYSEWRVMDDANFVFSLYSRDLIHVKSKKDIKTNLVNGGLLLQKEIFAYYTGADIATASIAGFANDSNFKFRGLGIQSLEIFEKCQVDILGNISVVRHENRQGFH

SEQ ID NO: 8190 - protein, 1140 aa, synthetic construct
  REGION 1..1140: note = Synthetic
MRENGSDERRRNMDEKMDYRIGLDIGIASVGWAVLQNNSDDEPVRIVDLGVRIFDTAEIPKTGESLAGPRRAARTTRRRLRRRKHRLDRIKWLFENQGLINIDDFLKRYNMAGLPDVYQLRYEALDRKLTDEELAQVLLHIAKHRGFRSTRKAETAAKENGAVLKATDENQKRMQEKGYRTVGEMIYLDEAFRTGCSWSEKGYILTPRNKAENYQHTMLRAMLVEEVKEIFSSQRRLGNEKATEELEEKYLEIMTSQRSFDLGPGMQPDGKPSPYAMEGFSDRVGKCTFLGDQGELRGAKGTYTAEYFVALQKINHTKLVNQDGEIRNFTEEERRALTLLLFTQKEVKYAAVRKKLGLPEDILFYNLNYKKAATKEEQQKENQNTEKAKFIGMPYYHDYKKCLEERVKYLTENEVRDLFDEIGTILTCYKNDDSRTERLVKLGLVPIEMEGLLAYTPTKFQHLSMKAMRNIIPFLEKGMTYDKACEEAGYDFKADSKGIKQKLLTGEKVNQTINEITNPVVKRSVSQTVKVINAIIRTYGSPQAINIELAREMSKTFEERRKIKGDMEKRQKNNEDVKKQIQELGKLSPTGQDILKYRLWQEQQGICMYSGKTIPLEELFKPGYDIDHILPYSITFDDSFRNKVLVTSQENRQKGNRTPYEYMGNDEQRWNEFETRVKTTIRDYKKQQKLLKKHFSEEERSEFKERNLTDTKYITTVIYNMIRQNLEMAPLNRPEKKKQVRAVNGAITAYLRKRWGLPQKNRETDTHHAMDAVVIACCTDGMIQKISRYTKVRERCYSKGTEFVDAETGEIFRPEDYSRAEWDEIFGVHIPKPWETFRAELDVRMGDDPKGFLDTHSDVALGLDYPEYDYENLRPIFVSRMPNHKVTGAAHADTIRSPRHFKDEGIVLTKTALTDLKLDKDGEIDGYYNPQSDLLLYEALKKQLLLYGNDAKKAFAQDFHKPKADGTEGPVVRKVKIQKKQTMGVFVDSGNGIAENGGMVRIDVFHVNGKYYFVPVYTADVVKKVLPNRAATAHKPYGEWKVMEDKDFLFSLYSRDLIHIKSKKDIPIKMVNGGMEGIKETYAYYIGADISAANIQGIAHDSRYKFRGLGIQSLDVLEKCQIDVLGHVSVVRSEKRMGFS

SEQ ID NO: 8191 - protein, 1133 aa, synthetic construct
  REGION 1..1133: note = Synthetic
MDLNYRIGLDIGIASVGWAVLENNSKDEPVRIVDLGVRLFEAAEVPKTGAALAEPRREARTTRRRLRRRKHRLERMKWLLQEYGLIQTEEFMKRYHSAGLPDVYRLRYEGLERKLKDEELAQILIHIGKHRGFRSTRKAELKDKNDKETGAVLSATRENEKLMEEHGYRTAGEMIYKDDKFRTGCTWKEEGYRLTPRNKEGDYKNTMLRALLEDEVKVIFDCQRKFGNQKASEELEKAYLAIMTSQRSFDMGPGKQPDGSASPYAMEGFGDRVGLCALEPREKQEPRAPKAAYTSELFVALQKINHLRITEKNGKGRGLTSEERERLSDLLHKKKELTYGAVRKELQLDLRYRFNTLNYSSKKMTEEEKIKDAEKAKFVSMVSHYEYRKRMSGMLEQLSPEEQADLMDEVGKILTLYKNDDTRSREFQKLGLDSEITEELLELNPRGFQHVSLKAMKKLMPYLKEGLTYDKACAEAGYDFQGSVQKERSRLLKGKEITDIINDINNPVVKRSVSQTVKVINAIIQKYGSPQAVNIELAREMSRNYDERRKMEKQMKDRQSENERAKKEIQELGNAFPTGQDILKYRLWHDQDGICMYSAKRIPLAELFTGAYDIDHILPYSITFDDSYRNKVLVTSEENRQKGNRIPYEYFGSDSERWSKFETLVNSRIRDYRKQQNLLKQSFTEEERKEFKQRNLNDTKYITRVIYNMIRENLALAPYNSPGKKKQVFAVNGGVTAYLRKRWGMSAKDRSIDTHHARDAVVIACCTDGMIQKISRNIQGRELLYARGFTAVDVETGEKFTRDDFTRDQWDEIFGVQVPKPWEYFNEELDIRLGENPVEFIETHSDVSRKLDYPAWFYENNIIRPVFVSRMPNRKVTGAAHADTIRSPRHYQETGSVLTKTALIDLKLNKKTGEIENYYKPESDTLLYNALKERLELYGGDGKKAFEEPFYKPKADGSRGNLVRKVKTYDKLTLGVYVNSQHGIAANANGSMVRVDVFRVSGKYYFVPVYIADVVRKRLPMKAVVQGKQYIDWKEMEDKDFIFSLYTRDLISFKSKNGKKVTCVDGTSKAVNEEIVYYYGANISTASFSGKSHNGSFEFTSLGIQGLEYLKKYQVDVLGNVSEVKREKRMGFR

SEQ ID NO: 8192 - protein, 1111 aa, synthetic construct
  REGION 1..1111: note = Synthetic
MEDKMYYRIGLDIGIASVGWAVLQNNSNDEPVHIVDMGVRIFDKAEQPKTGESLAAPRRDARSVRRRLRRRKHRLDRIKWLFQESGLIEIDSFMERYHKENLPDVYKLRYEALDRKLSDEELAQILLHIVKHRGFKSNRKAELKEKDNGAVLKATSANEALMKEKGYRTVGEMLYCDIAFKTPCAWSESGYILSPRNKAEDYRHTIKRDWLVEEVKQIFASQRQLGNTKATEELEEKYLEIMQSQRSFDMGPGRQSDGTPSPYAMEGFEGRVGKCTLEPEELRAAKATYTGELFVALQKVNHIRLVKKDGTSRPLSADERALIMEMLHSKKEVTYKAIRKKLNIDETYKFNMLTYSEKKDSETTKFAGMPWHYEYQKRIGYFADELPKAEREELYNNIGRILTCYKNDDSRTIRLKELGLEDEDIDKLLELTPSKFLRVSVKAMKKIVPYLEEGMIYNEACDAAGYDFKADGTQKKSKLLKGEDVTTTINEITNPVVKRSVSQTVKVINAIIQKYGSPQAINIELAREMARNFQDRMTMDKNMKNRAAENEKIKKEIQELGKLSPTGQDILKYRLWKEQDGVCLYSGKHIPPDELFDAGYDIDHILPYSITFDDSMRNKVLVTSQENRQKGNRTPYQYFGNNPEKWEAFEARVYHIVHDYRKQQKLFKKEITKEDRNQFKERNLNDTKYITTVVYNMIRKNLEFESFYNPEKKKHVTAVNGAITSYLRKRWGIQPKNRETDTHHSVDAIIVACCTDGMIQKISRSAQAREAIYQQDGALYDYETGEIFNRDEWNERYGKQIPRPWDAFRDELDVHLGTDPKTFLETHPDVTTKIDYPEEIFENLHPIFVSRMPNHKVTGAAHADTIRSNKYHEDGGFVVTKTALTDIKLNKDGEIDGYFNPESDMVLYEALKRQLKLYGNDSKKAFAEPFHKPKADGTEGPVVRKVKIQKKLSLGVPVNNGNGIAENGSMVRIDVFRENGKYYFVPIYTADVVKKRLPNRAATAHKPYEEWKEMKDENFIFSLYSRDLIHVVSRKEMKLNHVEQGNIVTKEMYVYYTASDIATASISGIAHDSSFKFRGLGIQSLEVFEKCQVDVLGNISAVRKEKRMGFN

SEQ ID NO: 8193 - protein, 1175 aa, synthetic construct
  REGION 1..1175: note = Synthetic
MEEMKQLNKKTEVQKPTDLNYRIGLDIGIASVGWAVLENNTNDEPFRIIDLGVRIFDTAEQPKTGASLALPRREARSARRRLRRRRDRIERIKKLFQSEGLIDIEEFEARYKKAGLPDVYKLRYEGLDRVLTDDELAQVLLHIAKHRGFKSTSKAADGADSEAGEVKKSISANKALMQEKGYRTVGEMIYLDENFRTDCPWNEDGYILTPRNKAGDYKHTVLRDMLADEVREIFNFQRELGNNRASEKLEKAYLDIMLSQRSFDMGPSAPSPYSMDGFEDRVGLCTFEGKNGEKRAAKAAYTSELFVALEKINHTKIVGDDGITRFLTPDERNIIISLMHKQQTVKYTAVRKAIGLSEDESFYNLNYSTKKAENKKDVDNKKSTENTDFVKLENYHKIRKALNDDVVSEHLQPDKIKLYDSIATILTLYKNDDSRVKRFIELGIDNDCFDELLSLSPSKFHNLSLKAMAKIIPFLLEGNTYDKACELAGYDFRANDKGEKSLLLKGKNITDIVNDITNPVVRRSVSQTIKVINAIILEYGSPQAVNIELAREMSKNFDERRKLKYDMDSREKENDRFLKRVREYKQNPTGQDIVKFRLWEEQGGRCLYSGEMIDINDLFSNGGGYDVDHILPYSITFDDTYRNKVLVKASENRQKGNRTPYEYFMAEKGENAWNKYEILVRDTAKDYKKQLKLLKKHITEDEKSQFKERNITDTKYITRIIYNMIRQNLVLKPYLNLERERKKQVVAVNGSITHYLSKRWGLESKDRRTDTHHAQDAVVIACTTDGMINKISRYSKGRELLYSRGFQFVDEETGEILNRDNFFREEWDERYGVRVPMPWEHFRDELDIRMSRYNEAGDNQMAGTSPRDFILSHRDVFNWLDYPEWMLVKGRPGRRGVLDGIFVSRMPNHKVSGQAHEETVRSAKYYCDGGSIFETGGYVVTKKPIQDIKLKDGEIKEFFNPDSDRLLYNALVERLNKFENDPQKAFAEPFYKPKADGTPGPIVKKIKVFEKQTSGVIVRDGNGIAANGAMVRIDVFCEEDKGKKKYYFVPIYTADVVKKKLPNKAATANKMLSEWREMKEENFIFSLYSRDLIYIESDKGIQIKNIDDITSKEEKIYAYYTGADTATASIAGKLQDSSAVFRSIGIQGLRKFEKCQVDVLGNITFVKKEKRMTFN

SEQ ID NO: 8194 - protein, 1001 aa, synthetic construct
  REGION 1..1001: note = Synthetic
MMEKGYRTVGEMMYLDESFHTPCSNNEQGFIVTPRNKAKDYKHTIYRSMLVDEVHALFDAQRKLGNTKATETLESEYLEIMTRQRSYDLGPGLQADGTKSPFAMDGYKSNAGECTFYKNETRAAKGTYTAELSMTLQKINNLKLVDRYGDGRFLTDEEKQKILEYISKHKTMKYKTVKTLLGIDPMIRFNLLNYGKKKKTKKESEDKTKDDSTKKKGTKKSKTKAETGEKTDKDSNKDETELERINRIEDTVFVSMEFTLSYTDCLKTRIKTLSETEKRDLFDEVGELLTSYKTDAARIEKLSNLGLTSEEIDHLLDLNPKGYARLSHKAMKEIETYLVQGLTYDKACAAAGLDFQVTYTGEKMKYLKGPEINNIINNIQSPVVRRSVAQTVRIINAIIRKYGSPQAVNVELSREMSKSFLERKKAETAMELRHKENVKFCEEIKKLGINSPNGEDITRYRLWKDQNGICLYSGEKIPARTMFFKEYEIDHIIPYSISLDDRYQNKVLVKAKENQTKGNRLPYEYFGHDKTRWAAYENRVESLIKSDGKKTHLLKKNYTKEDQREFTERNLNDTRYATTVVYNMILQYLYLEPYNCDRKTKQVYAVNGAVTAYLRKRWGLNKKDRTNDRHHAMDAVVIACCTDEMIAKVTKYMQDRETAYSKNFRIADEETGEILTRSNFTREQYDEAYGVRFPVPWETFREEIDLRIFNDDPFGYLMKDRNLQIKIDYPDWMYGEEESPVAKGKYINYIRPMFVSVACSHKATGRAHEETIRSAKYHDSDSLVISKRALKDLKLNKDNEIKDYYNKECDPLLYEALRNRLLEYGGDGKKAFAEEFHKPKADGTDGPVVKSVKVIEKKTTGVQINHGLAGNGNMVRVDLYQKEGKYYAVPIYISDMVKKEIPRKAATGGKQYKDWRVMNPDDFLFSVYPRDLLHLKKGKPFNDGLSNDIYMYFAGLDPASASFAVTAHDSSISLRGIGIQNLELIEKCQVDMLGEIHVCRQ

SEQ ID NO: 8195 - protein, 998 aa, synthetic construct
  REGION 1..998: note = Synthetic
MGEMSKTNMDRHRSYRIGLDIGIASVGWAVLENNSQDEPIRILDLGVRIFEAAEVPKTGAALAAERRDARTARRRIRRRRHRLERIKWLFEKEGLIQIDSFMERYHSPNLPDVYGLRYEGLERKLSNEEFAQVLLHIAKHRGFRSTRKAELKEGDNGKVLKATEENRKRMEEHGYRTVGEMIYKDAYFHTECAWADNGYLLTPRNKADDYSHTMLRALLEEEVHILFDSQRKFGNEKATETLEQEYLEIMLSQRSFDMGPGQQADGTPSPYAMEGFGNKVGYCTLERESGERRAAKATYTAELFVALQKITHMKLVHMDGTSRFFTEEERNILLEMLSSKKEIKYAAVRKKLNLPLEEKFNTLNYNMKRKGKDNKEEEIDEAAIIAATEKATFISMSNCYEYRKRIGEYLETLPEEEQQDLLDEIGTILTCYKNDDSRMNRLTEAGLSKELADSLLELTPAKFQHLSIKAMKKIMPYMKEGMVYDKACEAAGYDFKNDNHGKKMKLLKGENITETINEITNPVVKRSVSQTVKVINAIILKYGSPQAVSIELAREMSKNFEERKKAEKQIEENRKKNEMAKKEIQELGKLSPNGQDILKYRLWHDQQGICLYTGKKIPLEELFQPGYDIDHILPYSITFDDSYRNKVLVTSQANREKGNRTPYEYFGQDEVRWSAYEARVNHFIKDYKKRRNLLKQGFTKEDRREFKERNLNDTKYITRVIYNMIRQNLEMEPLNREDRKKQVFAVNGSITAYLRKRWGLMQKDRSTDTHHAMDAVVVACCTDGMIQKISRSTQYREILYKGQSHPDYEIVDVETGEIISLEDLSREEWDERYGAQVPPPWEHFKEELEVRMGSDPKNDLDTHPDMYQLFRYPEDVYNNIRPIFVSRMPNHKVTGAAHADTIRSPRHYNDGGEIFDDSGYVLSRTNIEDLKLDKDGEIKDYYNKDSDRLLYEALKARLVEYEGDGKKAFAEEFYKPKADGTQGPIVKKVKTYKKCLLV

SEQ ID NO: 8196 - protein, 970 aa, synthetic construct
  REGION 1..970: note = Synthetic
MRENGSDERRRNMDEKMDYRIGLDIGIASVGWAVLQNNSDDEPVRIVDLGVRIFDTAEIPKTGESLAGPRRAARTTRRRLRRRKHRLDRIKWLFENQGLINIDDFLKRYNMAGLPDVYQLRYEALDRKLTDEELAQVLLHIAKHRGFRSTRKAETAAKENGAVLKATDENQKRMQEKGYRTVGEMIYLDEAFRIGCSWSEKGYILTPRNKAENYQHTMLRAMLVEEVKEIFSSQRRLGNEKATEELEEKYLEIMTSQRSFDLGPGMQPDGKPSPYAMEGFSDRVGKCTFLGDQGELRGAKGTYTAEYFVALQKINHTKLVNQDGETRNFTEEERRALTLLLFTQKEVKYAAVRKKLGLPEDILFYNLNYKKAATKEEQQKENQNTEKAKFIGMPYYHDYKKCLEERVKYLTENEVRDLFDEIGMILTCYKNDDSRTERLAKLGLVPIEMEGLLAYTPTKFQHLSMKAMRNIIPFLEKGMTYDKACEEAGYDFKADSKGTKQKLLTGENVNQTINEITNPVVKRSVSQTVKVINAIIRTYGSPQAINIELAREMSKTFEERRKIKGDMEKRQKNNEDVKKQIQELGKLSPTGQDILKYRLWQEQQGICMYSGKTIPLEELFKPGYDIDHILPYSITFDDSFRNKVLVTSQENRQKGNRTPYEYMGNDEQRWNEFETRVKTTIRDYKKQQKLLKKHFSEEERSEFKERNLTDTKYITTVIYNMIRQNLEMAPLNRPEKKKQVRAVNGAITAYLRKRWGLPQKNRETDTHHAMDAVVIACCTDGMIQKISRYTKVRERCYSKGTEFVDAETGEIFRPEDYSRAEWDEIFGVHIPKPWELFRTELDVRMGDDPKGFLDTHSDVALELDYPEYDYENLRPIFVSRMPNHKVTGAAHADTIRSPRHFKDEGIVLTKTALTDLKLDKDGEIDGYYNPQSDLLLYEALKKQLLLYGNDAKRHLLRIFISRKQTVQKVR

SEQ ID NO: 8197 - protein, 735 aa, synthetic construct
  REGION 1..735: note = Synthetic
MRENGSDERRRNMDEKMDYRIGLDIGIASVGWAVLQNNSDDEPVRIVDLGVRIFDTAEIPKTGESLAGPRRAARTTRRRLRRRKHRLDRIKWLFENQGLINIDDFLKRYNMAGLPDVYQLRYEALDRKLTDEELAQVLLHIAKHRGFRSTRKAETAAKENGAVLKATDENQKRMQEKGYRTVGEMIYLDEAFRTGCSWSEKGYILTPRNKAENYQHTMLRAMLVEEVKEIFSSQRRLGNEKATEELEEKYLEIMTSQRSFDLGPGMQPDGKPSPYAMEGFSDRVGKCTFLGDQGELRGAKGTYTAEYFVALQKINHTKLVNQDGETRNFTEEERRALTLLLFTQKEVKYAAVRKKLGLPEDILFYNLNYKKAATKEEQQKENQNTEKAKFIGMPYYHDYKKCLEERVKYLTENEVRDLFDEIGTILTCYKNDDSRTERLAKLGLVPIEMEGLLAYTPTKFQHLSMKAMRNIIPFLEKGMTYDKACEEAGYDFKADSKGIKQKLLTGEKVNQTINEITNPVVKRSVSQTVKVINAIIRTYGSPQAINIELAREMSKTFEERRKIKGDMEKRQKNNEDVKKQIQELGKLSPTGQDILKYRLWQEQQGICMYSGKTIPLEELFKPGYDIDHILPYSITFDDSFRNKVLVTSQENRQKGNRTPYEYMGNDEQRWNEFETRVKTTIRDYKKQQKLLNREKRKGLPIMKALLNIFYFLFYTVSISFSFSANISSIFFMYLS

SEQ ID NO: 8198 - protein, 1126 aa, synthetic construct
  REGION 1..1126: note = Synthetic
MEPINYRIGLDIGITSVGWAVLLNNSNNEPIHILDMGVRIFDKAENPKNGASLAGERRMARSVRRRIRRKRLRLSTIKKLFADYGLVDLDEFEQHFHAKNLENVYELRCKGLDELLTGEELAQVLLFIAKHRGFRSTRKAETKQDKDSGKMLAATKANAKLLEEKKYRTVGEMFYKDDAFKTARPYASIPYEYTTRNKQKNYQHTVIRVLLVDEVKQIFQAQRNLGSKYASIEFENKYLEIMQEQRSFDLGPGKQADGKPSPYAVNGFQDKTGKCTFEKDQIRAPRAAYTSEVFSLCEKLVHLKIVNAENGDDYFLSSEQRDKIFQYAHSHKEVTYENLRKLLGLSDNDRFKTLNYSPKKKEDYRLPISERVKKTEKAKFISLSNYYDIRKAIGSDAIVPDQDLADLVDRIAVILTSYKNDDSRTAELKKLNLNDHQISNLLYLSPAKYMHLSFVAMKKIIPFLKKGETYDKACEDAGYDFRNNNNGERIKLIKGKVLNDFLKDIPNPVAKRGISQAIKVLNAIILKYGSPQSVNIELARDMAKNFLDRKESQKYMENRASENEKIKKEIQELGKSNPTGLDIVKYRLWKDQQEYCLYTGERIKLEDLFQPGYDIDHIIPYSRSFDDSYHNKVLVTSQANREKGNRTPYEYMGNDPEKWNRFVTLVNSYVTDSSKKMNLFKHHFTSEDAAEFKERNLSDTRYITRAVYNLIRNNLQFSGCENTRAVNGAITSYLRKRWALGEKDRRTDIHHSVDAVIIACVTPGIIQKITRYTQGRELARTRGMKLVDEKTGEVFDPRDYTTQEWDEMFGVKPPLPWKTFKEEVELRLGTDPLYLLNTQHDFKKKLDYPDWMLDKKYIHPIFVSRMPRHKNTGTVHDATIGSPKMFTDGYVIKKTDLTSLRLDKNGEIEGYYNPESDMLLYNALKARLIAFKDRKEGAKEAFKQPFYKPKADGTQGPLVKKVKICDKQTSGVKAAGGIANNGDMIRIDIFNVKGKYYMVPIYVSDTVKKELPNRAVVAHKPVSEWKVMDDKDFCFSLYPNDLIRISKKGGIKVIDVSKKRYAEREMLGYYTGADVSAGAIGLEKHDNSITARGIGIQSLTVFEKYTVDVLGNISLVRKEPRMKFGS

SEQ ID NO: 8199 - protein, 1169 aa, synthetic construct
  REGION 1..1169: note = Synthetic
MMPPINYRIGLDIGIASVGWSVILNNALDEPCHIVDMGVRIFEKSEDDQTGATLTMARRGARSQRRLIRRRKHRLDRVKHLLEEKGIIVLEAFEKRYHEAGLPDVYKLRTEALDRKLSNDELAQVLIHIAKHRGFKSNRKADTKDKESGLLLTATADNKKLLIEKGYRTVGEMLYKDSAFRLETPWNKAGFTLNARNRDGSYKHTMLRDLLVDEVNTIFDRQQALGNAIAGDDLREAYLAIMTAQRSFDMGPGGESPYALDGFGDKVGFCTLEREEKRAPKAAYTAEYFNVLQKINHTRIISEFGEYRDFTTEEKVVLLNEVHIRKSLTYAQVKAKLKLNATDTFSTLNYNKQNGDLEKTEKTKFISMPFTVSVKEILEGNPRENEADRHLYDEVARILTDYKNDDNRTESLKKLHLADDKIQELLMLTPAQHLHLSVKAMNKLIPFLEQGMVYSDACEHAGFQSTAKTKMHVLKSYKVRRADGSVDIEKTKVIQNEAKEIQKQLQDITSPVVRRAISQSLKVLNAIILKYGSPQAIHVELAREMAKTFDERHKITSSNKKRQDENGKFLEEISKFINNPKGQDLVKYRLWQQQDGFDPYTGRKIPVEQLFKNDGYEIDHILPYSKSMDDSYANKVLVAAEANRLKKNQTPYEYFEHSNKSSMTWDQYVSWVLSTIKDENKRRHMLKKHIHEDEERQFIARNLNDTRYATRFVLSLIRDYLEFAPWNTDGKKKHAFAVNGVITGYLRKRWGLPQKNRETHQHHSVDAVVIACVTDHMIQRISSYSKQLEMDQNRYVDPDTGEILDRAKMDAATWKRKLWMPMPWKTFRDELVIRLGDDPLGFITEHSDVMTSLNLPEWMLCPEVIHPIFVSHMETHKITGKAHDDTIRSGKYLSTIGNAFSKVAIETLKINNNTGEIDGFADKHGELLINAKSDMLLYNALKNELLGAKLEGRKPFYDKNGNLNAFHKPKSDGTEGPIVRKVKIMTKVQSGVELTNNAIAGRKKGAMIRIDVFRIALPKKPDTFKYHFVPIYIDDAVRQVMPMRAAAKDKPQSEWKIMKESDFIFSLYPNDLIYFKSARGVPVASKAGNKFKLNEGYVYYKGADISGLTIKVESHDGLIEDARFGIQTLDAFEKYTVDILGNKSLVKHEKRRVVKTKKQRTRKTENHGL

SEQ ID NO: 8200 - protein, 1212 aa, synthetic construct
  REGION 1..1212: note = Synthetic
MVVNRKALIPPVMRVGLSFIWKNSLSDCSGVKEWNETDWQNILNEKMLQDREICKDKEQEDEKMNYRLGLDIGIASVGWAVVRTDSKDEPCGIERMGVRVFDKAEVPKTGDSLASARRSARCTRRRLRRRRHRIERTEILLENAGLIDRNLFQERYQSGQMENVYELRVRALDELISDEGLAQILVFMVKHRGFKSTRRAEMKDDETGKVLSAVKENERRMKEQGYRTVGEMIYLDESFRKDAPWSDTHYLLTPRNKGGDYRHTIFRAQLEEEVLLILDTQKALGNDKITEEFIEKYKFIFEGQRSFDEGPGLQSDHQTPSPYAGSLIENMVGNCTFEKDEKRAAKATYTAQRFMLLEKINHTTIVCDGVERRLSDAERQALKEYAYQKEKLTYEDVRKKLKLSDDAFFKSLVYQKNKAETEKKTKYVSLDEYHKFKKASIRFVDSIEINQNYELYDQVATILSYYKGDERRMDELSTLGIPMDICGELLELSPSKFQHLSVKAMQNILPYLEEGQIYSDACTAAGYDFRNDGEREKQKYLTQEVVQEMLADIPNPVVCRAISQTVKVVNAIIREYGSPVAVHIELAREMAKNFKERNELTKSMEQNMKKNESVKKRLHEEYGVINPTGQDIVKFKLWEEQDGRCMYSGDAISIEHLFAPGYAEVDHIIPYSISFDDSYRNKVLVKKQYNQEKGNRTPYEYFGQNESWWKKYENLVQTCVKDFRKQQHLLKKHVSKEEREEFKVRNIQDTKYITSAMQNLIRQNLLMAPYETPDKKRKMFTVNGTVTDYLKKRWGLPKKDRRTDKHHAMDALVVACTTQGMIQKISQTIQAREIAGAKECVLFDENTGEIFERHLYSNDEWDELFGVRIPLPWNLFRLETAAFMAEDPSFEEDQEERCNSGKDIFGERKELLVKELIRQGYRKNEEQQEIVIPSIFVSRMPRHKVTGAGHEDTIRSARHFDEEGMVVKKTSLDALKLDKDGEIKDYYDKESDWLLYNALKKRLQEYGGDGKKAFPVGEDFHKPKADGTDGPVVKKVKLISKQSLGVKVNGGAGICSNGSMIRIDLFRENGKYYYVPVYTADAIKKELPMKAATAAKPYEKWKVMKEENFLFSIYPGDLIEIQAAKGKTIPVTTVDKEKREKQTIKAYFNGADISSASISGESHDRTFSFRGLGVQSLDSIKKFQVDILGNYHEVKKEVRRDFSKRKMSKIRK

SEQ ID NO: 8201 - protein, 1182 aa, synthetic construct
  REGION 1..1182: note = Synthetic
VSQALIPSKVNSLGGIIHFIGEEMYMEEIKQLSKNEEIPKPTDLNYRIGLDIGIASVGWAVLENDDDDEPCRIIDLGVRIFKKAEQDNGDPLALPRREARSARRRLRRRRDRVLRIKKLFEAEGLINIDEFEARYEKAGLTDVYRLRYEGLDRKLSNDELAQVLLHIAKHRGYKSNSKAEETANSEDEAKQKEAGEVKKSISDNKKLMMEKGYRTVGEMLYLDEKFKIDCNWNAEGYVFCPRNKAGEYKVIILRDMLVEEVKAIFDAQRKYGNIAATVELEKKYLDIMLSQRSYDQGPAAPSRYAIDGYEFGMCTFERKNGHRRAPKAAYTSELFVALLNINHTKIRDKDGNLRTFSDEERKKLIKLLHVQQEVKYSSARKLLGLPDDETFYNLTYSKGKNKNCEDAVFIKMKNYHKIRVAMNEECTDKLLDDERADKYDTIAYFLTKYKNDDSRLKELRALGIGGNECANLLKLSFTKAQNLSLVAMKKIIPFLLDGKVYSEACKLAGYGEYEEDKNTGKLKLLKGKEITEYVNEISNPVVRRAVSQTIKVLNAIIIEYGSPQAVNIELSRQMAKNKNERDKIDNDMKKRSAENSKILNEIMEYKANPTGKDVVKYRLWKEQKEVCLYTGKKISADELFAGDGEYDIDHILPYSKTFDDSYHNKVLVKAEANREKGNRTPYEYLISKGGEKAWEEFSVRVEHCIKDYKKKQKLSKKCITEDDTKEFKRRNLQDTQYATTFIYNLIRQNLYLKPYQNLTNKKVQQVVALNGSITSYLSKRWGLESKDRKIDTHHAQDAVVIACTTQGRINKISNYFMCREAELSGNHVISRKKYDENSGEEFPKPWKYFKKELDVRMSRYHGEAGAIDYVTTPREYLLLDKDVRKHIGYPDWMFVKGRPGRRGVLDGIFVSRMPSRKVSGKAHEDTIRSAKYYKDGGCGVNKGYVVFKKTIQGIKLDENDEIKDFFNPDSDRLLYNALVNRLKQHNNNPKEAFAEPFYKPKSDGTPGPIVKKVKVFEKMTIGVSLEKAEGYAGNISGSMIRVDFYYVNGKYYFVPVYVSDVVNHQLPRKRAVKEKVSSEWEEVDDKDFIFSIYKNDLVYIENDKLPLTHKNNSDYPLPDAKNGVFMYFCDADISSLAIRCESNDGSFGFRSSIVTVKKFCKCQVDVLGNISFVHKEKRMTFN

SEQ ID NO: 8202 - protein, 1004 aa, synthetic construct
  REGION 1..1004: note = Synthetic
VLLHIAKHRGFRSTRKAETAAKENGAVLKATDENQKRMQEKGYRTVGEMIYLDEAFRTGCSWSEKGYILTPRNKAENYQHTMLRAMLVEEVKEIFSSQRRLGNEKATEELEEKYLEIMTSQRSFDLGPGMQPDGKPSPYAMEGFSDRVGKCTFLGDQGELRGAKGTYTAEYFVALQKINHTKLVNQDGEIRNFTEEERRALTLLLFTQKEVKYAAVRKKLGLPEDILFYNLNYKKAATKEEQQKENQNTEKAKFIGMPYYHDYKKCLEERVKYLTENEVRDLFDEIGTILTCYKNDDSRTERLVKLGLVPIEMEGLLAYTPTKFQHLSMKAMRNIIPFLEKGMTYDKACEEAGYDFKADSKGIKQKLLTGEKVNQTINEITNPVVKRSVSQTVKVINAIIRTYGSPQAINIELAREMSKTFEERRKIKGDMEKRQKNNEDVKKQIQELGKLSPTGQDILKYRLWQEQQGICMYSGKTIPLEELFKPGYDIDHILPYSITFDDSFRNKVLVTSQENRQKGNRTPYEYMGNDEQRWNEFETRVKTTIRDYKKQQKLLKKHFSEEERSEFKERNLTDTKYITTVIYNMIRQNLEMAPLNRPEKKKQVRAVNGAITAYLRKRWGLPQKNRETDTHHAMDAVVIACCTDGMIQKISRYTKVRERCYSKGTEFVDAETGEIFRPEDYSRAEWDEIFGVHIPKPWETFRAELDVRMGDDPKGFLDTHSDVALGLDYPEYDYENLRPIFVSRMPNHKVTGAAHADTIRSPRHFKDEGIVLTKTALTDLKLDKDGEIDGYYNPQSDLLLYEALKKQLLLYGNDAKKAFAQDFHKPKADGTEGPVVRKVKIQKKQTMGVFVDSGNGIAENGGMVRIDVFHVNGKYYFVPVYTADVVKKVLPNRAATAHKPYGEWKVMEDKDFLFSLYSRDLIHIKSKKDIPIKMVNGGMEGIKETYAYYIGADISAANIQGIAHDSRYKFRGLGIQSLDVLEKCQIDVLGHVSVVRSEKRMGFS

SEQ ID NO: 8203 - protein, 854 aa, synthetic construct
  REGION 1..854: note = Synthetic
MYISWRSGGAARRKGTYTAEYFVALQKINHTKLVNQDGETRNFTEEERRALTLLLFTQKEVKYAAVRKKLGLPEDILFYNLNYKKAATKEEQQKENQNTEKAKFIGMPYYHDYKKCLEERVKYLTENEVRDLFDEIGMILTCYKNDDSRTERLAKLGLVPIEMEGLLAYTPTKFQHLSMKAMRNIIPFLEKGMTYDKACEEAGYDFKADSKGIKQKLLTGEKVNQTINEITNPVVKRSVSQTVKVINAIIRTYGSPQAINIELAREMSKTFEERRKIKGDMEKRQKNNEDVKKQIQELGKLSPTGQDILKYRLWQEQQGICMYSGKTIPLEELFKPGYDIDHILPYSITFDDSFRNKVLVTSQENRQKGNRTPYEYMGNDEQRWNEFETRVKTTIRDYKKQQKLLKKHFSEEERSEFKERNLTDTKYITTVIYNMIRQNLEMAPLNRPEKKKQVRAVNGAITAYLRKRWGLPQKNRETDTHHAMDAVVIACCTDGMIQKISRYTKVRERCYSKGTEFVDAETGEIFRPEDYSRAEWDEIFGVHIPKPWETFRAELDVRMGDDPKGFLDTHSDVALELDYPEYDYENLRPIFVSRMPNHKVTGAAHADTIRSPRHFKDEGIVLTKTALTDLKLDKDGEIDGYYNPQSDLLLYEALKKQLLLYGNDAKKAFAQDFHKPKADGTEGPVVRKVKIQKKQTMGVFVDSGNGIAENGGMVRIDVYRVNGKYYFVPVYTADVVKKVLPDRASTANKPYSEWRTMEDKDFLFSLYSRDLVHIKSKKGIPIKNVDGSLGESKEVYAYYIGADISGAKIEGKAHDSRYTFRGIGVQKLELIEKCQVDILGHISTVKNEKRMGFS

SEQ ID NO: 8204 - protein, 1154 aa, synthetic construct
  REGION 1..1154: note = Synthetic
MYIILYQLILGYYSKVVHLRALAPFLGMGLSLFLGGNMQEINYRIGLDIGIASVGWAALLNDEHNEPVHILDMGVRVFDKAENPKDGSALAVPRRNNRTARRRQRRKKLRVATVKKICEDNGLIQIQEFDKKLATGCCPDVYELRVRALDERISGENLAQILLYLAKHRGFRSTRKFESNNEENGKVLSATEANRKILKEGGYRTVGEMLFKDDAFRSYTSFSNKEYVLTTRNKADNYLHSIDRASLVEEVIKIFEAQRNYGNPFVTEQFEKEYLQIMQNQRSFDLGPGLQANGVKSPYAINGFQDKVGRCTFEKNEYRAPKASYSAECFSLLEKISHLKINDINGDYRILTSEQRNNIFELAHKQKDIKYSTLRKLLGLSETERFNMVSYNEKLKQGEHNKSIEKTERSKFYEMKNFHEFCKALNLEETIPDETTIDLLDKISEIITGFKNDDSRILELTKLGISEQHISELLKLSPSKYMHLSIVAMKKIIPGLKDGLTYDKACEAAGYDFRRDSNRERTKLLKGNVVQEVLNDITNPVVKRGVSQSIKVINAIILKYGSPQAINIELARDMAKNYKDRSADEKRMLKRADENSKIKEEIIELGFANPTGKDIVKYRLWKEQQELCLYTGKRIGISDLFGNSSTVDVDHIIPYSKSFDDSYHNKVLVYAGANREKGNRTPFEYLGNTDKWNDFVIRTNLYITDYKKKQRLFKEHFTKEEASEFKERNLNDTRYITKTVYNLIRQNLSFKNKATVVCVNGSITSYLRKRWALPVKDRTTDLHHSVDAVVIACVTPGIVHKITKYTQAREIAKSKGLVMIDEETGEVFDPKEYTNNEWDAMFGVKPPLPWSAFKDEIIIRTGKKPLEFILASRKVNCELNYPEWMMNENVIKEIFVSRMPRHKNTGSVHDATIRSPKIFDEGYVISKVPLSKLKLKAGEIENYYNPESDLLLYNALKERLIKYENDSEKAFAEPMYKPKSDGSRGPLVKRVKVVSKMTLGVPAASGIAANGDMIRIDIFCENGKYYMVPIYVADTVKKELPNRAVVANKPLTQWKVMNESDFVFSLYPNDLIMVAKKGGIKVTNNQGQKEEKTDKIFVYYNFADIATGSIKFSSDDNEYSGRLGIQSLQCFKKYTVDVLGNIQLVNKERRCDFR

SEQ ID NO: 8205 - protein, 937 aa, synthetic construct
  REGION 1..937: note = Synthetic
MEEMKQTGRKNEAPKPTDLNYRIGLDIGIASVGWAVLENNSHDEPFRIIDLGVRIFDTAEQPKTGASLALPRREARSARRRIRRRRDRIERIKKLFQAEGLINIDEFEARYKIAGLPDVYKLRYEGLDRKLTDDELAQVLLHIAKHRGFKSTSKAEEAENENDAAKKKEAGALKKGISNNKKLMEEKGYRTVGEMMYLDENFRTDCPWNENGYILTPRNKSGDYKHTVLRDMLVDEVREIFKSQRSLGNIHASEELENAYLDIMLSQRSFDMGPGAPSKYAMEGFEDRVGLCTFEGKNGEKRAAKAAYTSELFVALEKINHTKIVSDDGATRFLTTYERKSIIELMHKQQTVKYVAVRKAIGLAEEDKFYNLNYSPKAGSKKSPEDTDFVKLENYHKIRKALGEDIVSEHLPAEKIKLYDSIATILTLFKNDDSRIKRFIELGIGEECFDGLLSLSPSKFHNLSLVAMGKIIPFLLDGNTYDKACELAGYDFKADNKGEKSVLLKGKNITDMVNDITNPVVRRSVSQTIKVINAIILEYGSPQAVNIELAREMSKNFDERRKLKSDMESREKENNNVIKRVKEYKLNPTGQDIVKFRLWEEQDRRCLYSGEKIDINDLFSRDGGYDVDHILPYSITFDDTYRNKVLVKASENRQKGNRTPYEYFMAEKDDDAWNAYETLVRNTVKDYRKVLKLLKKHITEDEKSEFRERNLTDTKYITRIIYNMIRQNLVLKPYLNLEKERKKQVMAVNGSITHYLSKRWGLESKDRRTDTHHAQDAVVIACTTDGMINKISRYSKGRELLYSRGFKFVDEETGEILSRDNFAREEWDEKYGVKIPMPWEYFRDELDIRMSRYNGTGDDSIDKTTPRDFILSHRDVHKWINYPEWMFVEGRPGRRGVLDGIFVSRMPNHKVSGQAHEETIRSAKYYNDGGSVFESGG

SEQ ID NO: 8206 - protein, 1174 aa, synthetic construct
  REGION 1..1174: note = Synthetic
MEEMKQTCRRNEAPKPTDLNYRIGLDIGIASVGWAVLENKQNDGEPFRIIDIGVRVFDSPDKTGDFLSYKRREARSARRRIRRRKGRLERIKKLFQAEGLINIDEFEARYKKAGLPDVYKLRYEGLDRKLTDDELAQVLLHIAKHRGFKSNSKAEETENENDDTKKKEAGAIKDSISSNKKIMEEKGYRTVGEMLYLDEKFKIDSNCNTMGYVFCPRNKQGDYKVIVFRDMLVDEVRAIFNAQRNFGNISASDELGKKYLDIMLSQRSFDQGPGAPSQYAMDGFDFGMCTFEKGNGEKRAPKAAYTSEIFVALQKINNTRIVDKDGNIRNFSDEERWKIIRLIHKQQEVKYSSIRNELCLSDDEKFYNLTYGKKKDSEQSVFVKMVNYHSIRKALKEECSGELLDDKHAELYDNIAYYLTKYKNDDSRLKELRNLGIGEEECNNLIKLSCTKTQNLSFVAMKKLIPFLLDGKVYSEACKMAGYDNFNEDSCTERLILLKGQKVKDAINEIYNPVVRRAVSQTIKVLNAIILEYGSPQAVNIELSREMAKNKIERDKIDNDMKKRKKENEKILDEIREFKPIPSGKDIVKYRLWKEQKEICLYTGKKISAEELFASDGGYDIDHILPYSKTFDDSYRNKVLVRSEANKNKGNRTPYEYLISQGGEKAWEEFTIRIEHNIKDYKKRQKLLKKHITDEETNEFKRRNLQDTQYATTFIYNLIRQNLQLKPYENFNGKNKQQVMALNGSITHYLSKRWGLENKDRKIDTHHAQDAVVIACTTQGMINTISNYSKFRELELDKINKSRSIKVDELSDNEFITREQYDKNFGVEFPPPWKNFKEELDIRMSRYHGAGDEKFLETSPREYIQSHGDVRKRLNYPDWMFVKGRPGRRGVLDGIFVSRMPNHKVAGQAHEETIRSAKYYEDGGSVFESGGYVVYKVPIQDIKYINGEIMYGKSARYFNPDSDRILYKALIRRLELFNGDASKAFAEPFYKPKADGTQGPVVKKIKVFEKQTLGVPIGNVNGRAANGDMIRIDVFCEEDNGKKKYYFVPIYTSDAVKKKLPDCAATAHKMSSEWRVMKEENFIFSLYSRDLIYIESDKGVPLHTISKTVYYRKSLFAYYMGANISKASILGEVQDNSANFDGLGIQGLKKILKCNIDVLGNISFVNKEKRMPFN

SEQ ID NO: 8207 - protein, 1206 aa, synthetic construct
  REGION 1..1206: note = Synthetic
VYLKALIPSKVNTLGGIIYFMQKGILMEEMKHLNRKAEVPKPTDLNYRIGLDIGIASVGWAVLENNSHDEPFRIIDMGVRIFDTAEQPKTGASLAAPRREARSVRRRLRRRGHRLERIKKLFQAEGLINIEEFEARYKRAGLPDVYRLRYEGLDRRLTNDELAQVLLHIAKHRGFKSTSKAADNENNSDDAKKKENGAIKESISNNKKLMEEKGYRTIGEMLYLDEKFKIDSNWNACGYIFCPRNKMGEYKVIVLRDMLVDEVHALFNAQRKYGNTVASDGVEKAFLDIMLGQRSFDLGPGYPSKYAIDGFEFGKCPFEGKNGKRCAPKAAYTSELFVVLQNINHTRIVDDGGNVRNFTEEERNKIIELVHKQNEVKYSAVRKEIGLKDNEKFYNLTYSKGKKKDSEQSTFIKMINYHSITKALKRECTGEILSDECADLYDEIAYNLARYKNDDSRLKELRDLGIEEEKCNDLLKLSCNKPQGLSLDAMKKIIPFLLEGKVYSDACQMAGYGDFAADICTGKSILLNDNGGEKIRETLNGITNPVVRRAVSQTIKVINAIITEYGSPQAVSIELSREMAKNKKERDKIDNDMKKRSEENDKFIDEIREYKPIPTGKDIVKYRLWKEQKEICLYTGKKISADELFSGDGGYDIDHILPYSKTFDDSYRNKVLVRAEANRIKGNRTPYEYLISHGGEKAWEEFTIRVEHCIKDYKKKQKLLKKTITDEDTNEFKKRNLQDTQYATTFVYNLIRKNLYLKPYQNSTNKKTQQVMALNGSITNFLSKGWGLEKKDRRTHLHHAQDAVVIACTTQGMINSISDYFKCRELELERINRHVNKESKKEFDDNIVTREQYDKQFGKKFPLPWQHFKEELDIRMARYHGVSGAIDFETSPLEYLTSHADVCNRINYPEWMFVKGRPGRRGVLDGIFVSRMPNHKVSGQAHEETIRSGKYYENGGCGLDSGYVVYKVPLQEIKYINGDIIYNRSARYFNPDSDRLLYNALISQLERFNGDAKVAFAEPFHKPKADGTQGPVVKKIKVCGKQTLRVPVGENGIASNGDMVRIDVFCEENKGKKKYYFVPIYVSDVVKKRLPNKAVVAHKSESEWKVMDENNFLFSLYSNDLIYIESRGDDGVNFCDIDKSSFTLTSFFAYYKFADIANGNIAGVLDYKDAKFKGLGLQRLRRFEKYQVDVLGNVSFVKKEKRMPFN

SEQ ID NO: 8208 - protein, 1128 aa, synthetic construct
  REGION 1..1128: note = Synthetic
MERRFDYRIGLDIGIASVGWAVLQNNSKGEPVHIIDMGVRIFDKAEQPKTGEALAAPRRDARTSRRRLRRRRHRLERIKWLFVQEGLLEDAEKFMERYHKAGLPDVYQLRYEALDRVLEDEEFAQILIHIAKHRGFRSTRKAETKDKEGGAVLKGTAENEKLMEEKGYRTVGEMIYCDEKFHSECLWTEKGYVLSPRNKPDDYQHTILRRMLEDEVKQIFESQRNLGNKKATVSLEEKYLEIFNSQRSFDKGPGLQPDGTPSPYSMEGFEGRVGNCSLEKKELRAAKGTYTAEYFVALQKIAHTRLVDIAGEVRNFTDEERETLIELLHTQREIKYETVRKKLKLDIETRFYNLNYKSKKDGSIEEKVKETEKAKFLSMPFYHDYKKCLGERTEGMTAEEVADLMDQVGHILTCFKNDDSRRERLLVLGLDETEINALLELNPTKFQHLSIKAMRNIIPYLEKGMTYDKACEAAGYDFKADSGNTKKVLLKGEEVTNIINEITNPVVKRSVSQTVKVINAIILKYGSPQAINIELAREMAKNFEERKKLEKGMEERQKANERVKKELEELGVFSPSGQDIIKYRLWQEQGGICLYSGKKIPIEELLSRRGGYDVDHILPYSITFDDSFHNKVLVEAAENRQKGNRTPYEYFGHEEERWKAFEVRVFNTVKDYKKQQKLLKHSISEQECKEFKERNLTDTKYITTVVYNLIRQNLEFALLNDTTKKKQVRAVNGAITAYLRKRWGLPQKNRETDTHHAVDAVVIACCTDGMIQKISRYMKATELRYTKDFTFVDEETGEIIRPREMDRDEWDKRFGVRIPLPWSAFRMELDVHMADDPKLFLENSVDVSIAIDYPPEIYDEIHPIFVSRMPNHKVTGAAHKDTIRSPRHYKERGTVLTRTAITDLKLNKAGEIEGYYNKESDWRLYRALKAQLAACENDGKKAFAGGFHKPKADGTDGPVVKKVLIESKQTSGVAVNNSHGIAENGSMVRIDVFRENGKYYFVPIYTADVVKKVLPNKAATAGKIQNEWREVQDKDFVFSLYRNDVVHIVSKKGVKVVPVTGGQVVKNEIYSYFKGADIATVSITGIGHDSGFKYRSLGIQGLDLIEKCQVDVLGNISVVRHEVRMGFS

SEQ ID NO: 8209 - protein, 576 aa, synthetic construct
  REGION 1..576: note = Synthetic
MNAEHGKEGLLIMEEKFQYRIGLDIGITSVGWAVLQNNSQDEPVRITDLGVRIFDVAENPKNGDALAAPRRDARTTRRRLRRRRHRLERIKFLLQENGLIEMDSFMERYYKGNLPDVYQLRYEGLDRKLKDEELAQVLIHIAKHRGFRSTRKAETKEKEGGAVLKATTENQKIMQEKGYRTVGEMLYLDEAFHTECLWNEKGYVLTPRNRPDDYKHTILRSMLVEEVHAIFAAQRALGNEKAAEELENAYVEIMTSQRSFDMGPGLQPDGKPSPYAMEGFGDRVGKCTFEKDEYRAPKATYTAELFVALQKINHTKLIDEFGTGRFFSEEERKTIIGLLLSSKELKYGTIRKKLNIDPSLKFNSLNYSAKKEGETEEERVRDTEKAKFAGMPWTYEYSKCLKDRTEEMPVGEKADLFDRIGEILTAYKNDDSRSSRLEELGLSGEEIDGLLDLSPAKYQRVSLKAMRKMQPYLEDGLIYDKACEAAGYDFRALNDGSKKHLLKGEEINAIVNDITNPVVKRSVSQTIKVINAIIQKYGSPQAVNIELAREMSKNFQDRTNLEKEMKKRQQENERAK

SEQ ID NO: 8210 - protein, 784 aa, synthetic construct
  REGION 1..784: note = Synthetic
MENYHKIRKALGEEVVSEHLSPDKIKLYDDIARILTLYKNDDSRIRRLAEHDIASECYDALLEMSPSKFHNLSLRAMGKIIPFLLEGNTYDKACELAGYDFRAENNGEKSILLKGKNITNIVNDITNPVVRRSVSQTIKVINAIILEYGSPQAVNIELAREMSKDFDERRKIKSDMEAREKENDKVLGRVREYKPNPTGQDIVKFRLWEEQGGVCLYSGEKIDINDLFSSNGGYDVDHILPYSITFDDSYRNKVLVKAAENRQKGNRTPYEYIMAEKGEMAWNQYETLVKNTVKDYKKQLKLLKKHISDEEKAEFKERNLTDTKYITRIIYNMIRQNLVLKPYLNLERKRKKQVMAVNGAITHYLSKRWGLAGKDRRTDTHHAQDAVVIACTTDGMINRISRYSKGRELAYSRGFEFVDEETGEILNRDNFSREDWDEKFGVRLPMPWEHFVDELDIRMSRYSTMGEGVSSGTSPREFILSHRDVFNWINYPEWMFVEGRPGRRGVLDGIFVSRMPNHKVSGQAHEETIRSAKYYEDGGSVFETGGYVVTKKSIQDIKLKDGEIKEFFNPDSDRLLYEALVDRLNQYGNDPKKAFAEPFHKPKSDGTPGPVVKKIKVFEKQTSGVLVREGNGIAANGSMVRIDVFCEENKGKKKYYFVPIYTADVVKKRLPNRAATQAKMPSEWRLMNDENFIFSLYSRDLIYIESDKGVQTKDIDNVTGKVEKMYAYYTGADTSTASIAGKLHDSSAMFRGLGIQSLRKLQKCQIDVLGNISFVSKEKRMTFN

SEQ ID NO: 8211 - protein, 1059 aa, synthetic construct
  REGION 1..1059: note = Synthetic
MKTRTNRKDENFMENGFTYRLGLDIGIASVGAAVVQTNSFDNPCHLTEPDVRKFTAAECRENGKNNGKSAAVPRRECRSTRRRIKRKQLRMNCIKQTLQKAGLIDVDEFMKRYSDGTLPNVYQLRYEGLDRLLIDDEFAQILIHIAKHRGFLSTRRADKKDKESGAILAATSANQKLMMEKGYRTVGEMMYLDESFHTLCSSNEQGFIVTPRNKAKDYKHTIYRSMLVDEVHALFDAQRKLGNTKATETLESEYLDIMTRQRSYDLGPGLQADGTKSPFAMDGYKSNAGECTFYKEETELERINRIEDTVFVSMEFTLSYTDCLKARIKTLSETEKRDLFDEVGELLTSYKTDAARIEKLSNLGLTPEEVDRLLDLNPKGYAKLSHKAMKEIEPYLKQGLTYDKACAAAGLDFQVTYTGEKMKYLKGPEINRIINNIQSPVVRRSVAQTVRVINAIIRKYGSPQAVNVELSREMSKSFLERKKAETAMELRHKENVKFCEEIKKLGINSPNGEDITRYRLWRDQNGICLYSGEKIPARAMFSKEYEIDHIIPYSISLDDRYQNKVLVKAGENWKKGNRLPYEYFGHDKTRWAAYENRVESLIKSDGKKAHLLKKNYTKEDQREFTERNLNDTRYATTVVYNMIMQYLYLEPYNCDGKTKQVYAVNGAVTAYLRKRWGLNKKDRTNDRHHAMDAVVIACCTDEIIAKVTKYMQDRETAYSKNFRITDEETGEILTRSNFTREQYDETYGVRFPIPWETFREEIDLRIFNDDPFGYLMKDRNLQIKIDYPDWMYGEEESPVAKGKYINYIRPMFVSVACSHKATGQAHEETIRSAKYHDSDSLVISKKALKDLKLNKDNEIKDYYNKECDPLLYEALRNRLLEYGGDGKKAFVEEFHKPKADGTDGPVVKSVKVIEKKTTGVQINHGLAGNGNMVRVDLYQKDGKYYAVPIYISDMVKKEIPRKAATGGKQYKDWRVMDPDDFLFSVYPRDLLHLKKGKPFNDGLSNDIYMYFAGLDPASASFAVTAHDSSISLRGIGIQNLELIEKCQVDMLGEIHVCKR

SEQ ID NO: 8212 - protein, 1132 aa, synthetic construct
  REGION 1..1132: note = Synthetic
MDLNYRIGLDIGITSVGWAALENNSQDEPVRIVDLGVRLFEAAETPKGTSLAEPRREARTTRRRLRRRRHRLDRIKWLLQEHGIIQIGQFMERYHSAGLPDVYQLRYEALGRKLKDEEFAQILVHIAKHRGFRSTRKAELKDKKDKEAGAILSATQDNKKIMEEHGYRTVGEMIYKDEKFRTGCAWNEKGYLLTPRNKQGDYKHTMLRAMLEEEVKVIFQCQREFGNQKATNELEEAYLAIMSSQRSFDMGPGKQPDGSASPYAMEGFGDRVGLCALEPKENQEPRAPKASYTSELFVALQKINNLRIVEKGGASWGFTQEERQALFDLLHKKKEISYAAVRKEFKLGLEYRFNALNYSSKKETEEERIKETEKAKFITMANTYDYQKKMSGILEPLSQEEKENLLDEVGRVLTLYKNDDTRSREFQKLGLGQEVIEGLLELNPKGFQHVSWKAMRKLMPYLKEGLTYDKACEKAGYDFQGSEREKKTKLLKGKEITDIINDINNPVVKRSVSQTVKVLNAIIQKYGSPQAINIELAREMSRNYKDRKAMQKQMEGRQSENERAKQEIQELGNAFPSGQDILKYRLWHDQGGVCLYSGKKIPLRELFTGAYDIDHILPYSITFDDSYRNKVLVTAEENRQKGNRIPYEYFGNNPDRWSQFEVRVNSYVRDYRKQQKLLKQKFTEEERKEFKQRNLNDTKYITRVVYNMIRENLELAPYSRPERKKQVFAVNGAITAYLRKRWGLAAKDRSIDTHHAMDAVVIACCTDGMVTKISRNIQGRELLYAKGYVALDVETGELISRDDFTRDQWDEEFGVQVPRPWKYFKEELEIRMGEDPREFIEGHLDVARDLDYPVWFYEENIIRPIFVSRMPNRKVTGAAHADTVRSPRHYGETDCVLTKTALADLKLDKKTGEIQNYYKPESDKLLYRALKERLNLYGGDAKKAFEEPFYKPKSDGSKGNLVRKVKTYDKLTLGVRVNSKQGIAANANGSMVRVDVFCVDGKYYFVPVYVADVIKKRLPTKAVVAHKPYAKWKEMEDKDFVFSLYSRDLISFKSKGGKKVTCVDGTSKVVNEEVVYYYGADISTASFGGKAHNGKYEYRGLGIQSLEYLKKHQVDILGNVSEVRREKRMGFH

SEQ ID NO: 8213 - protein, 1153 aa, synthetic construct
  REGION 1..1153: note = Synthetic
MESNFNYRIGLDIGITSVGWAVLQDNSQDEPERIVDLGVRIFDVAENPKNGDALAGPRRDARSVRRRLRRRRHRLERIKWLFEENGLIEVDSFMERYHKEHLPDVYQLRYEALDRKLKDDELAQVLLHIAKHRGFRSTRKAETKDKENGAVLKATTENQKLMQEKGYRTVGEMLYLDDAFRSACPWNERGYILTPRNKAENYQHTILRAMLVEEVHAIFAAQRALGNEKTTEELEKKYIDIMTSQRSFDMGPGNQADGTPSPYAMEGFGDRVGKCTFEKEEYRAPKGTYTAELFVALQKINHIRLIDEFGTGRFLTEEERSLVVELLKSSKEVKYSAVRKKLKLDPAVKFNTLNYSAKKKEETEEMRIKNTENTKFVGMPSSYQYKKCLEDRVKDMPEFEMAELFDQVGEVLTAYKNDDSRTVRLEQLGLSTEEIGGLLELIPSGYQRVSLKAMRKMLPYLEAGMIYDKACAEAGYEFRALNDTHKMHLLKGEAVNEVLNDITNPVVKRSVSQTIKVINAIVLKYGSPQAVNIELAREMAKNFTDRTNMRKDMENRQKENEKVKKKLQELGKANPTGQDILKYRLWQDQQGRCIYSGKVIPLEELFDGAYDIDHILPYSITFDDSYRNKVLVTAQENRQKGNRIPYEYFGADEKRWNAYESLVKALIQDYRKQQKLLKKAFTAEEQQEFKERNLNDTKYITRVVYNLIRQNLELAPLNRPEKKKQVWAVNGAVTSYLRKRWGLPQKDRSTDTHHAMDAVVIACCTDGMIHKISRYMKGRELQYSRGFKLVDEETGEVFERDNFRREEWDKEFGVRVPLPWITFRDELDVRMAKGDPVNFLKTHPDVEREIDYPAWMYGEEESPIEKGRFITYIRPIFVSRMPNHKVTGAAHDATIRSARDYKERGVVITKMPITELKLNKDNEIEGYYDKDSDRLLYNALVRQLALAGNDPKKAFANDFHKPKADGTEGPIVRKVKIEKKQTSGVLVRKMEVERRHQEKEAEYTGIASNGAMVRIDVFRENGKYYFVPVYTADVVRKVLPNRAATHSKPYSEWRVMDDANFIFSLYARDLIHVKSKKDMKTTLNNGTSYLQKELYGYFTGADIATASIAGIANDSSFKFRGLGIQSLEIFEKCQVDILGNISVVRQEKRQLFH

SEQ ID NO: 8214 - protein, 1138 aa, synthetic construct
  REGION 1..1138: note = Synthetic
MERVNYRIGLDLGIASVGWAAILTDAKGEPKHIIDLGVRVFDKAEVPKTGASLATARRMARSTRRVIRRRRHRLDRVKLLLQSEGLIQLDAFMERYTMKGVPHPDVYELRCKALDQLLMPDEFAQILIHLAKHRGFKSNRKSETKSKENGKVLEALNKNKEVFEQKNYRTIGEMIYSDKSFYTEDCSSREGYIFTPRNKAGNYQHMILRSMIEEEVHYIFERQRQLGSTYASNDFEKKYTEILTSQRSFDLGPGKQADGNPSPYAISGFGDRVGLCEFEKDEKRAPRATFTAELFVALQRINNLRISCDDGSYRNLNEEEREILRKELLSRKEITYTRVRSILGLSEQQRFNLINYSTTDNSAASVQKTEKAAFIKMTYFYAFSKVFGTKFREMPPVETQDLYDSVATILTEYKNDDSRADNLIKLGINSEQIDELLSMNPSKYQHLSIKAMRKIIPFLMEGFTYDKACESAGYGYKGDNAGKKLHILKGKEITAAINDITNPVVKRSVSQAVKVLNAIILRYGSPMAVNIELSREMAKTYKDREQIKKDNDSRFAENEKIKAELKGNGLISPTGQDIVKYRLWQEQNHICPYSGRTIPYEDLFKPGLEIDHIIPYSITFDDSYRNKVLVYAEENQKKGNRTPYEYLSSKEIEWQKFVARLNICTRDYRKRQKLLKQHVSAAEKAEFKQRNLNDTKYITRMFYNLIREYLELAPIEGKKKQVWAVNGVVTAYLRKRWGFSVKDRSTDKHHALDAVVIACCTDRMIRKISNYSQGRELRYARGFRFVDEETGEVFDRDNFTRNQWDAMFGIRIPKPWQMFTEELEVRMSDNPRDVLQKDRALSRKIDYPCWIYNGEQVDGQDILRPIFVSRMSNHKVSGAANEATIRSPRYKDDRKITTKVPLTQLKLDKKTGEIVGYDDDDKNSDRILYDALKNRLIEFDGNAKEAFKTEFRKPKRDGTPGPVVKKVKITEITDAGFCVNDGRGFVKNDKMVRVDIYNKAGKYYVIPIYVANTVKPGLPNRAVKAHAPETDWRVMDDKDFLFSLYQNDLLYLESNKGITLWKIKKDENGTENKRVVHSLLAYYNSMNRNSAAIEGETSDGAFKFENLGIQNLKKLEKRQVDLLGYVTKVGKEHRMSFN

SEQ ID NO: 8215 - protein, 897 aa, synthetic construct
  REGION 1..897: note = Synthetic
MNAEHGKEGLLIMEEKFQYRIGLDIGITSVGWAVLQNNSQDEPVRITDLGVRIFDVAENPKNGDALAAPRRDARTTRRRLRRRRHRLERIKFLLQENGLIEMDSFMERYYKGNLPDVYQLRYEGLDRKLKDEELAQVLIHIAKHRGFRSTRKAETKEKEGGAVLKATTENQKIMQEKGYRTVGEMLYLDEAFHTECLWNEKGYVLTPRNRPDDYKHTILRSMLVEEVHAIFAAQRALGNEKAAEELENAYVEIMTSQRSFDMGPGLQPDGKPSPYAMEGFGDRVGKCTFEKDEYRAPKATYTAELFVALQKINHTKLIDEFGTGRFFTEEERKTIIGLLLSSKELKYGTIRKKLNIDPSLKFNSLNYSAKKEGETEEERVRDTEKAKFAGMPWTYEYSKCLKDRTEEMPVGEKADLFDRIGEILTAYKNDDSRSSRLEELGLSGEEIDGLLDLSPAKYQRVSLKAMRKMQPYLEDGLIYDKACEAAGYDFRALNDGSKKHLLKGEEINAIVNDITNPVVKRSVSQTIKVINAIIQKYGSPQAVNIELAREMSKNFQDRTNLEKEMKKRQQENERAKQQIIELGKQNPTGQDILKYRLWNDQGGYCLYSGKKIPLEELFDGGYDIDHILPYSITFDDSYRNKVLVTAQENRQKGNRTPYEYFGADEKRWEDYETSVRLLVRDYKKQQKLLKKNFTEEERKEFKERNLNDTKYITRVVYNMIRQNLELEPFNHPEKKKQVWAVNGAVTSYLRKRWGLMQKDRSTDRHHAMDAVVIACCTDGMIHKISRYMQGRELAYSRNFKFPDEETGEILNRDNFTREQWDEKFGVKVPLPWNSFRDELDIRLLNEDPKNFLLTHADVQRELDYPGWMYGEEESPIEEGRYINYIRPLLYPECQTIR

SEQ ID NO: 8216 - protein, 1112 aa, synthetic construct
  REGION 1..1112: note = Synthetic
MNEQSLNYRIGLDIGIASVGWAVLENGMEDEPRRIVDMGVRIFKKAEMPRTGESLALPRRKARTTRRRLRRRRHRLERIKLLLEKEGIISINKFEERYKSRNFPCVYRLRYEALERKLSNDELAQILLHIAKHRGFKSTRKAEYKDKENGQIINATEENKKLMKEKGYRTVGEMIYKDDAFTTIAPWSESGKIFTPRNKQNDYRHTVLRDLLEDEVTYIFAAQRKFGNVVITEDLEKAYLGIMLGQRSFDMGPGNQANGLPSPYGGNLIEQMVGVCALERGKEKRAAKAAYTSERFVLIQKINHTYLTDEYGKTIGFTKEQREKLINYAYRTKELKYSAVRKYLEIPENLFFKALTYNADKPKDVESAQFVSMQWFYQIQKARGKKHSEIIDEAERELLDEIGTVLTKYKSDDGRRKELLALGVETDIIKNLLKLNPSKFQHLSLKAMKKIMPYLEEGHIYNAACEKAYPDFKADNNTERFELLKGEVLADTMQGILNPVVKRSISQTIKVLNAIIRKYGSPQAVHIELAREMSKNFQERNKIENQQKKNCKDNEEVKKQIMEYGVNNPTGRDILKFRLWQEQNETCLYTGHHIPLERLFHNDYEIDHIIPYSISFDDSYRNKVLVETNANRDKGNRLPAEYFGVDIQKWQKYEILVNTHIRNYRKRLLLLKKEFTMEERMMFKERNLTDTRYITMVVMNVMRKNLVFAPYMNEKKKKKVYAVNGAVTAYLRKRWGLAKDRNTDRHHALDAVVVACCTDGMIQKISKNVQARELAFAHGLQYIDIETGEKLDRGTSREEWDERFGVMLPLPWQYFRKELEIRMSDHPEYFARDLQKWNYPDPDGVKPIFVSHMPNHKITGAEHKETVSSARHFDKQGIVILKTELKNLKLKDGEIEDYYAPQDDRLLYEALKERLKQYEGNKEKQAFDEPFYKPKADGSLGPLVKKVKLAKKQTLGVLLGKNGIAENAEMVRIDVFRENGKYYFVPIYVSDMKKDKLPNRAATAKKAYQEWREMKEENFVFSLYAGDLIRIKRKKAITTKNCDKTSEKRNDILVYYTGANINSAAIHGRSHDGGFEFEGLGIQILEVFEKYQVDVLGNISKVKAERRMHFRH

SEQ ID NO: 8217 - protein, 1186 aa, synthetic construct
  REGION 1..1186: note = Synthetic
MGLSFICAWLERIGNDFAACIPYRLFASGRKGAFKLRLRLVWQDDFIRKGKGMALNYRIGLDIGIASVGWAVLENNSKDEPIRIVDLGVRLFEAAEVPKTGAALAEPRRNARTARRRLRRRKHRLERIKWLLQESDMIQMDKFMERYHSAGLPDVYQLRYEALERKLKDEEFAQILLHIAKHRGFRSTRKAELKDKETGAVLSATEENKKLMEEHGYRTVGEMIYKDEKFKTACSWNERGYILTPRNKQGDYKHTIYRKMLEEEVRIIFNYQREFGNQKATEELEDNYLSIMTSQRSFDMGPGRQPDGTASPYAMEGFGDRVGLCALEPKENQEPRGAKAAYSSEMFVALQKISHIRIIEQDGSGRNLTEEERQKLIELLYKKKEVKYADVRKALGLESKYKFNTLNYSSKKKADLNDEERIKESEKTKFVELRWYHEYKKRMGAILEKMSRQEQSDLLDEVGTALTLYKNDDTRIRELEKLNLDSETIEKLLELTPKGFQHVSLKAMRKLMPYLKEGLTYDKACDKAGYNFKGNERAEKSKLLKGKEITDIINEITNPVVKRSVAQTVKVINAIIQKYGSPQAINIELAREMAKNFEERKKMASQMKDRQSENEKAKKEIQEWGVISPSGKDILKYRLWQEQDGYCLYSGKKIPLQKLFTGDYDIDHILPYSITFDDSYRNKVLVTAEENRQKGNRIPYEYFGESEPKRWKEFEGRVSSLVRDYRKQQNLLKREFTVEEQKEFRERNLNDTKYITRVVYNMIRENLELAPYSRPEKKKQVFAVNGAITAYLRKRWGLSAKDRSIDTHHARDAVVIACCTDGMIQKISRNIQGRELQYTRKYVAVDVETGELISRDDFTKEQWDEEFGIHVPRPWDYFTKELEIRMGEDPRGFIETHADVARSLDYPEWYYEENIIRPIFVSRMPNRKVTGAAHADTVRSPRDYPKTGCVLTKTALTDLKLDKKTGEIANYYNPESDKLLYQALKKQLLLHSGDAKKAFEEPFYKPKADGSKGNLVRKVKTYDKLTLGVPVNSGEGIAANANGSMVRVDVFCVDEKYYFVPVYIADVVKKRLPMKAVTVGKPFQQWKEMEDKDFLFSLYSRDLISFKSKNGKKVACVDGTSKVINEEIVYYYGADISTASFSGKAHDGSYDYRGLGIQSLDYLKKYQVDVLGNVSEVRYEKRMGFH

SEQ ID NO: 8218 - protein, 1146 aa, synthetic construct
  REGION 1..1146: note = Synthetic
MGLSFIGGNMEKVNYRIGLDLGIASVGWAAILTDSKGEPKHIIDLGVRVFDKAEVPKTGASLAAARRMARSTRRVTRRRRHRLDRIKLLLQSEGLIKLDVFMDRYYHSPGLPNVYKLRYEALDRILTPDEFAQVLIHLAKHRGFKSNRKSETKSKENGKVLAAINKNKEVFEQKDYRTVGEMIYCDKSFYTEDNSSSDGCIFTPRNKAGNYQHMILRSMIEDEVHFIFERQRQFGSTYASQEFEEKYTKIFTSQRSFDLGPGKQANGKPSPYAISGFGNRVGICEFEKEEKRAPKAAFTAELFVALQRINNLRISCDNGSYRNLNNEERDVLLKELLSRKEVTYMKVRSLLQLTEQQRFNLLNYSTKDISESSVEKTEKAAFIKMTYFYAFSKVFGNKFKEIPPAKIQDLYDSVAAILTEYKNDDSRTARLEQLGIDSEQIDELLSMNPSKYQHLSIKAMRKIIPFLLKGYTYDKACESAGYDFKGDSIGKKLHILKGKEITDAINDITNPVVKRSVSQAVKVLNAIILRYGSPMAVNIELSREMAKTYKDREQIKKDNDNRFAENEKIKAELRSNGLISPTGQDIVKYRLWQEQNHICPYSGRMIPYEDLFKPGFEIDHIIPYSITFDDSYRNKVLVYAEENQKKGNRTPYEYLASDEMKWQEFIARLNICTRDFKKRQKLLKQHVSAAEKAEFKQRNLNDTKYITRMFYNLIRENLELAPMEGKKKQVWAVNGAVTAYLRKRWGFSVKDRSTDKHHALDAAVIACCTDGMIRKISNYAQGRELRYARGFQFVDEETGEVFDRDNFTREQWDDMFGIRIPKPWQMFTEELELRMSDNPRDVLRKDQVLSRKIDYPCWIYNGEPDIGYDILRPIFVSRMPNHKVSGAANEATIRSPRHLDERIILTKVPLTQLKLDKTTGEIVGYYDDYKKSDRLLYDALKKRLIEFDGNAKEAFKTEFRKPKSDGTPGPVVKKVKIVERSDAGINLKKGPGFVKNDKMVRVDIYNKDGKYYVIPIYVADTVKKELPNKAVKAHAPEKDWRIMDDNDFLFSLYQNDLVYLESKKGINLWKKNKSGDSTENKKVEHSLLAYYNSMNRNSAAIEGETSDGGFKFENLGIQNLKRLEKRHVDLLGYVTEVGKERRMRFK

SEQ ID NO: 8219 - protein, 1283 aa, synthetic construct
  REGION 1..1283: note = Synthetic
MKKSLLMTVSALMIGTLMLTGCGTEKAETTAQTAAETTEAGDSGETTKAAESGKGDVKGASGEITVVSREDGSGTRGAFIELLGIEEKDANGEKMDMTTEDAKITNSTSVMMTTVEGDVNAIGYISLGSLNESVTAVKVDGAEATADNVAAGTYKVQRPFNIATNGTPSEAAQDFINFIMSKEGQAVVVDNGYIAVGDQPEYEAGNAEGKIVVAGSSSVTPVMEKLKEAYAKANKDVTVEVQQSDSTTGVTNAIEGTCDIGMASRDLADSEVKKGAKATVIAKDGIAVIVNQEKEGGAVLKATTENQKIMQEKGYRTVGEMLYLDEAFHTECLWNEKGYVLTPRNRPDDYKHTILRSMLVEEVHAIFAAQRAHGNQKATEGLEEAYVEIMTSQRSFDMGPGLQPDGKPSPYAMEGFGDRVGKCTFEKDEYRAPKATYTAELFVALQKINHTKLIDEFGTGRFFSEEERKTIIGLLLSSKELKYGTIRKKLNIDPSLKFNSLNYSAKKEGETEEERVLDTEKAKFASMFWTYEYSKCLKDRTEEMPVGEKADLFDRIGEILTAYKNDDSRSSRLEDLGLSGEEIDGLLELSPAKYQRVSLKAMRKMQPYLEDGLIYDKACEAAGYDFRALNDGNKKHLLKGEEINAIVNDITNPVVKRSVSQTIKVINAIIQKYGSPQAVNIELAREMSKNFQDRTNLEKEMKKRQQENERAKQQIIELGKQNPTGQDILKYRLWNDQGGYCLYSGKKIPLEELFGGGYDIDHILPYSITFDDSYRNKVLVTAQENRQKGNRTPYEYFGADEKHWEDYEARVRLLVRDYKKQQKLLKKNFTEEERKEFKERNLNDTKYITRVVYNMIRQNLELEPFNHPEKKKQVWAVNGAVTSYLRKRWGLMQKDRSTDRHHAMDAVVIACCTDGMIHKISMFVKGRELRFNRNLTIVDEKTGEIFTREQWDEKFGVKVPLPWNSFRDELVIRLEKDDPKNYLMVHTDMQREIDYPGWMFGEEESPIEEGRYINYVRPLFVSRMPNHKVTGSAHDATIRSARDYETRGVVITKVPLTDLKLNKDNEIDGYYDKDSDRLLYQALVRQLLLHGNDGKKAFAEDFHKPKADGTEGPVVRKVKIEKKQTSGVMVRSGTGIAANGEMVRIDVFRENGKYYFVPVYTADVVRKVLPNRAATHTKPYSEWRVMDDANFVFSLYSRDLIHVKSKKDIKTNLVNGGLLLQKEIFAYYTGADIATASIAGFANDSNFKFRGLGIQSLEIFEKCQVDILGNISVVRHENRQEFH

SEQ ID NO: 8220 - protein, 883 aa, synthetic construct
  REGION 1..883: note = Synthetic
MAGNRRYNSDGPSAEERALERFTELMIKKISSIKGDWKKPWFTEGFMTWPKNLSGREYNGMNALMLMLLCEENGYKLPVFCTFQRVSGLNYSTDKQGNHRPLTDANGERLPQVSVLKGEKSFPVFITTFTVVDKETKEKIKMEDYRKLSPEEQADLMDEVGKILTLYKNDDTRSREFQKLGLDSEITEELLELNPRGFQHVSLKAMKKLMPYLKEGLTYDKACAEAGYDFQGSVQKEKSRLLKGKEITDIINDINNPVVKRSVSQTVKVINAIIQKYGSPQAVNIELAREMSRNYDERRKMEKQMKDRQSENERAKKEIQELGNAFPTGQDILKYRLWHDQDGICMYSAKRIPLAELFTGAYDIDHILPYSITFDDSYRNKVLVTSEENRQKGNRIPYEYFGSDSERWSKFETLVNSRIRDYRKQQNLLKQSFTEEERKEFKQRNLNDTKYITRVIYNMIRENLALAPYNSPGKKKQVFAVNGGVTAYLRKRWGMSAKDRSIDTHHARDAVVIACCTDGMIQKISRNIQGRELLYARGFTAVDVETGEKFTRDDFTRDQWDEIFGVQVPKPWEYFNEELDIRLGENPVEFIETHSDVSRKLDYPAWFYENNIIRPVFVSRMPNRKVTGAAHADTIRSPRHYQETGSVLTKTALIDLKLNKKTGEIENYYKPESDTLLYNALKERLELYGGDGKKAFEEPFYKPKADGSRGNLVRKVKTYDKLTLGVYVNSQHGIAANANGSMVRVDVFRVSGKYYFVPVYIADVVRKRLPMKAVVQGKQYIDWKEMEDKDFIFSLYTRDLISFKSKNGKKVTCVDGTSKAVNEEIVYYYGANISTASFSGKSHNGSFEFTSLGIQGLEYLKKYQVDVLGNVSEVKREKRMGFR

SEQ ID NO: 8221 - protein, 1118 aa, synthetic construct
  REGION 1..1118: note = Synthetic
MRGMNYRIGLDIGITSVGWAVLSHDSNEEANRIVDLGVRTFDRAEVPDTGASLASERREARGTRRRLRRRRHRLDRVKKLFEDEGLISISNLESMFKTSKHANVYKIRYEALNGIINNEELAAILYHFAKHRGFKSNRKSEANNKEEGKLLKATNENKELLINSGYQTVGHMLYKDSKFRAKDWNGNEILMTRNKTDDYKNTILRDLLEEEIKIIFNKQREFGNRYTTKEFEHKYLEIFKSQRSFDQGPGNMPNGQPSPYGGNIIEKMLGKCTFEKDEERACRATYSFEYFCLLQGINNLKIIMPDTSIRRLTEDERRKLIELAFKSSSIDYSKLRSTIGLEEGSFFKNLDYGNKSINDVEKKAKFNYLKAYHEIRKKVEKVDKEIFQTFDINIIDYIARTLTVYKNDNTRILKLKEVNLSNEIIDELLNLNFSKTGNLSIKAIRKIIPFLEDGFIYNEACEMAGYDFKGSISGQKKKLLNTDILKDITNPVVCRAISQSIKVLNAIIRKYGSPQLICIELAREMSKNFEERKKIEKSMKENSEVNDKAKEYIKSLGVVSPTGHDIVKYKLWKEQNEICAYSGRHISVKDLFDKSVVDIDHIIPYSICFDDSYKNKVLVYADENRQKGNRLPYEYFGHDLEKWHKFEVFVNNIKDHKKRQRLLKQKLSKEEIEAFKERNLQDTKYITTQFYNYIRANLEFAESKKYSKRNVITVNGSITSYLRKNWGLIKMREENDKHHALDAVVVACTTSSMIQKISKYVKGRELKYSRFSEYQDKETGEILDLTKLSREEFDEIFGVKFPEPWYNFRKELEIRLSDRPYLYKDILYKLGYRDEEIKPIFVSRAPKRSVTGPAHLDTVRSPKLIDQGYVISKKNLKDLKWDKKNNEIIGYYNKKDDRLLYEALCERLKKYNYDAKKAFAEEFRKPKSDGSDGPIVKKVKIMEKQTLGVMVNNGDGVASNGDMVRIDIFKEDGKYYFVPIYVSDTIKQQLPNKACVANKNYNEWKEMKEENFIFSLYSRDLVIFKHKKGANAKTSLGDKIIVNEQPMYYIKAGISNAAITLESHDRSFEVVNLGIQSLEYIKKLQVDVLGNITEVKKEKRMRFPGMEGYYGVSESICV

SEQ ID NO: 8222 - protein, 761 aa, synthetic construct
  REGION 1..761: note = Synthetic
MNAEHGKEGLLIMEENFQYRIGLDIGITSVGWAVLQNNSQDEPVRITDLGVRIFDVAENPKNGDALAAPRRDARTTRRRLRRRRHRLERIKFLLQENGLIEMDSFMERYYKGNLPDVYQLRYEGLDRKLKDEELAQVLIHIAKHRGFRSTRKAETKGKEGGAVLKATTENQKIMQEKGYRTVGEMLYLDEAFHTECLWNEKGYVLTPRNRPDDYKHTILRSMLVEEVHAIFAAQRALGNEKATEELENAYVEIMTSQRSFDMGPGLQPDGKPSPYAMEGFGDRVGKCTFEKDEYRAPKATYTAELFVALQKINHTKLIDEFGTGRFFTEEERKTIIDLLLSGKELKYGTIRKKLNIDPSLKFNSLNYSAKKEGETEEERVRDTEKAKFASMFWTYEYSKCLKDRNEEMTVGQKADLLDRIGEILTAYKNDDSRSSRLEDLGLSGEEIDGLLELSPAKYQRVSLKAMRKMQPYLEDGLIYDKACEAAGYDFRALNDGNKKHLLKGEEINAIVNDITNPVVKRSVSQTIKVINAIIQKYGSPQAVNIELAREMSKNFQDRTNLEKEMKKRQQENERAKQQIIELGKQNPTGQDILKYRLWNDQGGYCLYSGKKIPLEELFGGGYDIDHILPYSITFDDSYRNKVLVTAQENRQKGNRTPYEYFGADEKHWEDYEARVRLLVRDYKKQQKLLKKNFTEEERKEFKERNLNDTKYITRVVYNMIRQNLELEPFNHRKEKAGVGSQWSSDILPQKTLGTDAERPFD

SEQ ID NO: 8223 - protein, 861 aa, synthetic construct
  REGION 1..861: note = Synthetic
MKGINYICTKNRILMDILSLLGGLLLILLGANGLTDGAASIAKRFRIPSIVIGLTIVAFGTSAPELTVSVSSALKGSADIAIGNVVGSNIFNTLMIVGCTALFAPIVISRNTLRKEIPLCILSSIVLLICANDVFLDHSSENIISITDGLLLLCFFIIFLGYTFAIAFQGKKEGETEEERVLDTEKAKFASMFWTYEYSKCLKDRTEEMPVGEKADLFDRIGEILTAYKNDDSRSSRLKELGLSGEEIDGLLDLSPAKYQRVSLKAMRKMQPYLEDGLIYDKACEAAGYDFRALNDGNKKHLLKGEEINAIVNDITNPVVKRSVSQTIKVINAIIQKYGSPQAVNIELAREMSKNFQDRTNLEKEMKKRQQENERAKQQIIELGKQNPTGQDILKYRLWNDQGGYCLYSGKKIPLEELFDGGYDIDHILPYSITFDDSYRNKVLVTAQENRQKGNRTPYEYFGADEKRWEDYEASVRLLVRDYKKQQKLLKKNFTEEERKEFKERNLNDTKYITRVVYNMIRQNLELEPFNHPEKKKQVWAVNGAVTSYLRKRWGLMQKDRSTDRHHAMDAVVIACCTDGMIHKISMFVKGRELRFNRNLTIVDEKTGEIFTREQWDEKFGVKVPLPWNSFRDELVIRLEKDDPKNYLMVHMDMQREIDYPGWMFGEEESPIEEGRYINYVRPLFVSRMPNHKVTGSAHDATIRSARDYETRGVVITKVPLTDLKLNKDNEIEGYYDKDSDRLLYQALVRQLLLHGNDGKKAFAEDFHKPKADGTEGPVVRKVKIEKKQTSGVMVRGGTGIAANGEMVRIDVFRENGKYYFVPVYTADVVRKVLPNRAAMNGKIASDWKTITLFLVCTREI

SEQ ID NO: 8224 - protein, 1073 aa, synthetic construct
  REGION 1..1073: note = Synthetic
MATAQKPYLLGLDLGVQSAGWAVIDLDSRGRPCGVRRAGVRCFDSGVGSETEIASGKDESQNIQRRRMRLQRRQLWRRGRRLKKIFHVLQRAGLLPPDAARTPEERHELLKKLDVELSKQFLPDGDRVAGHLLPYKLRALALDQTLPPFALGRALFHLAQRRGFQTNRKSDARDDEEAGKVKAGIAELWEKMQAAAARTLGEYFSTLDPEQERIRKRWTARKMYLDEFERIWAAQSPHRSMLTEELKKKIHDAIFHQRPLKSQKGLIGMCELEPDCRRAPRASLEAQRFRYLQKVNDLEITAPTGEIWAMTDPKHADLRDKLIELLDTQKEVAFSSLPTKLGLWAKFGMKKPKKADKDKDFDFSFNLEAGGEKKLKGNATAVKLREVLGDDYDRLSPEQLAEIVEDLLEYEKPDALAKRLTKRYGVAPAKAEALADVTLEPNYASLSREAMRKLLPLMEQGVSFATARKQIYGEYAGRLAIHELLPPVLEAVPALRNPVVCRGLTELRKVVNALIRQYGRPELIRVELARDLKRSRQQREDLTKQNRENEKSRDAARMKIARQLNCDENAVSNLDILKVRLAEECNWECPYTGKSISLESLVGKESQFDIEHIIPFSRSLDNSFANKTLSDKKTNLEKGNKTPYEAFSGDATRWREIIGRVMRFRGSSRNAKLQKFRQEKLDDDFAARLLQDTRYMSRLATEYLGLLYGGAIDAEGTRRVQVSAGRITAYLRDEWGLNAILADGGDDEKNRADHRHHAVDAAVIALTDSKTVENLSRSAEVASERGHRLFALEEIEKPWPTLVDDLRRAVEAINISYRVNRRVSGALHEETNYSKPHVARDQNGKEIEYRHVRKPLQNMSANEVENIVDDTIRALVQAKLEQIGGEPKKVFADPGNLPYLTAGGDENRKIFIQKARIRKNVAVVPLGKNGSPRYAAPGSNHHMEIYAVLDDQGREIRWEAHTVNLLEATQRMRAKQPIIQRDHGPNTKFKFSLAGGEYLELDDDKGGRRLVRVTVISGKIVQFRLHTDARPITLLRKTKGGFVGLTKTADTLREANARKVVVDPLGNILPAND

SEQ ID NO: 8225 - protein, 1067 aa, synthetic construct
  REGION 1..1067: note = Synthetic
LSAKIECEQLLHYGLGIDAGCGSVGWAMVLLDKDDNPVGLHSLGVRRFEAGVEGDISRGREESKSQARRLARGPRRNTWRRQWRLSKVFGVLQGGGLLPVAESTDHDSRHKLLLSLDSQLVDDLKLISDRRTAHVVPYTLRARALDGPLPLYALGRAFYHLAQRRGFLSNLKAGRGDEETGKVKQGISQLSKDMETSGARTLGEHFAGLDADEQRIRQRWTSRQMYQDEFEAIWRTQIKHHPHVLTQKLKEELSEAIFHQRPLKSQRHLIGKCDLEPRRRRAAIASLPYQQFRVLQRVNDLRVESELDLPRPLTHDEREQLLIRLTVEGDLSWNEVKKTLGLRTTKKQPVKYTFNFEGDGEKKLIGNRTAAKFSEALGQPWDDMDEPTRTRLVDSVLTFEDEQPLLHHLQQHWQFGEQQAVAVANLTLEAGYGNISRRAINKLRPLMEQGQAYSTARRQIYPESFEARPPEERLPPFSQVAPTVRNPTLARAMAELRKVVNALVAQYGKPRFIRIELARDLKRSRKDRQQFTDQRDRNTKSRDDARKRLLDRMGKAAGEQLNKPHNILKIRLAEECGWVCPFTGRGIEMETLVGDSPQFDIEHIIPYSKSLDNSYMNKTLCYHEENRHVKRNQTPYQAYHSTEQWEDIIARVKHFKGSAANAKLAKFLADKLPEMDEFAERQLSDTRYLSRAATDYLATLYGGRVDGDGKLRVQASPGRLTAILRRAWQLNRIGYGDPEDGDQKDRADHRHHAIDAFVVAVTTTATVHAANRAASRAESYYARDLLENIDLPWEGFDWKNLADAVDNIVVSSRVNRKLNGGLHKDTIYSKTYEVVDIKKPDTTKTVHHVRKPLEAMSLGEIEAIVDPAVRQAVLDKLERLGGDPKKAFADRNNHPYLTTKNKRLIPIHRARIQTSVTTIAIGRGSRQRRVAAGDNHHMEIAAVLDKQGTPKKWEGHIVSRFEAVRRHTAGEPVVRRDHGPGKKPVFSLANGEHVLLPGEGDTEPQILRVSVISGQQIEFVPHSDARPITIRKKIPGARIRASVDKLRQMGAMKIAISPLGKWTPAGD

SEQ ID NO: 8226 - protein, 1055 aa, synthetic construct
  REGION 1..1055: note = Synthetic
MGDQQTLQATSYCLGLDVGVQGVGWAVIDLDDQGQPLGVRRTGVRCFDSGVGSETEFEKGVDEPPSTKRRQARQQRRQLWRRAQRQRRVFRALQEAGLLPPGPPTPVSRDKILRTLDADLAIQFGSLEDRIAAHLLPYRLRALALDTPLPPYALGRAFYHLAQRRGFLSNKKALKEEKEAGEVKKGIAELQEEMNRAGARALGEYFSSLDPEQRRIRNRWTARQMYLDEFDRVWEAQSRYHPRLTDELKTKVRRAIFFQRPLKSQKGLIGRCELEPRHRRAPLASLLAQRFRYWQKINDLEVIQPDGVVRPLSPEERHKLAHFLETQAEATFARIRKLLDLKKPKGSQEDFAFNLERGGEKRILGNRTAAKMAAVLGQRWAAMDDEDKRRLVNEILSFEKEAPLARRLVRAWNLDEPTAAQLAALDFEPGYAALSARAIRKLLPLMQREGMRFATARKQVYGDHLLGTRAYDALPPVAKAIPSLRNPAVCRALTEVRKVVNALVRAYGKPAMVRIELARDMKRGRKQRKETWQAMRENERCRLDARKLLQDHGIQEPRPADILKVLLAEECNWECPYTGKAISMDALIGSQPQFDVEHIIPFSRSLDNSFLNKTLCYHEENRNVKQNRTPFEAYGGDEQRWHEILQRVRRFRGSAAESKLRKFQLRQLPADFTNRHLNDTRYASRLAADYLALLYGGRVDANGRQRVQVGTGATTGFLRDEWGLNAILGDNDEKERADHRHHAIDAVVIALTGPGTVQALTRAALRAKELGRRLFVPLDPPWADRDSFLRDVRASVEAITVSYRVDRKVSGQLHEESNYSKPHMTVDNKGNLVEHRHIRKPLKDMSVEEVEAIVDDRVRKLVQEKLRQLGQEPKKAFADEANHPYFTTADGRLVPIHKARIRKTVATITVGPPQCPRHVAPGLNHHIEILAVRDPAGAVTHWEGELVSLFEAARRVKAGEPVVRRNHGPNKDFLFSLAKGEYVEMELQPGKRQLFRVTVISAKQIEFRLHHDARPTMLLRKTPGARVIRSPGSLFKAKARKVAVDPLGNVFPAND

SEQ ID NO: 8227 - protein, 1130 aa, synthetic construct
  REGION 1..1130: note = Synthetic
MQRCLTRTKPYCDKSRNRRSNTRLPVYRRVRGCQPFFPNCLGRGGAGSSITQGRFAVSMPFSRGATENRYRLGIDLGSGSIGWAAVVDADGPSPQILGMGVRRFEAGVTGSADEIEAGKDKSRATVRRDARGPRRQTWRRQYRIRKVFHLLQRLGLLPDSDDDSHDTRNRVIADLDRQLRAEYLTGADHPAQQVLPYRLRAAALDEQVSRFALGRALYHLAQRRGFLSNRKAGKKDEDAGAVKAGIRGLSDEIERNGCRTLGEYFASLDPDQQKIRGRWTARQMYLDEFEKIWAAQSQHYDDLNDETHDLLFEAIFHQRKLKSQKGLIGACELEPGKRRAPAASLEYQEFRLLQRVNDLVMIDPANRKFSLIEREDLQTLRDAPQKRAALIAALQEAESLSFAKISRILGLKAEKHGRASVKWTFNFEEGGEKRMRGNTTAAKLVGVLGDRWTRFSEEEKPRLVDEILSFETEEVLVRRLIRGWAIPENEAKQAADIHFEQGYGALSRKAIRTILPYLERGIPYATARRQAYGEDATVGTPEDSLPANRNCKLLRDVRNPAVERALSELRLVVNALIRKYGKPESIRVELTRELKHSRDRRKRITERNRKNEKFRSDARAKILEEMGHERYCSVYNILKVRLAEECNWECPYTGRSIAMAQLVGDHPQFEVEHIVPFSRCFDNSFANKTLCHHEENRKKGNRTPFEAYGHTESWAAILTRVGRFRSERSLVSRKLDLFKREKLDDTEEFTSRQLTDTAYMSRLAAEYLGLLYGGRTDPEGTMRVRVSPGRVTSYLRREWDLNKILGISDEKQRGDHRHHAIDALVVALTGANEIQALSRAAEKAEAQQQHRLFVAVDQPWEGFLGDVFTAVETINVSSRVSRKLNGQLHDATILSPPKPAISKDGKPVKVHHVRKKLELLTKTMVDDIVDDRVRELVKEKLDAFGGDPRKAFQDSANHPYFRSKDGRVIPIHKVRIRTGLRGIQIGKGSRARYVAPRANHHMEIVARLDARGNEKAWEGHIVSRLEATRRHREGLPIVLRDHGDGKTFKFSLAMGEHVIMEHEEEIPQLYRVESISEKVLEFRLHVDARPSTVLRKMSKARITRSPRALLSAKARKVTVDPLGNILPAND

SEQ ID NO: 8228 - protein, 1049 aa, synthetic construct
  REGION 1..1049: note = Synthetic
MRNDSEHRPYVLGLDLGVQSIGWAVLDLDRQGRPFAVRRTGVRCFDSGVGHEKEIEQGKDESTNIKRHQARQIRRQLWRRSRRLRSVFVVLQKAGLLPQGPAKEAEQRHQILVELDRQLGADQGISNNRVEAHLLPYRLRAKALDEPLSLHAVGRVFYHLAQRRGFLSNKKARKESDDEGQVKAGIAELQAAIDNAGARTLGEYFAGLDPEQSRIRGRWTARQMYLDEFEKIWDSQSPYHKALTEELKHRLHRAMFFQRPLKSQKGVVGKCELEPGSRRAPLASLDAQQFRYLQKVNDLEIIAPDGQILSLTEQQRTTLIQALETNGELTFSAIRALLGLKKPKGAEHGYTFNLETGGEKRLVGNRTAEKLAKVLGDRWTTMANDDRHRLVEELLAFEKEDALARRLQKAWGFASPLASQLAALTFEPGYSALSHRAIRRLLPKLQAGEHLNTARKELYGDQLAEKTVYDLLPPVLKAVPSLRNPVVCRALTELRKVVNALVRQYGKPSLVRIELARDMKRGREARKRATDQMRQQKRLREAAEKRILAESSVRDPSPGDILKVLLAEECNWECPYTGKPISMGTLVGQMPQFDIEHIIPFSRSLDNSFLNKTLCYHEENRNVKQNRTPWEAYASSPDRWQAILHRVRRFRGDQAEAKLRRFQMQEIAQDFAARQLNDTRYISRLAADYVGLLFGGRIDDHSRLRVQVSAGRTTAYLRDEWNLNSILNDGGSKDRSDHRHHAVDAVVIALTDPAAVQLLSRAAARAEEMGRRLFAPIDPPWQGFLEEVQQSIDAVNVSYRVNRRVSGALHEESFYSPPFQAIKKGKPVEYRHLRKPLARMSLNEVEAIVDDAVRECVKAKLAQLGGDPQKAFADPANHPYRTTHDGRLIPIHKARIRRNVAAIPAGRNDRQRHVVPGTNHHIEIVATVEEKGNDKAWEGVLVNLFEAVQRANAGEPVIRRNHGPGKEFRFSLAGGEYVEMEHEPGKRQIYRVIGISRDEVEFRLHTDARPTKLLRTARARVRYRPSKLLQVKARKVVIDPLGNVLPAHD

SEQ ID NO: 8229 - protein, 979 aa, synthetic construct
  REGION 35..38: note = misc_feature - Xaa can be any naturally occurring amino acid
  REGION 1..979: note = Synthetic
  REGION 881..907: note = misc_feature - Xaa can be any naturally occurring amino acid
  REGION 611..620: note = misc_feature - Xaa can be any naturally occurring amino acid
LAAPAPAPHGLPTAPGHGTLATEQRRLPRRAPPRXXXXDRTLRASLASSGDRAPHHLLPYLLRARGLDQELSRHELGRAIYQLAQRRGFLSNLKAAKKDEDVGVVKKGISDLEDRMKEAGSRTLGEYFASLDPEQYRIRSRWTARQMYQDEFEMILAAQSPFHPVLSDENKQRLFQAIFDQRPLKSQKGLIGACDLEHYKRRAPAACLEFQEFRILQRVNDLEVIEPDGECRRLSAEERAKLLAELAEKGEVTFRRIRTLLKMRPSREYGRNYAFNLEEGGEKRLVGNRTVAKLAGILRDRWRELPWENQRSLVNEILSFQSEEPLVSRLVNGWGFDVASARALAETSFEPGYGALSRKAISRLLPLMREGIAYATARKQVYGETREEREPLDLLPPKHQSAVLRNLRNPAVERALSELRKVVNALVRKYGKPVEIHVELGRDLKHARQRRKQMADQNRQNEGIRNAARGKILQDMKNDRYCTPANILKIRLADECNWECPYTGRTISMDALAGDQPQFDIEHIIPFSRSFDNSFLNKTLCYHEENRKHKRGRTPYEAYARTDQWEEILARVRRFLGDARVRRRKLELFQTETLPDPGEFAQRQLNDMRYXXXXXXXXXXLLYGSQIDAEGKRRIQVSPGRVTAYLRDEWNLNSILGRPDQKERNDHRHHAIDALVIALTGAGEVHRLSRAAEEAEALGQTRLFPHGAFDPPWAGFLAQARQAVEAINVSSRVSRKLTGKLHKDGILSKPIPCLDKHGRPAQVHHVRKPLDSLSTHEVADIVDDRIRALVQEKLDRAGGDPKKAFADRNNHPYSRAKDGRIIPIHKVRIRKHDTPILVGQGSKQRYVNPGANHHMEIVALLDKEGNEKRWEGHVVSMFEAXXXXXXXXXXXXXXXXXXXXXXXXXXXVMEHEPGQPQVYRVVGISAKVLEFRLHCDARPTTVLKRLAKARVTRSPGALLELRARKVAVDPLGNVLPAND

SEQ ID NO: 8230 - protein, 805 aa, synthetic construct
  REGION 536..545: note = misc_feature - Xaa can be any naturally occurring amino acid
  REGION 1..805: note = Synthetic
LGRAIYQLAQRRGFLSNLKAAKKDEDVGVVKKGISDLEDRMKEAGSRTLGEYFASLDPEQYRIRSRWTARQMYQDEFEMILAAQSPFHPVLSDENKQRLFQAIFDQRPLKSQKGLIGACDLEHYKRRAPAACLEFQEFRILQRVNDLEVIEPDGECRRLSAEERAKLLAELAEKGEVTFRRIRTLLKMRPSREYGRNYAFNLEEGGEKRLVGNRTVAKLAGILRDRWRELPWENQRSLVNEILSFQSEEPLVSRLVNGWGFDVASARALAETSFEPGYGALSRKAISRLLPLMREGIAYATARKQVYGETREEREPLDLLPPKHQSAVLRNLRNPAVERALSELRKVVNALVRKYGKPVEIHVELGRDLKHARQRRKQMADQNRQNEGIRNAARGKILQDMKNDRYCTPANILKIRLADECNWECPYTGRTISMDALAGDQPQFDIEHIIPFSRSFDNSFLNKTLCYHEENRKHKRGRTPYEAYARTDQWEEILARVRRFLGDARVRRRKLELFQTETLPDPGEFAQRQLNDMRYXXXXXXXXXXLLYGSQIDAEGKRRIQVSPGRVTAYLRDEWNLNSILGRPDQKERNDHRHHAIDALVIALTGAGEVHRLSRAAEEAEALGQTRLFPHGAFDPPWAGFLAQARQAVEAINVSSRVSRKLTGKLHKDGILSKPIPCLDKHGRPAQVHHVRKPLDSLSTHEVADIVDDRIRALVQEKLDRAGGDPKKAFADRNNHPYSRAKDGRIIPIHKVRIRKHDTPILVGQGSKQRYVNPGANHHMEIVALLDKEGNEKRWEGHVVSMFEA

SEQ ID NO: 8231 - protein, 1061 aa, synthetic construct
  REGION 1..1061: note = Synthetic
MSTNSTTTETDGKYRLGVDMGAASIGWTAVLEGNGTPSALLAAGVRCFEAGVLGDIEQGKDESRATARRDARGPRRLAWRRQHRLRRVFRLLQEFSFLPPSDDDSHDERHRGLARIDKDLRARLKTSDRPADEHLLPYLLRARALDEKLAREELGRALYHLAQRRGFQSNLKAAKKDEDVGVVKQGISELEKLIEDAGSRTLGEYFASLDPEEHRIRGRWTARGMYVDEFQKIWAAQAAHHADLSDEQRERLFHAIFDQRPLKSQKNLIGMCDLEPRKRRAPAACLEFQHFRILQRVNDLLVTAPDGECRSLTPEERAVLLGELAEKDKVTFGRIRTLLKMRKSREYDRSYSFNFEEGGEKQLIGNRTAARLLAILGDRWRQLADDKQRQLVNEILSFESEEPLIHRLTNGWGFEPSSARAIAETGFEPGYGALSRKAIRRLLPMLRQGVPYATARKELYGDVQLKQGALDHLPAGRQCSMLRNLRNPAVARALGELRKVVNALIRKYGMPRSIRIELARDLKHARKRRQDMADQNKRNRTTREEACSRILTEMKDDRYGTPGNILKVRLAEECNWECPYTGRSISMAALVGDQPQFDVEHIMPLGRSLDNSYLNKTLCYHEENRKVKRGRTPFEAYGGTEPWEGILERVRRFKADPHVRRRKLDLFQVDTLPDTDEFNARQLNDTRYMSRLAAEYLGLLFGGQIDAQGQRRVQVSPGRVTAYLRREWQLNRLLGDPNRKDRADHRHHAVDALVIALTGAREVQLLSRAAEQAEALWQTGLFVAVDPPWEGFLDEARRAVDAIQVSSRVSRRLSGKLHKETIYSKPIEYIDQKGQRKQVHHLRKRLEDLSKQEVEQIVDDRVRALVQEKLQQPGATPDKTFKEPGNHPYFRTADGRIIPIHKVRIRTSEHPIIVGKGSKERHVKPGSNHHMEIVALLDEQGQETKWEGHIVSLFEAVGRRRRGQPIIRRDHGENKRFKFSLAGGEHVVMEHEPEKPRLYRVASISGKNVEFRLHCDARPIILLRQKEYSAGRVRRSADSLRMAKARKVAVDPLGNIFPAND

SEQ ID NO: 8232 - protein, 1063 aa, synthetic construct
  REGION 1..1063: note = Synthetic
MSGSQAQRPYLLGLDLGVQSVGWTVLDLDGQNEPAVLRAAGVRCFDSGVGNETQIEQGKDESTNAARRMARQQRRQLFRRAQRLRRVFRVLQSAGLLPEGPAATPDQRHAMLLDLDKNLFAEHVAPGDRLAGHTLPYRLRAMALDHPLAAHALGRALYHLAQRRGFLSNKKAAKESDEDEGKVKEGIAQLYQAIDASGVRTLGEYFARLDPEEQRIRARWTARKMYLDEFEAIWNAQSPHHAALTPELKSRLHKAMFFQRPLKSQKGLIARCDLEPTERRAPKASLAAQRFRYLQKLNDLEIIDPQGECLPLSPEQRAKLTETFESQAEVSFSTMRKLLKLKAPRGDTPGYTFNLEAGGEKRLLGNRTAAKLSGILDGRWSAMDDAQREALVHEISIFQNEDALARRLVKAWDMDEQTAAQVAAVRLEPGYFELSLKAIRKLLPRLEAGQRLNEARKELYGERLIESDACDLLPPVLDAVKTLRNPVVCRALSELRKVVNALIRRYGKPAMVRVELARDMKRGRKAREDAYKQMRANQKRRDDAKKKIFDEMKIDQPRPGDILKVVLAEECNWECPYTGKRISMKALLGPNPQFDIEHIIPFSRSLDNSFLNKTLCYHEENRSVKRNKTPYEAYAHGDPDRWNAILQRVKAFQNDPRHRKLQQFRKEELDEDFVSRQLNDTRYMSRLAADYLGLLFGGRVDPEGKQRVQVSAGGVTGYLRDVWQLDQILQDPTLPDAIPADEPGKNRYDHRHHAVDAIVVGLAGPAMVKRLSQAAAAAEDRGHRLFVPVEEPWPNFRDQVRQAVAEIRVSYRVDRRISGALHQDTIYSKPRTILDDDGKPIQRHLVRKPLASMSTQEINAIVDPVVRHLVQDRLDELGGNPQKAFTDPNNHPYLKARDGRVIPIHKARFAKTITPIAVGPDSAKRYVAPGNNHHVEIIALLDNAGNETKWEGRLVSLYEATQRLARGEPVVGRDHGENRKFKFSLAGGEFVEMEHQPGAPRLYRVVGISANVLEFRLHTDARPSTVLRKMSRARVTRSPGALKEAKARKVALDPLGNVLPAYD

SEQ ID NO: 8233 - protein, 1088 aa, synthetic construct
  REGION 1..1088: note = Synthetic
MLQPLQVPYILGLDIGVQSIGWALVRLDEEGNPCGILRLGVRSFESSSGSEQEIEKGTDEPASRQRREKRLMRRQLFRRQQRLRRTARVLQQAGLLPPFPLQPASRDAAITQLDAQLRSQFIDSGNHVDAQLLPYRIRAAALDQPLPAYALGRAFYHLAQRRGFLSNKKAGGKKDEEEKGKVKAGIAELAKQIEAAGARTLGEFFARLDPHQQRIRSRWTSRKMYQQEFDAIWAAQEPHHPQILTAELKAKLYRAIFFQRPLKSQKGLIGRCSLEKGRRRAPLACLEAQRLRYWQKLNDMRLKDARRILNAIPEAEGLIDWLPQEGQGRLSLYAKQLLAQHLETSEELTFNQIRHILGLKKKKNSDLDFTFNLEEGDEKKLLGNRTAARLLKALGQRWQDMPEDQRQRLVDEILSFEKEEPLARRLEKAWGFTPAEAANVAALDFEQGYHSFSRQAIRKILPHLQQGQSLASIIKQLYKDTQPQATAWDRLPPLRDVFPHVNNPVVRRALTEVRKVVNAILRVYGKPQQVHIELARDLKKSRYERQQLFKGMRQQQKQREEAKSWLQCQMGITNPTAHDILKYRLWIECNQQCPYTGKPISKEALFGREPQFDVEHIIPFSRCLDNSFTNKTLCEIAENRNVKKNRTPYEAYGHDPQRWHEILQRVSRFQGDAAKAKLRRFQLTEIPADFANRHLNDTRYSSRLAAEYLALLYGGRSDAQGNLRVRAITGAVTAQLRDQWGLNAVLAELGRQLGVRDLDDNVEKARFDHRHHAVDALVIALTTPGMVKRFSDESQRARQYGRQLRCFFDPPWGTRTEFVADVRNAVLAINVSRRLDRRLKGPLHEETIYGKPKQYVDEKGKTIQVAHVRKPLESLSPKNVDDIVDPVIRELVKKKLQDLNTTDPKKAFQKKENHPYMIARDGRIIPIHKVRIRVTTETIMTVGHGPTLRHVKPGTNHHMEIVATLDAAGNEIRWEGITVSLFEALHRLRNKQPVVQRDHGPGKRFKFSLAGGEYLEFVENGQKKLVRVTTVYHSNVEFRLHNDARPITMLLGVKGARAGLGRSVDALRKLKARKVLVDPLGNILPAND

SEQ ID NO: 8234 - protein, 1130 aa, synthetic construct
  REGION 1..1130: note = Synthetic
LKWILYFVTVPYCDKSRNRRSDTRLPVYRGAGGCQRLFLDCAGRDARESPVSQGRFAMSAPFSKGETENRYRLGLDLGSGSVGWAAVLDADGDSPKILGMGVRRFEAGVTGSTDEIEAGKDKSRATARRDARGPRRQTWRRQYRLRKVFRVLQRLGLLPESDDDSHDTRNRVIADLDCQLRTEYLAEADHVAHQVLPYRLRAAALDEKLSRFALGRALYHLAQRRGFLSNRKASKKDEDTGVVKAGIRELSEEMERKGCRTLGEYFASLDPEQQKIRGRWTARQMYVDEFEQIWAAQSKHYGDLNAENHELLCDAIFRQRKLKSQKGLIGACELEPSKRRAPAASMEYQEFRLLQRVNDLVMIDPGNRKYSLIGKDDLELLPEAAAKRKALIAALQEAESLTFAKISKILGLKAEKRDGESIKWTFNLQEGGEKGIKGNTTAAKLRGVLGDRWTGLSEEDKYRLVDEILSFETEEVLVRRLMRGWQLPEKEAKEVADIHFEQGYGSLSRKAIRALLPALQRGIPYATARDEAYPEAKTVEIVLESLPAKHKCNRLRDVRNPAVERALSELRLVVNSLIRKYGKPESIRVELTRELKHSRERRKKMTERNRKNEGFRSDARAKILKEMGHERYCTAYNILKVRLAEECNWECPYTGRSIGMANLVGDNPQFEVEHIVPFSRSFDNSFANKTLCYHEENRTKSNRTPFEAYGHSERWDEILRRVGRFRGERSLVARKLDLFKREKLDDTEEFTNRQLTDTAYMSRLAAEYMGLLYGGRIDAEGTARVRVSPGRVTSYLRREWDLNKILGVSDEKERGDHRHHAIDALVIALTGASEIQTLSRAAEKAEAQNQHRLFMAVDQPWDGFLSDVFTGVEGINVSSRVSRKLNGQLHDATILSPPKPAVGKDGKPTQVHHVRKKLESLTKNMVDDIVDDRVRELVKEKLDAFGGDPGKAFQDAGNHPYFRSKDGRVIPIHKVRIRKSDKPVEIGTGSKRRYVNPGANHHLEVMAVLDQNGNEKRWVYRIVSRFEAVGRKNRGEAIISCVSDKKERFKFSLSGGEYVIMRFEGDDERLYRVTGITQSEVEFVLHCDARPITVRKKEGERIRCKPGRLMNSGARKVTVDPLGNILPAND

SEQ ID NO: 8235 - protein, 1081 aa, synthetic construct
  REGION 1..1081: note = Synthetic
MESKRLKQPFVLGIDLGVQSLGWAMLSLDDDDNPTGVVRLGVRCFDSGVGSEEEVAQGKEQSQNVERRGARLLRRQTWRRARRIAKVFHALQRFGLLPAEPAPTPEQRDALIKQLDADLRAEFLPAGDRAAFHLLPYRLRALGLDQPLPPFAFGRALLHIAQRRGFLSNRKAEGKENEKERSVVKESISFLQNELVRTGARTIGEYFAGIDPEEQRIRGRYTARQMYLDEFEKLWAVQAPHHQLDESAKKAIHQAVFFQRPLKSQSGLIGLCELEPGQRRAPAASLEAQRFRYLQKVNDLQIITPDGFILAPSEEQRRSLIDYLEHHAEITFDKLRTLWGLKLPRKSKKKSPAASGSDGDSDLASDAAQSDERPGYNFNLERGGEKKLKGNVTRARIEAALGCDLDELPAHVREPLVADVLEYENADALQRRLVQRYGLAEEQAAALAETHFEDGYASLSLAALRKFLPLMEQGMPFATARKELYKDSRQFQPHDILPPLFMVKAQLRNPAVSRGLNELRKVVNAVIRRYGKPKYIRIELARDLKQPRKVREERSKSMRKNEALRQQIIDDIRRFGIANPSETDILKVRLADECNWQCPYTGKAISMETLLGPHPQFDIEHIQPYSRSLDNSFTNKTLCDVHENRIAKRNLTPFEAYSGDEQRWHEIIARVRRFRGPASPAKLRKFLAKAIDSDFVERQLVDTRYMSRAAAEYVGLLYGGAVDSQGTRRVQVSPGGVTADLRRLWGLNRVLPRDPGDDERPGKKSRSDHRHHALDAAVIALTSPAMVQQLSRCAQDALLIGSRRFVALELPFPSLIDDLKKAIDEIVVSYRVKRKVRGRLHDQTYYSPPKPACDENGRTVEYRHVRKPLASISADRIEKIVDPVVRKTVQEHLARHGGDLKKAFGNPNNLPYLTAGDGRIIPIRKVRIRENISVLPIGKPPQLRFAAPGTNHHMEIVEVTDARGRVRWEGKLVNMFEAYQRRRQHLPVVCRDHGPNANFLFSLACGEYVEMEHVPGQRKVYRVTTISGERLEFRLHCDARPITVLKKLPKARINRSASTLLEAKARKVFVDPLGNVYPAGD

SEQ ID NO: 8236 - protein, 1076 aa, synthetic construct
  REGION 1..1076: note = Synthetic
  SITE 166: note = misc_feature - Xaa can be any naturally occurring amino acid
MEGPVKSMPVCRVETENRYRLGLDLGSASVGWAVVFDPDGESPKLLAMGVRRFEAGVSGDIESGRDESRATARRDARGPRRQTWRRQYRLRKVFRLLQRFRLLPQSEDDSHDVRNRVIAELDRELRGQYLSGATHAAHQVLPYRLRALALDEPLSPFVLGRALYHXCIRDSYHLAQRRGFLSNRKAAKNDEDEGVVKAGISALSAEIERTGSRTIGEYFAGLDPQEQKIRGRWTARQMFSDEFEKIWTAQSAYHECLTGENHDLLFDAIFQQRKLKSQKGLIGACELEPSKRRAPAASMEFQAFRLLQRANDLVMIDPNNHLHPLIEAEPAKREALIAHLEEHDACTFGQARKLLGLKAERRDGKPVKWTFNFEQGGEKGLKGNSTAARLSRVLGDRWRGLADEDKCRLVDEILSFESEEVLVRRLVRGWGFPAPVAREVADLHFEQGYGSLSRKAIRALLPYLRRGIPYATARKEVYGEGTAAGEPVDFLPANHNCKLLRDVRNPAVTRALSELRLVVNALVRKYGKPESVRVELARELKQGRDRRKRIADQNRRNEVLRLDAKARILAEIEHDERLCTRENILKVRLAEECNWRCPYSGRTIAMAGLVGEHPQFEIEHIIPFSRSFDNSFANKTLCYHEENRRKGNRTPFEAYGNTDRWQEVLDRVGEFQGERRLVARKLELFQKEKLDDADEFISRQLTDTAYMSRLAADYLGLLYGGRIDLQGRMRIQVSPGRVTSHLRRCWNLNSILGLPDSKDRSDHRHHAIDALVVALTGAREVQLLSRAAEEAEDLNQRGLFVSSDQPWDGFLNDVFSAVEAINVSSRISRKLNGQLHDATILSPPKSRVDKKGKLIEVYHVRKKLESLTKHMVEDIVDDRVRELVQEKLGLVGAEPAKAFQDKNNHPYFRTGDGRIIPIHKVRIRKSDSPVAIGAGSKRRYVNPGANHHLAVVAILDEDGNEKCWEYRVASRLESIERKTHGGEVIPRPNGRQERFKFSLSGGEYVTMKFDSEVERLYRVTVITQAEVEFVLHSDARPITVRKKEGGRVRCAPGRLKECGARKVTVDPLGNILPAND

SEQ ID NO: 8237 - protein, 1157 aa, synthetic construct
  REGION 1..1157: note = Synthetic
MAKAQFRHEAFKNGYRLGLDLGSTSVGWAVIPANDEDISEETLILGSHIFDAGVDPKEKKSRNLERRAARQRRRMAWRRSRRKLNLYRALVEGGFFPQEEGATVEERRASRHNYLMALDAGLIRKFGGGRDRIAAQTYLYRLRRAALDEELTLEEVGRVLFSLGQRRGFLSNRKTAASEEGDDKDEGKVKGDISQLGQAMAESGARTLGEFFAGLDPEELGSRIRKRYTGRAMYLSEFEQVWAAQAAFHPEVMSGEAGERLKKRIYREIFHQRPLKSQRGRVALCSLETHYVGGKARGPRVASKADPLFQEYRYWQKIIDMAVYDPRQDEYGEGKIGWRSLTREEQDVVAELCANQEKATFTAIRKALETAFPDVWKYKPKTSKDADPSEKADKKLYWKFNLEFDGGDKGLHGAVTRAKVRKALGEFSAETSTETVDEIAAAIRFFEKDEPLKKKLRALKPNLTDEVVKALVAVTLPSDYASLSHKAAGRLLEYMKSERVPVMTARKMIYSLTIQETAQSRRAEYLEPVEKALGDVRNPTVTRALTETRKVVNAILRAFGGRKPEYVRVELARDLKLSQKKLDELKKRNEERKKIREKSREDLREIFRNLNITSEPTNRDILKYELWEECGHICPYTFKKISERALFGDQPEFDIEHIIPFSRSLDDSFANKTLCEASENRDVKKNQTPYEAYGQDPEKWEAMKRHARQYFVRNGKTTRKYELFTCEDAKEIEGMPQSLLNDTRYISRLATEYLATLYGADATGVEANPDGEKGNKRVRASNGSVTAWMRREWDLNIVLARLAENLGVFTSRDDSAEARETKSRVDHRHHALDALMVALTNDGLISQLSRSAAEQDAFVAPGGRDKSSRLFARNFPEPVPDFGGYDGIVYRVLSKVIVSNRVDRKVSGSLHDESIYSPKTAAGDNGKRAFRKPVASMSEGEVQAIIDPVVREAVLQKIEDVGGIKKIALLADNPPRLPGKNGAPGPAIKKARFWKSVKTIRIGGNSRREVSTERFVAPGSNHHIEVYAVLDPVSGEEIKWNGELVTLIEAYRRVRDNEPVVRHDFGPNTRFKFSLSKGEAFKINGSNDIYIVRSISQEKTGAPRLDSTKNTDTRSPGEVKNTENNQLRLRPFTTGLLKMGFVKIRIDVLGEVSPAND

SEQ ID NO: 8238 - protein, 1476 aa, synthetic construct
  REGION 1..1476: note = Synthetic
MSKRILGLDLGTNSIGWAVVDDFGNGLFELVKKGVHVFPEAVNDVAQGGARKSKAAGRREKRSARKINDRRRIRKINTLRVLVNYGMCPGITDVDLDVWQYGRKAEQQKRYKEYPKDKAFLDWQNTNDLSSKNKNKVMRNPYLFRFNAIEGKINWDNETERNNLGRAFYHLAQRRGFKSNSLDAGDDEYDVFHATLLSEFEREHDSSEEVSEIIEELAGDTKGKVSKLKNRLLRILRNTSDFSAAYSECIAVLEKPEFLGKVQKGIHELDQKIEKANARTIGEYFYQCYGDGTKIRGQYTDREKHYEAEFDEICRVQEIEGELKQKLYDAIFYQRPLRSQKGLVASCSLEYRLPAFRDGKPIYRVDETGKSVPITYSKKCAPLSHPIFEEFRMWSFINQIKFKSAGDAEMDFLSENQKKEIEHLFFRKSKPYFKFSEIAGVLFGKNATVARVRDEKDQPADFYVNYALDTSVSGCPVLSQFRKVFGADYQNRIVVTYKGKFNNVKGRKKTDSDILTEVWGVLFSREDPQERKRQLLKSWNFSEEVADAFSEIKLTRGYSSLSAGAMCKIVPLLKEGMIYSHAVLFANIPAVLRGSDVDANAVKNILSEKFCAYSAYRKQVVVANELISDFDSLEELKECFREVSDSHEKVALKFVAKFGAKEWSVFSDEEQALFSRKVAELIKTQWRVEADEGRWVKLMPLKSVLREILVGEFGVTNERASLLYHPSDVLKHNPYRKSETVRAGKLILESPIVSSIKNPVFMRTMHRLRAVVNALIHDETVFPETEIHIEMARELNTANMRAVIEADNKAREERRKKYAQIIKNLMKKEATDADLFKFKLWEELLPDDSEREWLKCNQEIEQKTLKYELWEDQKRKCPYTGQSIGLADFLGNNPRFEVEHILPRSRSYDNSEENLTLCCKKYNREIKKSRIPSECDNHEEILPRIEHWKERCVDLEREIKKTVSAARNADPERKAKIIQKRHRLKLERDHFAKKYERFTMKEVPNTFANRQLNDTRIITKYACFYLQTIFKNVMTVNGATVAELRKQWGLQLAEKKSREKHTHHCIDALVIACMTKYQYNQLAEFYTRKEDEKFARGRKATLVPQPWESFIPSVKQLEQEVLVSHFSSNNLLKQSGVLPSHIMKKVKAGATNNDLKKKQTARARLHKDTFYGRVLHEGEEISVVRVPLVSSNEALKGFKNLHDLKARVVDRGVAKRIGIVSRLLMKKYKLSFSEALKAKIYMKNSAIDLIIKDRVRKGWGLPEALNEPVFINGKMIMPIKRVRCRAATVKDPLAVKRQRDKSKKYDHPHKQYFYAENATVSAVGLYVGAGGVVHEGCEGLEAVKSKLVFPATKKDKKGRVYEFERALFVDQVVLFCKKSVNELAQLSLEELSIRLFKINDLSKNETRMVFRHHLVSGKKGDLELENKKHRGTKYPSEANFDSPNPLQRISYNNMNIAVEGVHFNLSVLGEIEFKGV

SEQ ID NO: 8239 - protein, 1379 aa, synthetic construct
  REGION 1..1379: note = Synthetic
MKLLGLDIGTNSVGSAWVDTEAKTITIGVSVFPAGVEESEEKRGAPKNQARRGKRSLRRSIHRRALRKRRLRELLTDVGLLPREQDKLQTVLGWDPWELRRKGLSQELTCYEFGRVLVHLNQRRGALGIEVSEGDEGKVKGAIDRVRLELLDRYASPGDKERLLDLRQSKDDDEQGRFATEFANWLEQSDDATFGRMMADLHDDRRVCILDEKGNPKKNKNRESRYYHREPIRNRRDSFQFHADRALIRDEFRKLWKKQCSFDGDLSRLLTDTLKKQFDDPECELYAEKAQRTWRHGGALFGQRATYWDTGVLGRCALEPTDRCVPIADMHAQYFRVVETVNNIRICSDWQAERPLTEDERDEVISLLRGPLFKKSKGKEEPKQSASVTDIREVLGIRPRDKSVWLNIEKDEDREINTDWFHREVVHNAIGLKHWEGLDDKIRERINRVILKYDAEKAVSAAGLRQEATQWWGLSSDRVDALVSILKERPKLEKRLNLSRRAIVNLLPYMETFDRINNRWPTQQEARKAFAEDAGAIDATSGKPPDDHARRRYATGALGATASDRYYMKQDKHQIQCANGTILPPLPPAPMMSNPVVRKAIHEVRRHIMAYLQKFGGKPDRIVIEFARSAKQSAKVRDQTLVRNRYREKERKKILVGDDREAGVVKTAFGDDFANLSLNQQRAAVDRVILAHQQQWKCPYCGKSGLAATDVALGQGVEIDHIVPYSRCGDNGLNNKVVCHVECNRQKRKRTPTEWWGEEFAERARTAKKLFDDVEKGQMYYFTKRDYARKWHNFTREVRDNEWRNSQGSDTAYASTQVAAYLADALFDGKGLPERGGERKIFVTIGKYTSMLRRDWQLFKTLKKSKAGGEVCISTEEEEELEQKDRGDHRQHAIDAVVVALTTPNIISAVAQRAAMEESIFAEHGHWPGQRSRRETCRQCHEYRNRSGRFPGEYEPIVPPKPWDDVKEFRDLVLSQVGAPQSNDGLTVAHRPVKRRIAGAFHEDTLFGTIKDSEALFTGRIPCYSPPDTWLKPAHLRVMKPETEKQSVERLTIRYVNEGCDKKTARNKAKGAVKQPSFVPQLVDPSPGKTGLVRDPALRQQMRQCLRANNIDPDNYEKSDMKRMVQDGLLRMYSQPEWKKNSQSESPEKPTGIPIKSVVLLRTHTDPIIVPRKKWDPINKKMVREEHSRSFRVYVGGNNHHIEITEGEDGSWDGDIITNHKAAQRNAERLTKLREAGVPSIEKLRKMNKTDRRRYASTIREINRSYPVVNRADREGRRFVMSLAEGETICMKHPQTGKQGYFVVYKLDKPHVIHLKHHWDARPDGGQKDDDGKVIPGSKREGFSVSAGDLKTKCSLGEGEPPCKVRIDPLGNPRKVLKD

SEQ ID NO: 8240 - protein, 1061 aa, synthetic construct
  REGION 1..1061: note = Synthetic
LALANDGNVTHNSIRRQQGLHPFFARGRRIMEEPPNHGERMNTRLALDLGSSSIGWALFRLNDDSRPCAIIRSGVRIFSDGRDNYQNSLGARRRKKRLERRMRARRNKRVRTLARWLITLGFLPSDPVERRLLMNELDPYELRSRGVREELTRFEFGRAVFHLGKRRAFKSNRKTDTEDEKESNMKSAITTLEGELQKSGTTLGDWMYQQRKKDSSFSLRFRPNSSSSASKLDYDYYASRAMVEDEFRTLWIEQKKRSTHPEDFSDWAFDRIFDAIFFQRPLKPVVPGLCTLIPEERRAPKALPSFQRFRLYQELNHVRLVSADGARRPLSLGERDKLALYLENHKTLNILSIPRKLKLKDGSQAINLSGEDGSKKELTGNRTACDLRGNGKSKPGFGVAWDNFSDARQEEITKKLLNETDAESLSGWLVRNTGVSPDLAHTISERSLESGYSRVSEKAISLVLPKLMESVIPYSKAVEESEIGSHSGLSHYEKTGVLLEELPYYGEYLQRRTDGGTGDPRETNPEIRFGKIGNPSVHVALNQLRKVVNELVREYGRPTEINVEVLRDLRHGRKTKKKIHLANLENQKENQRRVEEALPFLGVKKVKSLSDHKRSSVARKMRLWEDLAKNPGDRRCPYTGTLIEPQMFLKTGEVEIDHILPLSDTWDNTLSNLTLCTREANRKKGKQTPYEAFGHIDEGPYSYASIKKRVKSIRDPEKRRRFLENALDVWKEDHSGPSSRALTDSSYIARVAVEYLSLICPREKVIPVSGRITSQIRKRFNFKKGRHDHRHHALDAIALGIADHRLVQQSARTSREADGRYMSLAKFIREPWPTYEEHAERAIRNIVVSFRPDHGHQGQIHKESHWGLRGDGSAKRKGANKPKTPNDVTRMMSISKSSDPLRIHTGSPAKSGTAYKFMETNSNYCLEITVNAKGKWSGEVISRAKSYEFMRDHPGGNIMDVLPKNKGINGRPLVMRLTQGDMVRIHVDGNKHIMRVNKMGWNGSVFLSEHFESNCDQRNRGKAEPGFRYLTKSASGLQAANCEWISVSPAGRTSSRWHAAA

SEQ ID NO: 8241 - protein, 1209 aa, synthetic construct
  REGION 1..1209: note = Synthetic
MVQNQIVFGLDLGTNSVGWAVVDLEQNIVLDAGARIFSAGVAIDPKTKKESSLNEQRRLSRQMRRQHFRRRLRKHRVLRRLSEMGLAPTDQAELQRWIADDPYALRAKALDHELSRWELGRALFHLTQRRGFLSNRKGAAKEDGTIFEGKKGSSIIPINLTQESMEGFRTLGEYLHSISFKPGEASDASRPRLRNRYTLRSMYLTEFEAIWERQQEFHPELGPDIKRELGDPEKGILFFQRPLRSQKSLIGKCTFERGRAKDPVLDKWVESGKPRCPISHPDFERFRTWQFINSLRAGGEKLSHTDRTTLFEEFLRKDGELTIKDLAKKLKHLSDKKFNYEDNDKRPGCKTIARLSGLMGQQAWDAGGPEKQHELWHAFFSIQNEEQLEKYILGKGGLSSLRWKEFCYPKKTKKDDGKPQRKRTLQLEDGYANLSLKAIRNILPFLEEGYEYDHAVMMGGIRNAFGAKAWDALSDEQQKDLKDACFRFRKEVPDRETGEIRKPQEGEVIRELRDYLRTSYKLSHKAVGKLYHHSQHQRASGTAAELPQVPNLRNPIVQKALGQARKVVGELVKRYGRPAQINVELAREIKVSAKVREKMELENRDREKLNAEARKVVREYGLAPSRENIQKYLLFKEIDRKSEGSIVTPYSMDGKAINLDKLFSRDSSIQIEHIVPRSVSLDDSLANKTLCEANINRAKGNKTPFEFYTSIGADWKSIQKRAFQLLPYPKAKRFVSETKLGLDDFISRQLNDTRYISKAAAAFLKEICPKVQVSSGGVTARLRKIWGLEAILGGNILLEEPWNEAEEGEYLAWVSQGKVLELIAVDDPDYKKKNEQFLKQGAALRGYVKNQRFIPEKNRDDHRHHAVDAIAVACVKPQHVQLLAKISSHDDSSQPKPEFKALDPWEGFFHQAKERVQKILVSHEIRDKVFQKDRKKVRKDGKVILSEGVSARGQLHLESVYGKRSVFGEEAFHLRKPLESITKAAQVNKIVDPAIRRVVEQAILRAHPAIKLDDKYDVPKDAFFATDPKTGAKRPKVFLRSQNGIDIPILKVRIKENLGNARPVNPKATQWVNPKNNHHAAIYKGTDDKLIDEVVSFWDATQRMRDGKPAILKVKPDGSRLVAAFQANEMFLLGVPDREIEQVLESPVLLAKHLYRVQKMSDSYYVFRLHKAATIENDSEMVRIQSMKAWQEHNPVKLRMDVLGKLVRD

SEQ ID NO: 8242 - protein, 1123 aa, synthetic construct
  REGION 1..1123: note = Synthetic
MQEKILSLDLGVTSIGFAVLERKDDFHYSLLDTNVWMRNNPFGDGDSPKKLRRSYKSQRNLIKKRRKRAKDVRRCLIGNGVITSDIKQDKKTYIDSWRLRGRAAYERKLSRLEFLNLMQFFAKHRGYKSLSVEDMIAEIEAKDQMKAECEGGDEPQPPSLEKWQDRLAYMDALKCQNKDKTVGQIIFDMETGNETPTYRNHDDYRYMIKREDVAKEIEQVFAKQEEFGFFPKNTSVNTLKEQIKDIILTQEELQPIEDMINRCALDKTQKCGSLYSYSYDYFKLLRTLNEMNIGKDTKLTIEQRDKLLRHVMERIDRFESVEKLTVKEVRKLLGLEKEIKINKMLDSDPKKKKDKTNVLVKFKFFAALSALDQETLQKIFAHDKAVRILDELSYAVLIHTSPKALMANAREILNSYDMGLSEDKVQTLILSLYKNKPAGNNSGKYSFKTLYRLIPELEKEVIGENIAKQKAGFDEHKEDYSGYDKGIEYLDLKQFEKDEDLISNHSVKSLVSGALRLVKHLSKEHGEFDKIKIESARELSIPDEVQKDIENAQKKKQEEKERIKKAYAQYKENLTDRDVKKIRLWEQQGEMSLYDSGVKIGVAQLLSEKVQIEHIVPRALGGVDADYNKIVDFSNLNSKKGNRLPMDFLSEDKKESYAEVVKALKNEKKINFKKFVNLMAENLDKTFHEVRDSNLMHATSYAEILLGDVLKRYYPFANEAYRSNGVGVEHIQGRATSHLRQLLHVDAKSRYTNFHHAEDAILVGVLSKSYLQKLSKLYRENYGTQYLDGKEVTKQISPFIEGAKLADVIYDLRKRYEQDLETSPFYKDFHGDLRAVKFFVSKKPIDTKAHNETVQGKDYSYRVSWEKLLGNIKSKPKPTTDPTKFAKEFDKEIIGRVKVLQENPKDPVAKAIVQRKQQIVSALNSAAFINTEDEKEQLKKEIDRLWSIPLKDSQDNDIRRIKRVGEEVSINIRGGKAATAKSLHYVKFIYGARKFTISRVDIRNSAKEAKKLQPADTMKVYENDLLEIFKESKKVLHSAEIGIVKGFTESGVRVKLRNPKFPTNEDYQPKEYTKWKGIGSLKGIKKYDIDITGKVQGFYRLGRVLVGDEVKESKVVIYEKLKE

SEQ ID NO: 8243 - protein, 1062 aa, synthetic construct
  REGION 1..1062: note = Synthetic
MTSIRYRLGLDVGSTSLGWWIWEEDVTGEVIRSVDGGVCIYSDSREPKTGTSKATARRVARGIRRRRDRYLKRRDRLMNQLVEFGLMPSNSSKRKELESLDPYKLRVRALDEQLQPFELGRALFHLNQRRGFKSNRVVDSATEQTEQGSIRSGISTLDKVLMDRKYRTIGEYLLSDHKSKKSVRFRPGVESYPSRKHYQDEFNFIRRIQEPLQHLPSEHWDALEQTIFFQRRLRPIEPGKCTLFPDENRAPWALPIAQQFRVFQEINSLQVIQIGERDRRLSTEERERAFHILSTQTKVRFESLRKKLNLRLDSRFNLEGETRNHLDGDKTAAILRKKENFGKSWDQLDLLEQTRTVKILLTRQREDEVIRILQEEQKLSKASARAISTLRLPKGYGNLSEYAMEAIVPHLKQGLLYHEAVTAAFPDRDHSQVDEHKKVDLLPYYPVLLDRHVSRGSNDPNDDLFKKLGKIANPTVHVGLNRIRRVVNAIVMQYGPPAKIAVELARDLKNSFEEKQKIKRRQAEERNKNERRREDLENCGRNPNPEYLRKIRLWEEQGPCHARCCPYCGRILSYEMVLDDRTQIDHILPFSRTLDDGLSNKVVCCNSCNQIKRNKTPFEAFGFSENDKFDYDKMLYRISSNWPKNKKWRFYPDAMARYEDEECGFLARQLNDTRYLSRITKTYLQFLCDSPTQVSVTPGHLTALIRGKWGLNFVLADSNYKDRTDHRHHAIDAAVIALIDRSMLQRVSSAAAAGVNVNRFLPNMPEPTKCRNFRDQIKDHALNHIFVVHRPRHVNTRQSANTTSGQLHNDTAFGIVNSSDSNVSFVGVRRLLLSDLNEAEGRKLLLGKAGPGERIRKTVRDESLRRQLLKVWLSFSERKQSWREFCEYVAKPGRVTKYGVRKLRYTEHKDSLIKIRDINGRVYKGFKPASNARMDIIRLPNGKYKGQCVSTFDANQERLELERSRNHPEVKCVSHLFQNDLIAIGAGNNREILRVVKLAKSGRVCATHHYEGGKLDARDKDVNDPFKYIDMTAQRFVEAGLRKIKIDPIGKIYDPGPIITRA

SEQ ID NO: 8244 - protein, 1090 aa, synthetic construct
  REGION 1..1090: note = Synthetic
MIYIIGLDVGISSVGWAVIRVDKDCRRIEDFGVRIFDSGETRDRKQSKCQERRSFRGSRRLIRRRKHRKDRLKYFLNEISFVTEKEMKDFYGHNNHDIIDLRVKGLEERLTPEELTACLFHIAKFRGYKPFYDLEKVNLKTEDGKLLLHMNETNKIIENGGYRSVAEAIQKDSYFKEETTGRYRFHNKSDKNDILFSNGMIKKEAETILNCQKQYYSQLSDKNIEKIIDIIFSRRDFEDGPGNSDDKNRKYTGFYDSIGKCRFYKDKNRGCRFTVLGDVFALINKLSQFKYVSIETGEVDKMPKNLMHTIIMKAIKDASLTKKGIIKIAKEQGFTLVSGNEEKDDNTDITNCLKFVKPMKKIFDADDSGYEWGKLINEDPTNMDSLLNRIGVLLSYNITPNRRLEKINSIPEIKDNAIVERLSKVKLSRTANVSNEYMINAINAFREGQLYGDFQAKVIKANFSSNKNATKHKKLPPFTKDSEIYGNPVVLRSVNECRKVVNAIVERYGTPSAINIEVASDLNRSAENRKKLANNQKKRRDNNASVLKKVADLLGVEESEITKSQLDRFKLAEQQGWRSMYSGDNLYSDDKGKITDKDKKAIILNTDKVYEIDHIIPFSRILDDSLNNKVLVFAKENQDKSDRTPLMYLEGDSRKEFIKRVNSFYQSKNENKEIGSISKIKYSYLMLDSLTSEEALKYLEEWKIRNLNDTRYISKYLVKYFNDNLLFEENKDSRRPPVYAVKGAITSMLRKQWLNKKTWGNLDKKKLKSVTNLDHAIDAIVIGNCLPAYVEIAVENIKLRDIYYSSGKKKTEEYYRSRDTFIDNLWKFYGVPKSESARLLEKMTETPSLINNLRQEVECRVQDYGTMQFFSKDDNGKTKEEWDEIYRRNITNFYVGQKDFVDSIQMPIVSHKQDKRFRGKIANSNFVKTTDDVSKFYKKQIDENNFAYMDDRSYYCVDVYKNHKGNTKITALKYNDIIKKNGKLYLKQDYKFPEDYREHLMYLYSGDFISVENKNSKYYGYYVSVKNINRNLLNIDECFYENKVIDYKKRIERAITERSIVKKYYIDILGKIGGEIYKCGEPLSYLPEKD

SEQ ID NO: 8245 - protein, 699 aa, synthetic construct
  REGION 1..699: note = Synthetic
MIYIIGLDVGISSVGWAVIRVDKDCRRIEDFGVRIFDSGETRDRKQSKCQERRSFRGSRRLIRRRKHRKDRLKYFLNEISFVTEKEMKDFYGHNNHDIIDLRVKGLEERLTPEELTACLLHIAKFRGYKPFYDFEKVNLKTEDGKLLLHMNETNKIIEDGGYRSVAEAIQKDSYFKEETTGRYRFHNKSDKNDILFSNGMIKKEAETILNCQKQYYSQLSDKNIEKITDIIFSRRDFEDGPGNSDDKNRKYTGFYDSIGKCRFYKDKNRGCRFTVLGDVFALINKLSQFKYVLIETGEVDKMPKNLMHTIIMKAIKDASLTKKGIIKIAKEQGFTLVSGNEEKDDNTDITNCLKFVKPMKKIFDADDSDFEWRKLINEDPTNIDSLLNRIGVLLSYNITPNRRLEKLNSISEIKDNAIVERLSKVKLSGTANVSNEYMIDAINAFREGQLYGDFQANVIKDDFSSDKNATRHKKLPPFTKDSEIYDNPVVFRSVNECRKVVNAIIERYGTPSAINIEVAIDLNRSAENRKKLANNQKKRRNNNASVLKKVADLLGVEESEVTKSQLDRFKLAEQQGWRSMYSGDNLYLDEKGKITDKDKKAIILNTNKVYEIDHIIPFSRILDDSLNNKVLVFAKENQDKSDRTPLMYLKGDSRKEFIKRVNSFYQSKNENKEIGSISKIKYSYLMLDSLTSEEALKYL

SEQ ID NO: 8246 - protein, 1443 aa, synthetic construct
  REGION 1..1443: note = Synthetic
MKKILGLDLGTNSIGWALIERDFENEVGKILSMGSRIIPTDSDLLSKYEAGQAASKNAARRQARGARRLKQRYKLRRQRLIDALKILGWIPESFLPGHRFEVDEITLREMKTLFPGSDISDDWVVYYLRHKALSEKISERELAQIIYHMNQRRGFKSNRKTANEIAEIDDTAEENTGKKKREKKVEIVTIVSLRDTEEKLKGNTIFEIELVDGRKGTIARKSKPDWENKEIELEITWIPPTQKSPERLEFRPLTNSDADKWAKQKIAREEAIVKSGLQYPGSYYFHELLKNRQYQIKDVSIDRSFYVNELTAILHKQIELNPALQNKDAIIKIAENFYPKNLEKQKELKNHDLVHLFINDVIYFQRPLKSKKSSIADCRFAFKEYMAPDKLDKIRIPYKAAPISSPIFQEFRIWQTINNIRVLQRQYRDEAGKLHLEQDVTTQYVDCAGREQLFELFDNRESVNQKQILKAIGLDEKDFLVNLFRLNEQKEIPGNETKTAIRRQFKKAGYEAEGNLLISNPQKYYLLWHIFYSLDEDKHISKALCRQFAIPPAVAEIVSKIPAFKLQYGSLSHQAINRLLPLMRSGKYWSWNNIDTSTKLRLQKLITGEYDENISEHLRELFSKHQITNEDKCQGMLVAMAAYSVYGVHSERNQNSYDTPEQLLPKEPLNLRNPIVEQVVTETLRIVHDIWKTHGRPWEIHIELSRDLKRNAKEREEISKVISENENENKRIAAILRELKLGNPNSISDIERLKLWERQADEKAREEFKQIKFKRPTEPTRQEIERYKLWAQQNFLSPYSGKPIPLSKLFTRSYDVDHIIPRSRFFDDSQDNKVVVETTLNKEKDNKTAYEYIKSGSVNGNQLLSPSEYESHIIRYFFGKKRNLLLSEDVPERFSNRHLVDSRYISRKLTELLAPVSENTADPIISTTGSITSELKSAWGVGEKMKEVVRWRFERLTEKSGEPYVWYEEELDDKEQPTGRKTLRLKGYEKRIDHRHHALDALIVACTTRSHIKYLNDLNATQYRKRPTDNELKTYLPRLLETGKDNYWQSRKFRKPWKNFVTDTAEELNNIIVSFKKNIRLYGKKANKNLRYIQLPDGTFVKKYLPVLDEMGYRKLSPYVRASLHKATIAGKIMLKEYKQVSLSDAFKMPDQIANKEIKKYLTALLTEVNGDPKKAINLFKQKPLNDNDGNPIKKITIAETVSYFASRVDVSSGFDEKRIEKIPDPVLRSELKKHIKYIDTLNSSKSTDEKVDPFGAEGIEILNGQLIKSGKFPISKVTIKEESTAKFEIRPGAFTEADKGTNLFFVIYQNVNDPGDRCFESIPLRIVIEALAAGSGFVEEKPGYKWFTISPNDLVYLPDENENIASVDWQNKRLLSNKIYKLVSCNKGQAFFVPHTVSKVIVDKFEFDSLNKVERSLDGRMIKQFCIKLKIDRLGNITPTGT

SEQ ID NO: 8247 - protein, 1074 aa, synthetic construct
  REGION 1..1074: note = Synthetic
MNSSRSPVTRFSTGLVFGFDVGTGSIGWAVRNGTEFLDVGVLVCPEETAKLDSRRGLRRQRRTLRSKKYRRQWFARELAGLLGLTLIRQGQSELPLPETAWEQNAKGGWVPKPGFESLRDPVALRVAAAEGEPLRPEELFTALVHLFRLRGYLADVPWANREVEAKESDAKKEEGEIRARMSALQAEMQAAGCELPCQLLALRANNGQRQRKEVWPRELVEKEFRAIVAAQATRHPTLAEKADWLLFGDCREVKSHRVFFKTTESRNPGVLGLKWPRFDNRGPALDALRPIDELGRPLHVVRKNKEAFSKAQWELAVMNFRVIDRQTGALVPPDARALARLREMWESSSRKRRAKKEAMSGTPAGSPETTPRVEIKVALLEKWAAEFANRYKLVEGQQSLTPQTGAGRARYSTPTLELIREQFERGIRFDPPQPVLRRPGESPQRALDRYLADIKHPLVRHRLLLFSRLLDKLVKQHGEPDLIVLEAVRSLALGEKNKRELLKRNKANRDQRESIRQELASRNASTSRNAILRYRLWKEALSTCPFCGDKITQEQLLRGEADIEHLVPRSVVDCNEFYNLTVGHVRCNRELKGDRTPFQAFGHTEKWPQLRDNAEKCFKGRKLEIFLSDNAEQLIEQKADLQHTAYIARIVRHVALIRLGWTGDDGRDPTIIKGNKPSSSFQVTNGQLTSRLRQAWGLNHILHPLPEGKRWDDLTDAEKEQMQQKNRGDLRHHALDAMVIACTLPWLAHRTVGATDPETGEHGWWQLDERTRRSLALNPVFPTEGQMRRVAEEWMQKVVVRHHVSRSPHQSAYATTIYGKKAPNTYVAREVFTTLTPKNLGSIWPPDFAAYCEAAWARYVEESPDIEAELKRSKGCVPESFTARLCFAHFQQWRELMKRGENVEFTWPETVKIPIRSVRLISVKDDTAVMRFAPGTPGYVKRTGFKEVRIHVSADGNSFVPVFVPYWKGDAIPPETPIKTGTRPVAVIRKGQVVGLKKPLAAGASAGHYRVIVLGQSQVSILPPHVANKDEAKLALGIPRTGIKPYWPEFIRALGYELPHPPSAQSPPPGALPT

SEQ ID NO: 8248 - protein, 1037 aa, synthetic construct
  REGION 1..1037: note = Synthetic
MHGTNSIQVFKTGLVFGFDVGTGSLGYAVRKGAKFLDVGVIICDSEGSDLSNRRNLRRQRRTLRSRKFRRQWFANELEKLDIPKPTQSFHDPITLRLRAIKGEEIVPEELHVALLHLFKRRGYSKVPWANIESAAKDATKPKKEDDEGKIKEEVKKNKEKLSGKHPCQFLAEERAKAGKSPTTNWARKIHWPREVLRDEFLAIVEAQKSRFPKLAEKADWLLYGDSQIKTKGEDAYHVFFKTTEARNPGVLGLRWPRFDNRSPALDSLQPVDQLGRPLHVARKTKEAFIKAQWPLALINFRVIDLATGKLTAPDDKSLIRLREIWENSKRKKKTSYSDAKHEPESLKISEKVMERWAKDFAHQYKLVEGQQPLTPQTGAGRARYSSLTLNRISAGEHFDPPQPTLRRQGENAEQALNRYLADIKHPLVRHRLILFRRLLSQLVLRFGEPDMIVLEAVRSLAMGEKKKREYIQRIKENRDERENIRTELKKDNFSSSKNSILRYRLFKEAKGRCPFCLCPFCLQEVVFNEAEIEHIVPRSRVDCNEFYNLTVAHERCNKEKNNRTPWEAFGGTSNWESLRKNAEDCFGPGSLKYRLFINPDAQNLVEEKSDLQHTAYIARVIRHISLIHLGWLNDEGRDPTPEKQNAALAFQVTNGQLTSRLRKAWGLNQILHPLPPGKRWNELTDDEQKQFTEKNRGDLRHHALDAMVIACTLPWLAHRTHGATDEFGQHGWWTQDEKQRSKAANPIFSCDGQMHDIVKTEIQKVVVRHHVSQSNHQQAYATTLYAKKDKDTYVAREIFSTLTPKNLADIWPREFAAYCQAAWSCYVEESPNIETELKQNRGCVPESFTNKLCFSHYQHWCANNTPPFAWPKKIKIPIRSVRLISVKDDTAVVPFSLGTHAYVKRTRFKEVRIHMAEDGKRFVPVFIPYWKEDKPLCEEPIRTNRRPLAVIRRGMVIETKNPFSTGQPPGKYRVLTTGQKQLRLLPHHVANKVEAILSFGLGKKGLQPYWPDFIRALGYELPHPPSAQSQSAGPAEA

SEQ ID NO: 8249 - protein, 1043 aa, synthetic construct
  REGION 1..1043: note = Synthetic
MNGEIAGQKDSFTEGLVFGFDVGTGSIGYAVRRGSEFLDVGVLICDSEGSDLSKRRDLRRQRRTLRSRQGRRRWFAGELVKLGLPKPPIPPNDPISLRLRALKGEVLKPEELHAALTHLFKRRGYSKVPWANAERAARDANKPKKDDEEGVIKQAVEGIRKELDETKCQFPCQLLDVRRKKAGQSPTKEWGRKIYWPRELLEKELRGIAAAQKERFPELADKTDWLLYGDSQAQLKGEETYHVFFKASQARNPGVLGLRWPRFDNRGPALDSLQPVDEQGRPLHVVRKNKEAFTKAQWELALMNFRVLDASTRQKRDPRIDFPVFIENLRNEWNKKGKITEARLKKLAEPFKAKFLLIEDQKPLTPETGAGRARYSSPTLELIRKEIGEGRRVDPPQPILRRKGESAEQALNRYLADIKHPLVRHRLVLFRRLLMQLVARFGQPDMIVLESVRTLALGQKAKNELNHRNELFRKERENAREQLASNNESFSRKAIQRYRLWQEAKGRCPFCLQTIEQTDLGHGADIEHLVPRSAVDCNEFYNLTVAHIKCNRELKGDRTPLAAFRGTSQWEGLKANAELCFRGRKLEIFLSPNAEELIEQKSDLQHTAYIARVIRHISLIQLGWLSSEGRDPTPEKQNPALSFQVTNGQLTSRLRKSWGLNQILHPLPPGKRWDDLTEAEQQQFTEKNRGDLRHHALDAMVIACTLPWLAHRTHGAKDIFGRHGWWTQDEKQRSKAANPLFPKEGQMHEVVKNEIEKVTVRHHVSRSNHQRTYDTTIYGRPKLNGAQIPDCYVSREPITALKPADLKSQKTGKSKIFPPLLGDYLAMAWATYCDSEPNWEEQLKANKGRLPEAFQEKLCFSDFQRWRADEAPSFRWPEKIVIPIKRVGYIGVEDDSAVAPASPGTHGYVARGSFREVRLHPAEDGKALVPVFVPMWRLDKPIPKAPINPHSEPIVTIRRGQIVEIKNSPGRNTPLGKYRVASTMQQNIKLLPVHLADQKASLKASGYLENGVNISWDTFIKSAGYELPHPPSVKPQPAGAAEA

SEQ ID NO: 8250 - protein, 1022 aa, synthetic construct
  REGION 1..1022: note = Synthetic
MKITYKDFVKGLVFGFDMGTASIGWAVRHGDRFLDVGVLICPESTEDLKERNSLRRQRRTVGNRRYRRRWLKAELEKLGLPCPQIAIPEHPATLRCRALNGEPLAPKELHAAISHLWKRRGYTDVPWADNPDREEDKEAKKEKGVVKQAMGHLRQEMDDNDCQHPCQLLERRREKGHRLRKEYWPRELLIEEHRAICEAQKHHQPELHAKMEWLLFGDLTKVVDGFRVYDSLAEGRNPGVVGLRWPRFENRGPALDALAPLDETGRPRHVVRKNKPAYLEAQWELALMNFRVVDVRTRSKVDPLQAYPKFIEALREEWDKKGKITLARLKRLAAPFESEFVLNEDQTPLTPQLSTGRARYASPTLKQIQAAIAKGDRVDPPQPVLRREGESRIKALHRYLREIRHPLVRHRLILFQQLLEKLEKEFGIPDLVVMEAVRSLALSPKKKRELSKRNEEHRKNREQAHEALKNEKHSTSGKSIQRYRLWKEVKGICPFCHETIDQADLFNGNADIEHMVPRHRVDSSEWINLTVGHLKCNRTIKGERTPFEAFGRASNWPELKDHAEQCFRGRKLEIFLSPDAESLLESKADLQHTAYIARVSRHIALLQYNWLGNDGRDPTPEKQNPALSFQVTNGHLTSRLRRAWGLNQILHPMIDGRRWEDLSEEEQEQFKQKNRGDHRHHALDAMVIACTLPWMAHRGAQARDSHTGEDGWWHLDEATQRIKAINPVFPKEGEMRRVAVVQMEKLVVQHHTSRSNHKQAYYTTLYGKKGANTYVAREPLGKRMPKNLNNIYPTELAEYCQAAWMRYEDESPDLAAELKQAKRELRGLPAAFEAKLCFSHFQRWREQVKKGEAHFDWPEKIKTPIRNIKVIGVHDDTAVAPAAPGTHAFVKRGAFKEVRVFPSQDGKRWVPVFVPFGKHDQPIAAEEWDGTANPVKIIRKGDTINLKNGSGPSNPPGLYRVASTMQNNIKLLPINIANIKEALLASGFLANGANIIWPTFFTAMAHELPHPPSAEPPASGSD

SEQ ID NO: 8251 - protein, 1022 aa, synthetic construct
  REGION 1..1022: note = Synthetic
LKYLESNYQQFLNGTAFGIDLGTASIGYAVRKKRDFPQVGSLLCSEAINDLAKRRELRRQRRTLRNRTYRRKWFARELSQLLGLIQPTNLPDDPISLRCRAVQGDEMTSLELFTGLVHLFKRRGYAKVPWASGETRKTDPDKKKEEGFIQSAISELEREMDSTRCTYPCQLLSHRREEKGTSPQDHWARKIYWPRDLLEKEFRAIIEAQKSRYPQLCEKADWLLFGNTEERRGFHVYFKSTEGRNPGILGLRWPRFDNRSPGLDALRPVDDLGRPLHVVRRNKKAFLDAQWQVALQNFRVIEIATGAKLRPDSISLARLKQLYDLKKKSASIKIPVKLLETWEKEHATKYKLIEGQTDLTPGGSGGRARFSTPTLLTLGQDDTPANAQPILRRSGESKEAALDRYLREIRHPLVRHRLILFRQLLAKLVKDHGEPDFMIVEAARSLADSKEQRLARVKRNREFQQDREDAVDKLTHFDHSTSRKAILRYRLWKEIGSTCPFCLEKNIEVSNLFSTADIEHLVPQSRVDCNEFYNLTIAHAKCNRELKGNRTPYEAFHDKPNWPAIQENARQCFKGKKLELFLSPEAETKIEEKSDLQHTAYIARAARHVALIQLGWLGEDGRDPTPEKQNPALRFQVTTGQLTHRLRQAWGLNQILHPLPAREAWDAMTPEQQQEEKDKAAQKNRGDLRHHALDAAVIASTLPWLAHRTHGAVDENGNHGWWTQDEKMRSKAVNPVGLDFLTVKRLMEAADIKQHVSRSPHQQAYNTTLYAKKGQDCYAAREVFTSLTPKNLEDIYPETFREYCRAAWNRYKEEAVDLDKELKASKKCLPSAFTAKLCFSHFQKWRANDAPEFSWPREIKIPIRNVRLISVKDNRAVMRASLGTHGYVKRTSFKEVRIHLSADGKALVPVFVPFWRKDQPFSDYEGDLNPTPLRVVRRGMIVQTIKPFSNGQPAGKYRILVTGQVQLRLVPHHLADTEEACLAIGLPKKGLQPYWPDFIRALGYELPHPTSAQPQSSDSGQA

SEQ ID NO: 8252 - protein, 1030 aa, synthetic construct
  REGION 1..1030: note = Synthetic
MDMKTYILKDANQSPASKDSFLTGLVFGFDVGTGSIGYAVRQGSEFKYVGVLICDSEGSDLSKRRDLRRQRRTLRSKKFRRQWFAKELIKLGLPKSETALDDPISLRLRALNGEVLKPEELHAALTHLFKRRGYSKVPWANAEKAAKETAKPKKDDDEGIIKEAVKEMKVKLGDKHPCQFLAEEKIRVGNSPTTNWARKIYWPREVLRDEFLAIVAAQDKNFPQLAEKTDWLLYGDSQSKEKNGETFHVFFKATEARNPGVLGLRWPRFDNRGPALDSLQPVDTQGRPLHVVRKNKEAFGLAQWELALMNFRVLDFKTRQKRDPRTDFPIFIENLRNEWNKKGKVTEARLKKLAEPFKEKFLLIEDQKPLAPETGAGRARYSSPTLELIRKEIGEGRRVDPPQPILRRKGENAEQALNRYLADIKHPVVRHRLALFRGILTQLVKDYGQPNMIVLEAVRSLALGQKAKNELNKRNEQFRKERENARENLSSNNESFSRKAIQRYRLWQEAKGRCPFCLQTIERTDLGHGADIEHLVPRSIVDCNEFYNLTVAHIKCNRELKGDRTPLTAFGGTSQWEGIKANAETCFTGRKLEIFLSPEAEQLIEQKSDLQHTAYIARVIRHISLVQLGWLNDEGRDPTPEKQNPALSFQVTNGQLTSRLRKAWGLNQILHPLPPGKRWDELTDEEQKQFTEKNRGDLRHHSLDAMVICCTLPWLAHRTHGATDQFGHHGWWTQDEKQRSKAANPLFPNEGQMHEVVQKEIEKVVVRHHVSRSNHQQAYATTLYAKKAKDTYVAREVFTSLTPKNLGHIWPERLADYCVAAWKRYADESPDIEGELKRTKNCVPESFTRKLCFSHFQKWRQDDCPEFYWPKEIKIPIRNVRLISVKDDTAVVPFSPGTHAYVKRTGFKEVQVFLAEDEKSFVPVFIPHWKGDKLVCEKPIKQNTKPVVVIRRGMVVEAKKAFSAGQPPGKYRVLVTGQMQIKLLPHHVANKEDAIVSFGFGKKGLQPMWADFMRVLGYELPHPPSVKPQS

SEQ ID NO: 8253 - protein, 750 aa, synthetic construct
  REGION 1..750: note = Synthetic
LKTLLSSYERFLSGRVFGVDVGTASIGHAVREARDFREAASLICAEDTSDLKKRNGLRRQRRTLRNRNFRRKWFARELAQFLNLSAPAMLPDDPVSLRCRALSGEELSSLELFAALVHLFKRRGYSKVPWANESSFEQDPDKKKEQGDIQTAITKLEKEMGKEGCIFPCQLLALRHEQAGASPTEKWGRKLYWPRELLEKEFRAILDAQTVKYPLLKEKADWLLFGDTKAYEHSGQVFHVFHKATKGRNPGILGLRWARFDNRDPSLDMFRPYDEQGRPQHVVRKSKDAFKKAQWEVAILNFRVLDVKTGTKIRPDAASLVRLKEIYESRHKKKPVEVKVSVAVLNRWAADFSAKYQLLDGQTELVAASSAGRARFSSPVLLTLGQQEAPRNPQPLLRRPGESTEDALNRYLREIRHPLVKHRLLLYSNLLKNLVKKYGEPDFVVVEAARSLAEGKKARLEREKRNRANQQEREIARNDLHENRPYVSRNAILRYRLWKEAKTICPFCVKPIDQGSLFTEADIEHLVPRSRVDCNEFYNLTVAHIKCNREIKQDRTPYEAFSRLPEWEHIESNARSCFQGKKLELFLSPEAESKIEEKADLQHTAYIARAVRHVTLIQLNWLGADGRDPVIEKQSPSLRFQVTNGQLTSRLRQAWVSIRYCIPCRPAKNGMPPPPSSKKSGNRKRAKRTGVISGIMPLTPWLSPRRCLGWRTARMGRKMKMDITAGGPRTKKCAPKPPTLSASIISRQNE

SEQ ID NO: 8254 - protein, 1130 aa, synthetic construct
  REGION 1..1130: note = Synthetic
MKYRLGIDLGTASLGVVAVEMQNDEPRQIAWHALRLFKEPLDDSPKGLQPRSGERRTARLQRRQVERRARRLRRIAHLLTLLGPEWKDRCRMNVRHLTEKRAHAARLRIEPWELGCVLLRMAKRRGYSGGFRASESAAGMVKTASERLQQAMSLLAAERGLDRITLGEYLWYRQENGLPVHLKASRPSLAESDPLYALREMLEHEFQQIWETQAKYHSALNGDYLGRPLKAWFYDALFYQRPLKSIAGMVGNCLLEPNLPRAPKAHPAAQWFRIEKSLHDLRWGGGRRAPRLSRAQLDLLRELLGQPGNADARVSFKQMLAALDEAGLGDALGRSLNLENGGRDGLIGHRTLTTWRKLGLKDQWLALAPGLQTTLINLLADLGSPEVLDQEGWHLKVPRANTKPGDPNPYRKFAPELVRFVDQLREQCNDKGQRVYDRFTTMGFEAGRSSYSIKALERLNAWFADPWWPDEGPGAERRGEVDEEAALRVCYPHLFQPAPARLDELKAAPETGSAVVDVALRQLRRVINQCIAALGSPPQEVIIEMGREVGRGVEWRNEQARRMRENEKVRRKIADSLAAHGLSASSGRVLRYQLWLEQGEQWCPYCNHPISLEAATCGMTHAEHILPRALTQVGRKRSELVLAHASCNDLKGERTPWQAFGSDPQRWAAVERAAAQFEAQGRKLYARDRAKAQGLYRKARLLLLKDYEQDVLSDESLAGFADRQMHQTSWIARVAAQWVKSITPLVSVSRGEMTALLRHQWRLETVIPEVRLDEGFSVLDTERQPVTAEDFARFRRQWEGHPSSHGDERTERRLEKRLDHRHHVIDALVVALTSRSLYMKLARHYREEGERRARGESRRRDWGIAPPMPHLRDQALAMIRGCNLSHKPDRNASGGLFKDKPYGVTRPSEGAVQRLTRRKNLLELADEKSVSATYTAIVSIASEEVRKLVLDTFEARLSAGQSIKEALSCPVDYPRYRTQIWRVRCLTPYKADNVKRITHRSRGGEHHKYLLHAGYACLEIAPIEHEIGCDAKVKRKPAFSTRLITMVEATQPGFNMPAPGVRRLFKGDTVRNSEDGRIYVVAYFQENGRKISLVPFCETRNYGNMKKDGDKNKREIAFSKAVCLELLPDG

SEQ ID NO: 8255 - protein, 1108 aa, synthetic construct
  REGION 1..1108: note = Synthetic
MAYRLGIDLGTASIGAVAIRIENNEPHSIDWHAVRIFREPVVNTPKGLQPKKAARRDARQLRKQIERRARRLRRIANLIPLLGLQKAEVKLGRGQDLTTLRAIAARQPVELHEFALVLLRLAKRRGYAGGFRDSKDGVVKRSCDKLGEEMRLLAETQNLQEVTLGEYLLYRQDHGLPVWLKAERPGLEPRYALREMVIAEFEQLWTTQARHHPILASSHLGKPLKQWFNEALFYQRPLKSPAHMVGNCLLEPNLPRAPRAHMAAQHFRINKTLHDMRWGSGRRAERLCKAQLDVLRQILNDPANADGKVSFKHLHQALSETGLSDARSRTLNLERSSRDQLPGNSTIARWRTLGLHDQWQMLAPRDQTSVINLLADLGGPELLNTEDWHQNIHKSSAKAGGTNLYRRFRPEVVDFINALRECKDNNGQPAFNRLTAMKFEGGRSSYSVKALEKLNTWFNDPWWPDEGPGAKRGNEIDEEAALRVCYPHRYSQPQELLQRLEAAPTTGNDVVDGALRELRKIINQCIDALGERPEEIVVEMAREIGKGVVWRKEQENRIRQNELARRKIASELEKHGLSANNTRILRYQLWEEQDLHWCPYCAHPINLEAATSGMTHIEHVLPRSLTQIGRKRSELVLAHAGCNDLKADQTPWQAFGHDAERWSAVERAAARFKELGNKSYAKDRAKALGFYRKAELLLLKDYESEVLSDESIADFADRQLHQTSWIAKAAAQWLRTITPLVSVSRGEFTALLRHQWRLDTVIAEARLDEKLPVLDIDACPVSPEAFQQFRKQWEGHPPDNLTERTERKLEKRLDHRHHGIDALVIALTSRSLYISLARRYVEESERRARGERVRHDWSIEPTMHNLRNQALGMVRTCNLTHKPDRNPAGRLFKDTAYGVHFPEEGDRAQLTLRKPLTSLADEKSAEKTRKNLHSIASSEVRLLVLEAFEARLSAGQNPKQALSEPVPYPAYGTGIWRVRCMQGYADDAVRIVHKSRQGEHEKRLLNDGYACLEITAGENGKHQVRLVTQREAQGRGFMENRQQAKRVFKGDTVINRRDGRKYLVGYFKAEGYIFLIPHTDTRNFDKIKEANSGKKRVSFNHAHQLERI

SEQ ID NO: 8256 - protein, 1106 aa, synthetic construct
  REGION 1..1106: note = Synthetic
MHYRLGIDLGTASIGAVALELDEQGSPLGAPWHAVRIFQEPLEKGQAGLKPKKVARRLARQQRRQIDRRARRQRHIAHLAPLLGLDPKQIPPHPGPGFSALRARAARERVELDDLLRVLLRLAKRRGYKGEFRTVKKDSEAGVVKTGSGKLAEAMAELARQRQVERVTLGEYLHFRHRELGLPTRMKLGREDVDDLYALRSMVEDEFEQIWQTQVQHHPVLNERHKGRPIKEHFRKAIFFQRPLKSPAPMVGNCPLEPNLPRAPRAQPAAQAFRVEKTLGDLRWGMGKRAIGLSPEQKAEIRRLLNDPDELRADGTVTFKKIYKALEDAGCPRPDTRGLNLDRSSREEIKGNTTLKVFQKLGLLTQWQALDERTQIQVINFLADLGSPEQLDSDDWHRHIRKANAKGYKREDMRRFSREMIDFIDQLRACDKFDRLSKMGFDGGRSAYSIKALKRLAGWMRSPEWATDPGDNPRIDEDAAARNCYPEHFEKTNLGPTLPAAPKTGNDVVDGALRELRRVVNQCIEQLRAPPDEIIIETARELGAGPERRNEWEKRAAANQKRRKQVAQKIGKAGAIPTGTKILRYQLWEEQEENCPYCERKIGLHEALDGAATHFEHILPRSLTQVGRKRSELVLAHRECNSAKGDRTPWQAWGDDPQRWVQIEGRARRFEELGKKCYRKDRPLAMAYFRKARLLILKDHAEEVMNDESIAGFADRQLHQSSWIAKAATTWVNSICANVFASRGEMTAGLRAAWRLETVIPEVRYEEGYRVFDTDGKPVSKEDFDRFHNQWEGRLLSEKADRTERRIDKRIDHRHHLIDALSIALTSRGLYQKMARRYIEETEAIRRGEKKRRDWRVEPPLRNVREVALELVHNCNLTHKPDRLPNGRFFKDTAYGAAHDKQSDQWRLTLRCWLSDLADSKNNEDRTRANLSTIVSPEVRQIVIEAFNLRIAEGKNPKQALTEPVAYPRYRTRIHKVRCFKKSGDKGFLKLDGATIITHYSRQGEHTKRVVHDGYACIDVYTEHGKLKKVCLLKIPEFLKQPRPGDAARYFKGDTVIDEKDGKRYIVNSFKAESNGMIFLASFFDTQPKSLRKVSGKGLLRLRLET

SEQ ID NO: 8257 - protein, 1032 aa, synthetic construct
  REGION 1..1032: note = Synthetic
MKYFLGLDIGATSIGWAVVHVDSNGNPKRIIDSGVRIFEAGVEGDLDSGKESSKATKRREARLARRQTHRRDVRRRATWRVLEKHGLLPKLPSSDGIQRDEAIKELDAKLKEKFVEAGNHQQVQVLPYLIRAAAVEQKLELEELGRAFYHLAQRRGYQSNRKADQIKKDDEDLGKVASGIATLQEKKGDRTLGQYFATVHPDDRKQEEERIRQQWTAREMFKEEFEKICDTQREHYPDLFTEEFVKELRVALFFQRPLKSQKGLVGRCAIYPEYRRCQLALPEAQEFRVLQQLNHLTYTLPQSTPQRLSGEQWQKLYHRLMTMGDCNFKDAKKLIGIKQNVPFNLQEGGEKRLVGNRTGSKMRNVFGDEWDKYPADRQDIIIRDVLNYQKHDKLVERAQEAFGLSQEKAEKLAGTSLEDGYSRHSRVALRELNEVMSREEHPAYSEARLIIDPEAFSSGDGLKSLPPLKKFSQDFGKEITNPAVTRALTEVRKVVNAIIEEHDKPWKIRIETAREIKQGKRSREVTADKMRKRQKEREAAKKRIFDDLGFEAKRGDIEKLLLYDECDGKCPYSGDVIGSMQRLFSGEFEVEHILPRKYLDDSFKNKTLCRSDLNKRKGNQIPFQAFGQDKQEWTDILGRVGAFKGEKEVVAEKLRRFRMQEPPDVDDFVERQLNDTRYNTTLACEYLALLFGGLWDEDNRIRRIEAVAGQITAKVRDALKVGKTRDVHTHHALDAVIVAITSPSYINKFSVENQYSRESGRVIRDLPYPCTNFKSELYAAIDNILVSHRPTRRISGPLHKETLYSPRKEDGKVRIRKPLAALSKADLQKGHIADPVLRAIITQKWEEAGKPDPAKFFSDEKNLPTMPSEQGNGPIIRKVRLALGDNPHPIGDKKHRQRHAILGSNHHVEFVAIHDADGEIKKYDMRVVSMLEAKNRVRDGRPVIGDGLAENESAVMSFCKNDMLWLDDVDGARRLFRVASFSEGDFNVRPHDEARLKKDIPKQKIIKDWRMRTAKAVMERTPEPAKVGTLGK

SEQ ID NO: 8258 - protein, 1028 aa, synthetic construct
  REGION 1..1028: note = Synthetic
MKYILGLDIGATSIGWAVVHVDSNGNPKRIIDTGVRIFEAGVEGDLDSGKESSKATKRREARLARRQTHRRDVRRRATWRVLEKHGLLPKLPSSDGIQRDEAIKELDAKLKEKFVEAGNHQQAQVLPYLIRAAAIVRKLELEELGRAFYHLAQRRGYQSNRKADQIKKDDEDLGKVASGIATLQEKKGDRTLGQYFATVHPDDRKNEEERIRQQWTAREMFVKEYEAICNKQREYYPDLFTDEFIRELRIALFFQRPLKSQKGLVGRCAIYPEYRRCQLALLEAQELRVLQQLNHIAVHVPQEPTRRLTPKEWSSLYYALMTDGDITFAAAKKLLELNKRGTKFNLEEGGEKRLVGDRTGSKMRDVFSEEWDELPAERQDLIIRDVLNYQKHDKLVERAQEAFGLSKEKAEKLAGTSLEDGYSRHSRVALRELNEVMSRQEHPAYSEARLIIDPEAFSADESASELPPLKEFSEKYGKEITNPAVTRALTEVRKVVNAIIREHGKPLKIRIETAREIKQSKKRREQDAARMRQRQKLREKAKAEILKEMKFEAKRGDIEKYLLAEECNWECPYTGERINIRSLLGSSPQFDVEHIYPRGYLDDSFANKTLCYHQENRHVKGDKLPYQAYGQQVEKWGQILGRVKKFKGEYADRKLQRFQVKEVPDDFVERQLNDTKYNTVLAAEYLGLLFGGLYDLEGIRRIETVAGQITAKVRDALKVGKTRDVHTHHALDAVIVAITSPSYINKFSVENQYSRESGRVIRDLPYPYTDFKSELYAAIDNILVSHRPTRRISGPLHKETLYSPRKEDGKVRIRKPLAALSKADLQKGHIADPVLRSVITQKWEAAGKPDPAKFFSDEKNLPNMPSEQGNGPIIRKVRLALGDNPHPIGDEQHRQRHAILGSNHHVEFVAIHDADGEIKKYDMRIVSMLEAKNRVRDGRPVIGDGLAENESVVMSFCKNDMLWLDDVDGTRVLCRLSKMSEGDLSVRPHYEARIEKEIPDQEKKRWRFRTAKAVMARNPEPAKIGILR

SEQ ID NO: 8259 - protein, 1105 aa, synthetic construct
  REGION 1..1105: note = Synthetic
MTEQIRYRIGIDVGLYSVGFAAVEVDDQGYPRRLLKAQVHQHDAGVDPLQGKTAKTRLAESGVARRVRRLIQRRRKRLAALDRMIVSQGWPLVSLENEPDAWLPWKVRARLVSEKIADQDELGRSLSIALRHMARHRGWRNPWTSVASLSATNEPSEFLINFRERVASVTGKDLPIDVTPAELVMIAKTGPSLKLRGEGGLIGGKLHQSDNANELRAVARRQGLSDDLFQTLLEAVFEAKSPRGASAKLVGKDVLPGRESEPRAAKSTLAFQRYRIAALIGNMRIEESSKAKRVLTVAERREVMDYLDTTDEQPSWADVAELLGISRRALKGVAQSDLEADLVATRPAVNVTDQTLRKIKIKSIKQWWENANDDEREALVRALSNSGVISEDSAPDLAATELIESLPEEDLAKLDGLHLPAGRAAYSERSLREITEQIMQSEDDLHAARKRLFGVDDKWRPPVEPIGERVGNPAVDRVLRIVARWLEAAEREWGAPESINVEHVREALGSVAAARDLVRQNEKRYEQRRREMAEIREKHSIDGEVRQSDVRRYQAVIRQNSQCLYCGTGIKLHTAEMDHIVPRAGTGSTNTRTNLVAVCRDCNADKSNTLFSVWAAKTKRPEVSLEGALQRVNAFLSESGVSARENKKFQSEVKRRLKATELDDPVDARSIESVAWMANQLHLRIAGHFHHAGTEVRVFRGQITAWARKASGIEGRIEFIGGRGKTRLDRRHHAVDAAVTAMMRHSVAQTLAERDSLRIEQWSTTDTGTWKQYRGGDPAAQVLFDRWRSQMEALVDLLNEALREDRIPITENLRLRLGSSAAHDDTIRKLDMRQVGDELSVAVIDRASTPALWCALTRHPDFSPTDGLPADPERRIRLQCEWLDSGEKIGFFSSDAAAASILVRGGSADIGNTIHHARVYRVSNGKRSFYAMLRVFQVDLVRHQSSDLFSVELPPQSISVRTSEPRLRTALAEDRAEYLGWLVEGDELLLDMSSQTKGQIGELLADYPGTVRWRVSGFPHISKLRLRPRLLAAEGLPDPIASTNDSDAEQTSSGTRMILAGQGWRPGVNVIFDSCDAVVIRRDTLGRVRLSSHAHLPASWSVRTD

SEQ ID NO: 8260 - protein, 1108 aa, synthetic construct
  REGION 1..1108: note = Synthetic
MSADVKPKFWVGIDVGTHSVGCAAIEIDDDGFPIQILNAKVQIHDSGVDPAKVKSATTRLASSGVARRTRRLVRRRRKRLQALDAALHEWGWFPTAESSDPHFPWRARARLADGFIGNTEERDLLLGVALRHMARHRGWRNPWVRVESLRVEQDPSEQFEAFRERVEDRATRSLDADATIGQLAVAAIDAKPHLPLRAGKTNKVRPSKDRAEKEFSYIGNKLLQSDNANELLHIARIQGIDAERTREMIQLVFAAESPRGAALALVGKDPLPGQRQLPRASKATDAFQRYRIVSVLANLRIVGANGERPLTVEERKAGFDYLINVKTTADPTWVDVAGALGIDRDKLRGTASPTADGERAAARPPVHVTDRTIRTSKVKTLKQWWPGSDQEAKNAVIAVLADGKFDEASAGGDDARELIESLTDEELTALDTINSPAGRAAYSVDSLNRLTRRMLTEELDVHGARMAEFGVAPDWAPPAEPIGAPVGNPAVDRVTKIVARWLRAGEAEWGAPDKIVIEHVRSAFASEEQARKLEYEMGKRYEQNLQHMRELAASENIGGVVRRSDLNRYQAITRQNGCCLYCGTGISFSTAEMDHIVPRAGIVSTNTRTNLVAVCSSCNRSKKEQLFPEWAESHPNPNISLDEALERTRHWLSGPGETTKDHRRFVSEVQARLKKTSKDPEFDGRSMESVAWMANELRLRIASHFKEAGTKVSVYRGAITAEARKASGLEGRIPFIGGGGKTRLDRRHHAVDAAVVSLLDESVARTLAERVNRRQSQQLTREADDWKTWTGSSPKAKERYQHWLTHMSVLADLLTEAMHNDDIPVMEDLRLRLANGSAHDDTIRPLVRRLVSDELQVELIDRASSPSLWVALTRDPDFDPKEGLPANPDRRIRINGTHLGPDDEIGFFGSGAAAIAVRGGYAEIGSTIHHARVYRIDGGKKPTFAMLRVFSTDLLAHRHGDLFTAPILPQSISMRTAPPKLRQAIADGNAVSLGWFVVGDELEIDMSGFKTGQVGEFLQEYGDVRRWKLDGFYSADKLRLRPALIASEGLPEHASDSTKKVVDRPGWLPALNVLGSSPHFATVRRDTLGRPRYGSDSGLPVSWQVEQE

SEQ ID NO: 8261 - protein, 1063 aa, synthetic construct
  REGION 1..1063: note = Synthetic
MGNYTLGLDIGSNSIGWTLVDIGEEPRLVDLGVRVFPEEGKGASVSKGGKTVRVSQRGKRGIDRRARNCRARRLQRRKELIRIMTLAGLLPQDSSKREAILKDASVDEKDRPLWAYKLRAEGLERMLTLFEFGRAIMHLAKRRGYQTNRKGGDPTEDKSVGQEAQELLLEIDQSDSGTLGRYLYRAATGEIKDVSGFVEGRIRNRRTFREMYKDEFDRLWEHQREYYRSVLIDELKGEIWNAIFYQRPPRYREPGPCDLDGQPRCLRACWTARQFVLWQKVNNFRIEAPYREPQTLSDVQRAILHGLLSTNAKVKFANLRKELELADGSTFNFEEGGKKKTTSGDEFLCDIRKQVGASVWDAMGEEKQKRLVDLLAQEDDETLITQVLTGDDYQLDAQKAKSLLKVYVPEGRSSLSEDALCKILPQVKDGKRTDEAIRLVYGTGAGAAGAVCDRLARVEAIENHVVMKAMCELREVVNALLNIYGKPKRIKVEMARDLNKSREEKDRISREIKKNTQRNDEVKERLRDLEREYGLRIPPKAASIVKYRLWTETNQTCIYCGRRIHPTKLFGDHSDCEVEHILPRKRSLQPYDYNNKTLCHVACNQLKDNCTPFEAYKDRPEEYRRLLKRVFASDMPKAKKLRFVRETLDLDDSVERNINDTRYVTRRALSYLQTLGADVFGTRGMATDLMRKESSFETLLEPMAIGKKHEDNRNHAVDAVVVALTTPDLLRDIARGYDRTGEFNLARSWAGMRKQLEERLPEVKVSYRPRYRISDYLHKEMAFGLTPEARQAFSEGRMEQLSKHAWISREKLPYIISKDVTDLIKTVGDVQANLPAEAGNIKEAILAEAARKGVDVHDANATIPWDEIDSDHDDELDSAPRKRAKLYLKSKDGRRIPVWKIRVREPHSNMLIVTNQEGEPYKGYVLENNHHIEVAEFTDPQGTRERRGTIVTQLEAARRWADRKPVVRTDYTAEGGQFLYSLARNEMFMVQFEDGTELLHRVEKISGSTIVLRPHTYGGVCKGSDQPPLVLRRGPNTLRGHKVLVDCIGRVRPVPSLAGSDTL

SEQ ID NO: 8262 - protein, 737 aa, synthetic construct
  REGION 1..737: note = Synthetic
VSFDTLRSELGLSDDVTFNFEEEGKKKNIGGDELLCDVRKAVGEKWWDRLKEEDREFIIDLIVKEEDDKRIIDSINGKYIAEDNKAQDLLKVHIPEGRAAFSEDALGKLLPYVKDGKRTDEAIDLAYPPENQITKDACDELPAIAPIENHVVMKAMCELSKLVNCILSKYGKPRDIKIEMGRDLNKSKGEKERISREIKKNTERNDRVREELKDLEREYNLQIPGRRENIVRYRLWKETGGTCVYCGTMIHPTRLFGMYPDCEVEHILPKKRSLQTKEYNNLTLCHVKCNHLKDNQMPFEAYADNPEVYQHLLNRVFKSDMPRAKKLRFIRKTLELEGSVKRFLNDARYITRQAQAHLRKLGVKVFGTKGIATALLREQAGFETLLESMAIGKKHEDNRNHCIDAVVVAMTTPDLLRDLARGWEPNPAFGLAEKWGSLRSQIAERLPRISVSYRPRHRISDFFHKATAYALTEEVKKVFKAGRVERVGERAWLCRDKLAYITTKDISDVVKTVGDIETEVPQSASNIKTAIRERLKGLNIDITNNDTEIPWGKMVSEEEKKDAGFAGDNTIRLLLNNRNGKKIPVRKIRIKEPHSYMVLMGGKNGEPYKAYPSENNHHIEIVEYGKNETRGVIVPQIEAARRWAEKQPIVQTKHDKGKFLYSLSRNDMFMVQFDDGKEILHRVEKMSESLIILRPHTYGGVCKDSDKEPLVLRKGPNTLKGYKVRVDRLGGIHHTND

SEQ ID NO: 8263 - protein, 1026 aa, synthetic construct
  REGION 1..1026: note = Synthetic
MSIETNGLVLGIDLGASSLGVALIDPVNARIVHTGVRIFEAGVNSLDTAKETPKNADRRAARQVRRQTERRQKRYKALFRILQDSGLLPAGKRLEALEALDKTLSTQYAEHTKLPYLLRFRALDEALTPHALGRALYHLGQRRGFLSNRKTDKKAEEEKERSRMLASIRTLGQTIEETGCRTLGEYIYRFVDPHQERIRQRFTDRAMYKKEFEAIWNAQAGFHPELLSEALRAALERTIFYQRPLKPQTDKVGYCDLEEGERRAPMALLEVQRFRMLTTVNNLRLVEKTGERRKLTPQEREIILAEAESGERLEIKKLKKQLGLKDASFSLEIGGEKSIPANATAAQMRKAMGPAWGKLTSERQTELVEYLVTSPADDETLARSLMKDFGFDERVAKALSEVKLPAGYFSISRKAVLKLMPLMESEEMLSFTEAKESEDGYGKPTPTEPLPLLRAAETGIRSLRNPAVMRALSELRKTVNALIREYGKPEAIHIELARDLRRSHEDRMQLQDAARKREAQRDAAAKDLASYYNCSPEDVKKRHGSAIEKYLLWEECNHKCPYSGEPISKTALFGETPQFQVEHIIPLSRSLDNSFNNKTLCSNAMNARKGNRTPWEAFHDDDFERMRKAVAEFKNPAKLSRFVLKEADRDALLEEFTTRQLNDTRYASKLAAQYLGTLYGGVWDEGRRQRIFTCAGQITAHLRRAWRLDSILNPVDWTKSRDDHRHHAVDAVAIALSSPAIVKRLSEAAERAGSERRLQIRDFDPPWSGFKEDVRQAILATQVSLRPAYKLLAQMHDETLYSKPWDGSDGKRYVTVRKPLDGGKFEIEDIVDPRIREIVRAKIEAAGTRKKLNDDPPLDAAGRPIRRVRVKIGVATDPTVVGEGPRARNVMPNSIHHSVILRDETQKGKACYRHESVSTIEAMRRHRLGLPIVNKEHGEHVAFVCTLRPGDVLEAVKAAGEPRQLWRVRSLNATGQFTLHLLCDARKKADIQAAKSVWKPVVNTAFLNGARKVTVTHLGAVVAAND

SEQ ID NO: 8264 - protein, 1157 aa, synthetic construct
  REGION 1..1157: note = Synthetic
MHYRLALDLGTASIGLVAYELNDQGEAIAIPYHAVRIFQEPLQAAKNQGVGEPKKAARRAARLARRQIDRKSRRLKRIAYCLPLLGLEPKDITPDSGQNIHRLRAEAATKRIELADLASVLLKMSKRRGYFGGFRPDKTEEPTDTNQKPKRGKNKGVVPKLEDNDSQDDKAEKDEKEKGIVKTGIGKLKEEMAKCGPDITLGQYLAYRFASKLSLKLASKYSEEKLYAHRDLLEAEFEKIWGTQAKHHLILNESRIDNNQSKPIKQIFHDVLFRQRPLKSPAAMVGRCPLEKDLPRAPMAQPAAQAFRIEKQLADLRWGMGSKAKPLSPEQKAIIRELLQNQQTVTFKSIYTALDKAGCPSEPGRGLNMDRISREELTGDKTRAAWRSANINLLHEWDALDRTTQVQVINILADLGSPEQISMDNWHTQFVKPVRDGKNAKGEWRYRNELRQFSPSFVGFINALRKCPGYDRLSKMGFESGRSAYSVKALEKLTRWIRESTAENPIDERKAIELAYPKYYAEKPPLTELPPPPLTGNTVVDVALHQVELEIRKAIKQLGSLPAEIIVELAREMALGVSRRNEIENENDKNNRARKKAAKELENEGLSASKTNIFRYRLWQEQEYYCPYCEKRMLSLSQVVDGHETHVDHILPRSLTQVGRKRDQLVLAHAACNHDKGDNTPWEAWGGNPPKCPERWRAVEAQVKRFREKRHFGKLAGKARLLELQDWTDNETVEGFSERQFQETAWIAKHTAQWLRSICPLGKVQVSRGELTAYLRRIWHLETVIPEVRFETSLPVFDTDGLRISQEDFFKHKPFWEGRKSEEDENRTDRRLDKRLDHRHHLIDALVIGLCTPKLYQTMAHEFKQRSIRRKHNKTEKVSLAIDPPLHDLRKKALELVRNCNLTHKHDRFPDGPLFKDTAYGIVEISQDGKKTRWHFDPEELFSEQNTSETERFLILRKRLESFGVNKNNKPLPVDKVRSALNEIASTEVREYVLRIVEQRLLEGKTAQAALREPIVHPIHKTIIKGVKTKRGIANKAYPIIHSSRSGKHYKFLPHQENSYVEVILSEGATKIRMVTPVDAMKEKGLKPSQGVMRFSKGDSVVDIRDQQRFVIRQILDNPSKRLALVPITDTRNADDMTTKEGKRFAKDHDILNFKLI

SEQ ID NO: 8265 - protein, 1350 aa, synthetic construct
  REGION 1..1350: note = Synthetic
MNARGKRNHWMHAVGTGELHMHAGKRLISLYPADKTRLDAKLGGGIAANANNERTNRRRHMRTLGLDLGTNSIGWAVVESVGRRVSLVDKGVYLFPKGVGENKSGEYSLATQRTGYRSARRLIMRRRWRKQATLETLVKHDLCPGLTVQDVKDWKQDRHKYPASEAFKQWLNIKTETPDGKPAGPYYCRWRCATEQLNLSLPEDRYCLGRAIYHLAQRRGYKSNRISGEEKDGAVNAEISKLDVARGSKTLGQYFYEECLGKEPVRGSQHYTSRAQYEQEFTIICTKQALPADLTETLRYNLFMQRPLRSQKGTVGKCLFEPTKARAADSHPLTERFRQLQIVNNIRVACPGETEMRALKRAERENALAWLQKQSATVNFDKLARVLTPRKVSLIFGSNEKCAEIDLGAWRFNYRGDSGLPGSPFTARMIKLFGEEWRFELHRRYLKTGSKTEAQVVDDIWHAIFSFDDEQKLKAFGVEQLGLVEEQAALFAKRLAGGYGRLSLAAMRRIIPFLEKGAIYSHAVFMAKLPDILKRKGIDWKQIEGDVEQAIRSVLDSHEQSAWSERAANSLIKTYRENHEDPAHLMITEATKLRFMDEIEAAARLEAGAARWGDLAADLRKGIIEKTAADVLHWASRREGFVAVKRLDERVKDMLIERFDLQPKDIEGLYHPSEVESYKAAEKDHDGVLQLGSPRIDSIRNPVFMRAMFQLRKLVNTMLREGIIDSDTRVRIEMARELNTANMRAAIERDQRERQRERDRIRSEIASLPCAPAMVTDRDILKYMLWEEQDRRCLYTGATIEVSAFLGDNPAYDIEHTMPRSRRLDNSRANLTLCDRDFNRKVKRNRLPAELPQAEEIQQRVGLLWDDKIEALQKSIERRRSSSRSAQDKETKDRVRRSLHYEQIQLSYLKTKRRLFFLNDVPEGFTNSQIVDTRVICKYAMEFLKTAFPKVYSVKAGAVHAVKEIWGLDEKFRGDHVHHAIDAIVTACLSPSWYAELAAYYHEYERYLYSEAKRPEVPQPWPGFDRDLNEQISRELLVVHYTRDNLLKQTKKVVRRRGKIVRENGKPRYAMGDSARGSLHQDTIYAKIKDPSEQKNGESGSLKAVVRRTLDKNFKEKDLRNIVDKQIQAKVMAQKEKLKKGETIWFDESNRIPIRKVRCYASNKANSLIELNAHRDQSAHEHKQRRYAANDGNYITALYRGMIKGKLKPDWKVANNFDAIQARKTGDWETILPEIDENGLTRRHILKKNTLVIFKRTEDEDLTSLSQMELSRRLYRVTVLERERIKAMHHRCGQPDKEIEDTSSKIDFEGSAPSNLVRLSVNTIHIAVAGADFTLDPMGHIHWQKVEEDA

SEQ ID NO: 8266 - protein, 1063 aa, synthetic construct
  REGION 1..1063: note = Synthetic
MKYRLGIDLGTTSLGWCVLKLDKGSPIDIVDMGIRIFDDGRDAKSKEPLAVTRRTARSIRRRLERYKRRRQNLMNALIKAGLMPKDILERKNLEKLDPYALRTRGLDEKLALFEFGRAIFQLNQRRGFKSNRKSDKKMKETGPIKEGIKNLRSQLESTKARTLGEYLFQINLNMPPEEQHLKQPIRIKHNIPEWNVYPERSMYEDEFNKLWESQSRFHTQLTDSLRAKLQHIIFYQRPLKPQIIGLCTFEAGEKRAPLAHPLTQKFRIFQEVANLELTGFSDTGLHLTPEQKNHIADMLCRRTDLFTKDGKFAFSKIRRELKLPKDSRFNLETESRTGLQGDHTAYTLAKDDCFGEAWFRLKDIDQNAIVEKLLSEENDKELVQWLKDHCQLEEQNVLTIADVILDDGYGHVSLKAIQNILPHLRSGMTYSNACKAAGYHHSDHRPDEILSSLPYYGEAMPKAVIGGSFNPAEKQLPEKYFGKINNPTVHIALNQLRKFINSLIATYGAPEEIVVELARELKLGQKRLDEVNKTIRDNTARNEKIATRLQELSVPNSYENRMRYRLWEDLSLVPTQRCCPFSGKIISQQDVFSPEFEIEHILPFSRTFDDGASNKVLSSRQANRDKGNRSPFEAFGTSPTGYDWEAIQARAQRLPPNKHWRFEPSAMEKFEKDDGFIARQLTDTQYMARVAKEYLQFICNADKVWGIPGQLTALLRTKWGVNLDHALGAEENIKNRDDHRHHAIDAFVVACITRNNLELISQASNNPERRDRLVTKMPPPYDGFEDQGRVRLTRLLEGIIVSHKPDHKDAPAAISKHAAVVGLHNDTVYRIEKKPELFIDAPVPKGKVLISVKKPLVQLNYKKIKDIADRRIRKELEQLLSKAEDGNAKQSIIQSYADELNIRRIKILEMVSETSIVNVNAGSPKPARFMAPGGNYCAEIYGINKGPRAGKWGVEVITNFQAHDVTFIPTWHRENPTAKLIMRLFINDMVAWDENGSRVIKRVRKMNQDGRLFFEDHNVAFTEEDTSPASVKQLQERNTRKISVDILGKIKDPGKAPTCPLLK

SEQ ID NO: 8267 - protein, 1238 aa, synthetic construct
  REGION 1..1238: note = Synthetic
MEYILGIDIGTASVGIAAYELDNDKDNKTTKKLLHLDSYIFKEPTEHGQSGYALKNQTRRERRMARRQTQRTQKRYKKIYLFCKQHGFYGKDGTDDCQQDVITLRAKAVSEKIPLDGLAKVLLHMAKNRGYYGDFKRATDGTVAKSIQKVEAEIQNKGVKTLGQLWYKRREDAKQERKAWRNIEKTGTYTSRKMTEEEFNLILQEQQKHHPILNDNIKIVNPCIFHDLYKAGESVPMADVLAHILLYQRPLKWDTETIGKCPFHEDELRVSRASPIFQAFRLEQTLANLRYKELNSKNEDKQKASSWQHFSAEQLHALRLLLNQQKEASWSKVYATLKLDDKEVKINFDRRPSEDKPLSGNVTNYNMKTLKLTDKWEALNEQDKELAMAIVANISDPEALILPEMVDCENLEELVLEGSEKYSLPIANLEQVMTFIQAIANHKKLGTVTQMGFTAGRASYGHTTLKELIALMQDGLAPDEATEALRKKYNKSVKQDAHLELLDPLAQYLQGDDLRNPVVKKSLEEFRVSFNHAIRKCNKQGGKLTRVVIEMSRDMKQSISDRSEDEREMGKRRAMNQRILKELEKHGRALVGKTDILRYRLYTEQWHQCAYCGKKFGLNEIFGYNAEIDHIIPRSKGGTNRQFNLALVCRECNQKKTNLTPFQAYESHIFSDSQWASIMSLAKSWIPDDKHTQLEEDKYKAKKGKNYDNQMRAILLVSKKIPEERTNTFNDSQNQETAWVGRIVRDWVGTVCEDVRVTRGSITAHLRQIWGVDQILPELRRQEGKPLLNEDKGLITEQEYKAFISKRDEVTKQELETRHYLHKFDKRCDQRHHAIDAAVIAQSTTSILQRATDHRKKYDSLWKTTLYFPASYYNAHKDEYKAYREDYFTSKAGKQWVKIKVEKFNPGKPHNNFVLNLKQALLHYTVWSKPDRFASGSFFQENPSGYRTFNDEPALTQRITLRDLYDKCCKMKAKQKDIESDQDITENHLKVFFHYIIGDNLRTYLIGKVKERLNEGMSFQEALLGKGVSLEENTDGTDEDKIESFLPDGRQDGIYFPENTQNRLHKLYYWQGNYNPIQHKSVIYGEKEKQRAIWVANNYAALKANVETKSWKFISQADFEQEVYQYESPNKDSKQKRVYKGGTFKQNEIIFFKSQMIFHTESKQFYIITGLNRAHNYIEAILTNEDYSAFSKAIAQTGYVHTKNKRAGVTFTKSVIPILIPVHSREDMVRIKKEYGIA

SEQ ID NO: 8268 - protein, 1269 aa, synthetic construct
  REGION 1..1269: note = Synthetic
MINKKILGIDIGTTSIGWAIVEAKTEKPVKYNEYFEDDLPETRTDTNNDRTGIHIGKNGLPAVGVRIISQEGKMLSRFNEGKKLNEKTNETPTAQRRRIRAGRKLKSRYKLRRDKLCAVLEILGMLPDASYRKVKNKNGKEMWKAIEAKDIDGNNGKWYTKKREYEVDEIGKKKKKRKNEEGIITGIGEDLYKLRNNAAIDPLEDRRDWGRILLHLNQWRGYSSDRYSSNEDDEQTDDGFYTSLVVDDVVDIKKIYKDKLNKKLDKIQYQIKFENGDIGIDVVKVGESSFYSKFKKGEVATYKKVEDENDKSIIYITWQNLKKEAWAYRKWLINDSIEKYIQSKRGTVGSYFYNNFFNQEYIKTIPEENRLKRIRHNVVNRNWYEDEFETIWKIQFEKHKANFTKELVNKCIDASFTKDESVKKELRKIGNPELQLKALIRDKIIYYQRPWQQAKNKGECRFEKIPDIKKDEDGKIIPHRDGKIHYKGRTVIPRSHPLHQEYKIWQQINNVRIWFHPKDEKQIDLFENSEVCSKLLGKTPIEIKELLYERLQDRKEQSWRTFVNEIFNIEVKLKKEGEKKKPTETEYYSINYIKISKKGEEQDNLLKGNKTKKQIDDVLNINDKSWYLETAKKGKDRHKPDRTNKDGKTISSLNYKTREYTVSNLQLLWECIYDLTGYKAGNDSANIEMIKNRIRNHFSADIISAPQCLSLAKIKFDDAGMGQLSAKAIRNLLPLMAVGKYAEQYPMTEKADKKIKSLIELNQQEQNETNDDLKLYSLKEFITDKSARIKLSSKMSEEEFKGLNYWEAAAVVYGNHSKAGITNIPSEEIANRIKNLQPVPFGKMNNPIVEKIVNETLKLVQLIYLTYGGFDEVRIELSRELKNSIDDREAIWDAMKKNNERNDWAKKMLREMFNEEESEKVDVSLSNGNIDKIKIIEEVVANRKGKEHEEKRKKVITEPTKADILKYRLWLQQEFRCPYTDEPIPFSDVFSKQLRVQIEHIIPRKRYPDNSFSNKVLTWTEVNSAKAENGNRTAYEFIISKRDDNDSIQIPNREQPVRLIPAKQWEEKVKEMFKGRKAKNLLRRSIPEDPINRELKDTQYINKKIREKIGEAIGMDKVWTTTGQITDMLRNAWHLNDKVMKELIRERYEKFQVNFGSGSTPLEANTIFDNTVWNKETQKAEIRKEFPSFSKRLDHRHHALDAIIIACTKQQHIQLLNTLNAQFELTELEHEDEKEIAQKKKYKALQSLLYEYVKDETGKPRKKYFTPWK

SEQ ID NO: 8269 - protein, 1408 aa, synthetic construct
  REGION 1..1408: note = Synthetic
VKSLKSFAKLRIKKKLTKKIFDMEQKTLGIDLGTNSLGLSLRNIDNGGDIIDQLVYYSSTVFKSGAKGELSYAAERTKYRSSRRLYQARRYRIWATLKLLIKYDCCPLKKEELERWSRYDKTKGLKREYPVDANLFEQWVRLDFDGDGIADYSSPYQLRAELMERQLDWDSQSDRYKFGRAMYHIAQRRGFKSNKNDTLKDAAEEEDFSNIDMNAVMEKSEEKKMKGIDDYMKKNNLLTVGCAFAKLEKEGIRVRNHPEYQAVQSQYIDEIKRICQYQKIDSTKPDLFRRLISKDKDVGTVFYRRGPRKQTGNIGKCILEPSKRRCPISHPDYEEFRALSFINNIKYRTSPDDDWKSLSIDERTQLFNSRFCLLRNSFKFVEIKKWIEDNVVNGTHLDYTTHTINYRDYTTVAGCPIIGRLKNILGNEWKSNTIETVRERVNAKTGEVHTINYGYEDLWHLCFSYDDSETMEEFAQKRMGLAGKQVKEMSQMWKNMRDGYTTLSIKAIRNILPFLREGLIYSDAVSLAKIPDIIGKELWNSKKEVILTAIYDLNNTTAHTRLVYNLANILISNYKSLSFDEQFAYKDTEYELSDIDHKDIIKCCKDVFGEGRWEKKSNTEQEALINEVSTLYQHFFATSKRDYYKLPKTSDTLKVFLSTIFPDIDSNEWNKLYQHSQTNPFPQGKPKLGTPNIGSIKNPVALRALYILRNTINTMLAKGIIDEDTRIVVETARDLNDSNWRLAIDRYQEERKKENTAIANRILEYCTDYTDSDIEKGRLLFEQGIIPQSNKEERNRAEPFALNLQKYKLWKDQDFRCIYTGKPISLSTLLNNQSRVVDIEHTIPRSISFDDSLSNKTLCYTYANQEKGNRLPSELPNYNDILIRIQPWIDRLDHIRSQIELWRGKARSAPTIERKNECLQQMHQWELDCDYWQAKVKTFTIQKEDLDIGFRNSQLIDTRIITKYAFHYLKSVFNRVDVEKGNVTSTFRKILGVQSVYEKKDRNKHSHHAIDATILTLIPPAARRDKMMELFYKIEESPYSEKDTLIKNLQKEIHNCHIGSVNGLIDSIEDNILVNHISKDQTLTPAKRKRRINGHIKEGQYQKGDCIRGNLHDMTFYGAILSPENETSIVVRKTLASGGILQLKEGDIPNIVDPKVRDTIEKHWKKEKQEGVSFQKAMEKKIYLLDKNGEPITSDRNGRPISHIRHVRCYTSIKNPIAIKKQTYESKKSHKQYYLAVNGENVYMAIYWDGVMGTKLDYEVRTLYEIAKTKGNIEIKFLEDLFEKTKNSIPLFAIVRRWTRVIVFDKNEVDKDFEAIKIMTERFLDMNNEELRKRLYVVNNFENDGRITLIHNNEARPSDKLGKGKALIDVNNPNPKDRVSVKSRYMLIEGYHFSIDNMGVIHFNKIAP

SEQ ID NO: 8270 - protein, 1408 aa, synthetic construct
  REGION 1..1408: note = Synthetic
MEQKILGIDLGTNSLGLAIRDIENGRNIVDQLDFYTSIIFQSGVGKDKSGEFSYAARRTKFRSSRRLYQARKYRIWATLRLLIANDCCPLTNEQLDKWAKYDKALGLKRQYPIDATEFEQWVRLDFNCDGQPEYSSPYQLRAELMNKPLDWNNQTDRFKFGRAMYHIAQRRGFKSSKGETLKESSENEDVNSIELGEAMKKSEEKKSKTLNEYMESNSLPTAGCAFAMLERQGIRVRGSEFQAVQSQLLSEVDQICKYQHIDQIAPDLYCRLISTKQGEGTIFFRRPLRSQKGLIGKCTLEPKLRRCPVSHPDYEEFRALSFINNIKFRAKNTDDWQALNNDDRVSIFNELFTRAKATFKFEDIRKWIEKHYTLGELNYNEKTINYSDLTTVAGCPVISRLKKILGEKWNTTTITTNRTRINLNTGEIHPVDYNYVDIWHLAFSSDDYEELAEFSKKQMGFDEQQTGHLTRLWSAIQDGYASLSLKAIRNILPFLQQGMIYSEAVAFAKIPEILGKERWEKERDNIISSLREKTIENEYTKTVYNITNTLIANYNSRTLDEQQAYRNTGYIIDDIDRAEIMQCIIETLNERRWKALSDERRTALQKDTETLYQQFFASTKRDYYKLPRQTDTFRQCLSEMFPDIKSQQWLRLYHHSQIDLFPKQKSVPVTTDDGRIMQICQLGKPDIGSIKNPVVLRALYVLRQSINHLLKEGMIDEYTRVVVETARDLNDANWRKAIERYQKEREKENEAIANIIKEVRPNYTEDDIEKGRLLFEQIETKGGDNEDYNIVAKSTRKEKEKAKSFALDMQKYKLYKEQNFRCLYTGTIISLSDLFADNKVDIEHTIPRSISFDNSLSNRTVCMAHFNRKEKGNRIPTELSNYAEILTRIRPWLEHVEHIKTQIELWRGKARTAATIDRKNECIQQRHQWELELEYWQAKVRTFTIQKDKLDIGFRNSQLVDTRIITKYAFHYLKSVFARVDVQKGSVTSDFRKILNVQSLDEKKDRSRHSHHAVDAAILTMIPVAAQRDRMIELFYKIDENPIESERVALQHKLEKEIAACNIGTVNGLIETIEHNILVNHVSKDQTLTPAKKPRRIGQRKIEGQWLTGDSIRGSLHKDTYYGAIKTADETCVLVVRKPISSLSEKDLASIIDPAVRKAIEEQVRHRMAEQNISFTKAIEQPIYMLNRNGQPATHDCNGRALSPIRHVRCLAKAGLGYLKIATALKIKQQTYKSKHSHKNTYYVQNDDNYLCLFYEGISKGKQRKEYRLINYFDIAQLKIHDASVLFNEPEFNCFEGSPLMPLKSILKKGCRVLLYNNFKEELYDLDHDTISQRLYVVYKFNAIGTPNLYLRHHLEARKESDCSIEEKGTAFDAHRPLSYLSLKASNFKAIVEHYDFEIDPVGNIIFI

SEQ ID NO: 8271 - protein, 1408 aa, synthetic construct
  REGION 1..1408: note = Synthetic
MEQKILGIDLGTNSLGLAIRDIENGRNIVDQLDFYTSIIFQSGVGKDKSGEFSYAARRTKFRSSRRLYQARKYRIWATLRLLIANDCCPLTNEQLDKWAKYDKALGLKRQYPIDATEFEQWVRLDFNCDGQPEYSSPYQLRAELMNKPLDWNNQTDRFKFGRAMYHIAQRRGFKSSKGETLKESSENEDVNSIELGEAMKKSEEKKSKTLNEYMESNSLPTAGCAFAMLERQGIRVRGSEFQAVQSQLHSEVDQICKYQHIDQIAPDLYCRLISTKQGEGTIFFRRPLRSQKGLIGKCTLEPKLRRCPVSHPDYEEFRALSFINNIKFRAKNTDDWQALNNDDRVSIFNELFTRAKATFKFEDIRKWIEKHYTLGELNYKEKTINYSDLTTVAGCPVISRLKKILGEKWNTTTITTSRTRINLNTGEIHPVDYNYVDIWHLAFSSDDYEELAEFSKKQMGFDEQQTGHLTRLWSAIQDGYASLSLKAIRNILPFLQQGMIYSEAVAFAKIPEILGKERWEKERDNIISSLREKTIENEYTKTVYNITNTLIANYNSRTLDEQQAYRNTGYIIDDIDRAEIMQCIIETLNERRWKALSDERRTVLQKDTETLYQQFFASTKRDYYKLPRQTDAFRQCLSEMFPDIKSQQWLRLYHHSQIDLFPKQKPVPVTTDDGRIMQICQLGKPDIGSIKNPVVLRALYVLRQSINHLLKEGMIDEYTRVVVETARDLNDANWRKAIERYQKEREKENEAIANIIKEVRPNYTEDDIEKGRLLFEQIETKGGDNEDYNIVAKSTRKEKEKAKSFALDMQKYKLYKEQNFRCLYTGTIISLSDLFADNKVDIEHTIPRSISFDNSLSNRTVCMAHFNRKEKGNRIPTELSNYAEILTRIRPWLEHVEHIKTQIELWRGKARTAATIDRKNECIQQRHQWELELEYWQAKVRTFTIQKDELDIGFRNSQLVDTRIITKYAFHYLKSVFARVDVQKGSVTSDFRKILNVQSLDEKKDRSRHSHHAVDAAILTMIPVAAQRDRMIELFYKIDENPIDSERNALQHKLEKEIAACNIGTVNGLIETIEHNILVNHVSKDQTLTPAKKPRRIGQRKIKGQWLTGDSIRGKINDATFLGAIKKTDSNLELVVRKPIKTLTEQNLDSIVDKKLRDQIETQVRYWMVNEGISFAKALEKNIYMLDKDGRAITHDKNGRHLSPIRHIRCKTSINDPITLKKQTYLSTKKHKQYYYTNNGENTYLAIYWDGIMGSNRSFEIRTLFDIANFREIKKKALSPLDCFPPQKDNIKLFGIIRPGSKVIVFDKNELKNGEQITNIINKLYDAGKTALYNRLYTIRSFEKNGTTILTFHNEARNDKELGRGSSKISISSPNPKDRVSIIARYILIEGYHFNIDSIGNIHFIKQL

SEQ ID NO: 8272 - protein, 1405 aa, synthetic construct
  REGION 1..1405: note = Synthetic
VKSSKSDAKIRIKIELRKNYFKMEQKILGIDLGTNSLGIALRNIDNGGNIANQLDYYSSIIFNSGVGKDTKGEYSYAAERTKYRSTRRLYQSRKYRIWATLKLLIAHDCCPLTAENLERWSKYDKTKRLKREYPVDATLFEQWVRLDFDGDGIADYSSPYQLRAELMERQLDWDSQSDRYKFGRVMYHIAQRRGFKSSKGETLKDAGDNEDLSTIEVESAMKKSEEKKSKGIAEFMKEHNLETVGCAFAKLEKDGIRVRNHPEYQAVQSQYREEVDKICRHQHIDALSPELYRGLVSTKKGEGTIFYRRPLRSQKGNIGKCTLEPTKRRCPVSHPDYEEYRALTFINNIKYRISPNEEWKNLTGTERKQLFDTLFCRAKGTFKFADIRTWIEKSHNGIHLDYNSRTINYRDYTTVAGCPIISRLRKLLGEEWRTKEIVTERERVNNKSGAIHKVSYNYEDLWHLCFTCDDYEDLYEFVQTRFGFDETQAKEMTRMWSSMQDGYTTLSLKAIRNILPFLREGLIYSDAVPLAKIPDIIGNERWERNKGNVLSAIETLKDNSSRTRLVYNLTNTVISNYKALSFEDQFAYKNTDYTLTDVDRKDILQCCIDYFGEKRWGQMSSTKQTALQDEIAKLYQQFFASSKREYYKLPKMSDTLKEYLARLLPDINKDEWDKIYHHSQISLFPQSQPKLGTPDIGSIKNPVVLRALHVLRKAINALLAEGMVDEDTRIVVETAREMNDANWRRAIERYQKEREKENAAIAEIIREFRPNYTDSDIDKGRLLFEQNIIAETNRDAKQKAERFALDLQKYKLWKEQNFQCLYTGKHISIADLFDDSVVDIEHTIPRSLSFDDSLSNKTVCFAHFNRYTKNNQIPSELSNYNEILRRIKPWEDKLEHIMSQIELWKGKARTAPTIERKNECLQQKHQWELERDYWRAKINTFTIQKDEMDLGFRNSQLVDTRIITKYAFHYLKSVFNHVDVEKGNVTSAFRKILGVQSADEKKDRSKHSHHAIDAAILTVVPTAAKRDKMMELYYKLEDAPEFEKENLRIELQKEVRDCRIGSVNGLLETIERNILVNHISKDQTLAPSHKRRRINGHIVEGQWQTGDSVRGSLHKDTFYGAIKSPTGDLYMVKRTPIKTMSEKDIETIVDERLKEMIRTQLKHKMEEEGLSASKAMESEFYMLDINGSPITQDRNGRPIAPLRHVRCYAKAGRGFLKIDTALPIKKQTYPSKQDYKNTYYAQNDDNYLCLFYEGMVKGKVQRSFRLVNYLDVAKLNLKNEKTLFHEPEFAHYEGNHSMPLRAILKKGTRVLLFANTPDEIPDLDNDALSQRLYVVRKFNVITSVYVYMHQHIDARKETEFSTEEKGTEFNSQKIYPYIKCTAPNFKALIEHYDFEINPLGKINFK

SEQ ID NO: 8273 - protein, 1386 aa, synthetic construct
  REGION 1..1386: note = Synthetic
MIQKTLGIDLGTSSLGLAVRNTDLGGNIIDQLEYYGSIIFKSGVGNGKTGEYSYAAERTKYRSTRRLYQARKYRIWATLRLLIAHGCCPLTDEQLDRWAKYDKAKGLKRQYPVDVTEFEQWVRLDFDCDGKPEYSSPYQLRAELTKHQLDWSNQTDRYKFGRAMYHIAQRRGFKSSKGETLKDANENDDASSIDIGAEMKKSEEKKLKNLNKYMDFHQLPTIGCAFYQMEREGIRVRDNSEYQAVQLQYQQEVKHICEFQHIDTIAPALYTGLISTKQGEGTIFYRRPLRSQKGNVGKCTLEPTCRRCPQSHPDFEEFRALSFINNIKYRTDPTGEWVSLTDSERMELFEKLFAHSKATFKFEDIRKWLEDKHSGLRFNYDSRTINYRDHTTVAGCPVISRLRKILGAEWRTTTISTSKTRVNRKTGEVHTVSYNYEDLWHLAYSSDDYEQLSEFAKVQMHLDDKQTGELTRMWSAIQEGYTSLSLKAIRNILPLLRQGLIYSEAVALAKIPDIIGHDRWANVKDTLLLEYTHLTEQTNRTRLVYNIANTLIANYKSRTIDEQQGFKDTHYTLDETDLKDVNNCIINSLSEKRWNGMTVGDQQRLQQDIEQLYQQFFASSKRDYYKIPRSGDTLKQHLATLFPDIPAQDWDKLYHHSQIDKFPQQRDSNNNLMLGTPDIGAIKNPVALRALHVLRHAVNGLLQKGIIDESTRVVVETAREMNDANWRWAIESYQKARENENKAIAEIIKEFRPNYTDDDIEKGRLLFEQNIVQATSRQGKAKAESFALDMQKYKLWKEQKFQCLYSGKYINVKDLFDNNVTQIEHTVPRSISFDNSLTNKTVCLTHANREKSNRIPSELPHYDEILNRIKPWQEYLEHTKAQIELWKSKSRTATTIERKNTCIRQKHLWELERDYWQAKVRTFTIQKDELDQGFLNSQLVDTRIITKYAFHYLKSVFSRVDVEKGSVTADFRKILGIQSADEKKDRSKHSHHAIDAAVLTMIPVAAQRDRMIELFYQCEEVSGWEKDLLRDKLNKEIAACHIGRINGLVETIESNILVNHVTKDQTLSPAKKPRYINNKRKVGQWNQGDCIRGQINEATFLGAIKTADSSIAMVVRKPLKSLTENNLITIVDQRLRSQIERQVHKWMEEENIPFAKAIEKDIYMLDKDGNQITHDKNGRAISPIRHVRCKTANAEPITLKKQTYLSRAKHKQYYYTVNGENAYAAIYWDGIIGNPKTFEIRTLLDITEIIGTTHSITPQDCFPATKDNIKLYGIIRPGCRVLIFDKNELKKGESIDDLIIKLHDTEIYTLKNRLYIVRSFEKNGKTVLVFHNEARNDNELGRGSSMIDLSSPNPKDRVSIKTRYMLIEGFHFNIDNIGKLKFITHK

SEQ ID NO: 8274 - protein, 1383 aa, synthetic construct
  REGION 1..1383: note = Synthetic
MSQKILGIDLGTSSLGIAVRDTDLGKNIAEQLEYYTSIIFPSGVGTDKSGEYSYAAKRTKFRSTRRLYQSRKYRIWATLRLLIEHGCCPLKVEELDRWARYDKEKGLKRQYPIDAEVFEQWVRLDFNCDGMPEYKSPYQLRKELMEHELDWSKPTDRYKFGRAMYHIAQRRGFKSSKGETLKESKENADVDTIDISGEMKKSEEKTSHKLSEYMTEHNLPTAGCAFARLEQEGVRVRNSEYKAVQSQYRDEVDKICKYQHIDEIAPELHRSLISTKKGEGTIFYRRPLRSQKGLVGKCTLEPTHRRCPISHPDFEEFRALSFINNIKYRLSAEEEWKTLTADERQELFESLFTRANATFKFEDIRKWLEKKFQSSHLDYNNRTINYRDHTTVAGCPVISRLKKILGDNWRSSTIVTEKSRTNFHTGEVHNVSYNYTDIWHLAYCSDDFEELAEFSEKQMRLTKEQCSQMTRLWSSIQEGYASLSQKAIHNILPFLRKGIIYSEAVAFAKIPDIIGHNRWEQQGNDIMEGLRHHMQENEYRRMIYGITNTLIANYKTRVLDEQESRHNTDYILNDTDKAEIRSCIIETLSASRWNNLCQQEKANLQQNVEHLYQQFFASSEKEYLKLPRQSDAMKSYMMEQFPDIDKKLWDTLYHHSQIDMFPHGKEMTEEVDGRIMHYFQLGKPDIGAIKNPVALRALHVLRRAINELLKHGIIDETTRVVVETAREMNDANWRKAIEMYQKAREKENDAIIDIIKEFRPNYTDADIEKGRLLFEQNIVPQATRTQREKAEKFALDMQKYKLWQEQKFQCLYTGKFISLSDLFADNTVDIEHTIPRSISFDDSLANRTVCDAHFNRSEKGNHIPSELSNYEDIKDRIKPWEEKVIHIKSQIELWKGKAKTAATMERKNECLQQKHLWELEKNYWETKLNTFTVQKDDLDLGFRNSQLVDTRIITKYAFHYLKSVFSRVDVQKGSITANFRKILRIQSADEKKDRQKHSHHAIDAAVLTMIPPAAQRDRMLELFYQLQEADNMEKGAIQLRLEKEVNSCSIGTITGLVDSIEQNILVNHISKDQTLTPAKKPRRNGKHIIKGQWLQGDSIRGSLHKDTFYGAIDNDGAKRMVVRKQLKDLGEKDIQSIVSKAVADAIETQVKQYMANEGISFTKALEKDFFMLDKDGRPISHDKNGRPLLPIRHVRCYAKAGRGELGYDTVLKIKQQTYQSKHEYKNLYYVQNDDNYLCLYYEGYAKGKFQRAFRLVNYFDIAQLQPQSVSELVSEPEFATYEKNARMPLTAIIKKGARVLLYKNIPEEVRDLDKEKLSKRLYVVYKFNVIGTPYIYLRHHLEARKETDCDTKDSFLSLKASNFKALIEHYDFEVDVLGNIYFK

SEQ ID NO: 8275 - protein, 1419 aa, synthetic construct
  REGION 1..1419: note = Synthetic
MGHKTVGIDLGTNSLGIAVRDTDLGKDIFDQLEFYTSIIFKSGVGKSDKGEYSYASERTLYRSRRRLYQSRKYRIWATLRLLIKHGCCPLTIEELEQWSKYDKAKGQKRQYPIDATQFEQWVRLDFNNDGIPEYSSPYQLRAEMIERQLDWEDETDRYKFGRAMYHIAQRRGFKSSKGETLKDAKDDEDSSTFDVSNAMKKSEEKKSKGLKEYMDAHGLKTVGSAFYKLEQEGIRIRNSEYQAVQSQNLNEVKEICQYQHLDQINEELFNGLISTKKGEGTIFYRRPLCSQKGNIGSCTLERGRRRCPVSHPDYEEFRALSFINNIKFKLDENDTWQSLSGDKRAKLLNKVFVRANATFKFEDITKWLSTEYPGHEFSYKKRTINYNDYTTVAGCPIIYRLTKILGDDWRTQIISTDKTRKVHVKSKKPHDIISEHSISYNYEDIWHLCFSSDDYETLAEFAEVRMGFCAEKIGQIKRLWSIMQDGYASLSLKAIRNILPLLREGMIYSEAVSLAKVSDILGSEKWNLKRTDIIEGVREESCKNEYVRTIYHIANTLISDYKSRTIDEKQGYRNTSYILDQQDKERIRKCIIDTISAKRWMQKSKEEQDSIYNDIETLFQDFFASTRRDYYVIPRQTERLKEYFVSIFPEIPEEKWDNLYHHSQISLFQKQQPSIMEDGDRLLHIFQLGSPNIGSIKNPVAMRALHVVRRTINELLAKGMIDETTRIVVETARDMNDANWRKAIERYQKEREKENDIITDIIKEFRPNYSESDIEKGRLLFEQIESGNTKDEKAAKYAKATQAEKAKAEKFALDLEKYKLWKEQKFRCLYTGTYISIKNLFDENMVDIEHTIPRSISFDDSLANKTICNAHYNRTIKINRIPSELDEYESILDRIKPWMEKVEHIKSQIENWKKNARTATTIERKNECIQQKHQWEMELNYWQAKVNSFKIQKDELDQGFRNRQLVDTRIITKYAFHYLKSVFERVDVQKGSVTSTFRKILGVQSVDEKKDREKHSHHAIDAAVLTMIPTSVQRDRMIELFYQRQEADELEKDAIQQKLLKEISSCRLGTINGMVSTIEQNILINHITKDQTLSPAKKLRRIGKVKIKGQWMQGDSIRGSLHQEQFYGAIKDKEEGQRLVIRKPINRIGEKDLGSIVDPQVRLSIETQVKKRMEEQKISFAKAIEQEMYLLDKDGQPITKGKNGKAILPIRHVRCYAKAGRGYLNVDTALQIKQQTYPSKYEYKNTYYAQNEDNYLCLYYEGIAKGKQSKAFKLINYFDIAQLHIRNIDTMLCEPEFAFYEGNENMPLKAVIKKGTRVLFYVNYPDEINDLDKNKLSERLFVVYKFNIMRTPTLYLRHHLEARKDKDCDSSETATDFSLGKKISYLTLKANNLKALIEHYDFEIDALGNIDFSKKEAHR

SEQ ID NO: 8276 - protein, 1389 aa, synthetic construct
  REGION 1..1389: note = Synthetic
VKSSKSDAKIQRNNGLRKKTFNMEQKILGIDLGTNSLGIALRNTDNGGDIVNQLDYYSSIIFNSGVGKDTKGEYSYAAERTRYRSIRRLYQSRKYRIWATLKLLISHGCCPMSEESLERWSRYDKKKGLKREYPIDDTLFEQWVRLDFDGDGIADYSSPYQLRAELMERQLNWESQSDRYKFGRAMYHIAQRRGFKSSKGETLKYAGDNEDLSTIEVEAAMKKSEEKKSKGIDEYMKEHGLETVGCAFAKLEKEGVRVRNHPEYQAVQSRYREEIDKICRKQHIDTLVPELFHGLMSTKKGEGTIFYRRPLRSQKGNIGKCTLEPTKRRCPVSHPDYEEYRALTLINNIKYRISPEDEWRTLTDNEREQIFADLFCRAKGTFKFADICMWIEKSHNGVHLDFDNDTINYRDYATVAGCPIISRLKKILGEEWRTKEIVTKRERVNNKSGEIHVVSYNYEDLWHLCFTSDDYEELYEFVQTHLGFNETQAKEMTRMWSSMQDGYTTLSLKAIRNILPFLRKGMIYSEAVSLAKIPDIIGKENWAEKRAEILSAINDLNKNNAHTRLVYNLANTVISNYKALSFEDQFAYKNTDYVLTEADRKDILQCCKGYFGEKKWCGMSGTEQTALQDEISKLYQQFFASSKREYYKLPKTSDSLKDYLSSLFPDINKEEWDKLYHHSQTSLFPQAQPKLGTPDIGSIKNPVVLRALHVLRKAINAMIDKGKIDEDTRIVVETAREMNDANWRRAIERYQKEREKENAAIAEIIREFRPNYTDSDIEKGRLLFEQNIIEGTSRDAKLKAERFALDLQKYKLWKEQNFQCLYTGKHINVSDLFNDSVVDIEHTIPRSLSFDDSLSNKTVCYAHFNRYTKNNQIPSELSNYNDILQRIQPWRDKLEHIMSQIELWKGKARTAPTVERKNECLQQKHQWELERDYWRAKINTFTIQKDDMDLGFRHSQLVDTRIITKYAFHYLKSVFNRVDVEKGNVTATFRKILGVQSVDEKKDRSKHSHHAVDAAILTLVPTAAKRDKMMELYYKIEDAPDSEKESLRTALQQEVRDCRIGSVNGLLETIERNILVNHISKDQTLAPSHKRRHINGHIVDGQWQAGDSIRGSLHKDTFYGAIKSSTGDLYMVKRTPIKTMTEKDIETIVDERLKEMIRIQLKHKMESEGLSASKAMESEFYMLDKNGNPITHDCNGRPIAPLRHVRCYAKAGGGFLKIDTALPIKKQTYPSKQEYKNTYYAQNDNNYLCLFYEGMVKGKVQRSFRLVNYLDVAKINLKNDKALFHEPEFAFYKGNNSMPLRAIIKRGTRVLLYNNYPEEVHDLEKDQISNRLFVVVKFNLHGSTPSVFIKSHIDASSESKPLELRADKLNALIEHYDFEIDSLGKINFK

SEQ ID NO: 8277 - protein, 1413 aa, synthetic construct
  REGION 1..1413: note = Synthetic
MAQKIMGIDLGTNSIGLALRDPDKSTDISDQLVYFTSIVFPKGVGNGQSGEFSYAAERRRFRSTRRLYQARKYRIWATLELLINHQCCPLTIDDLDRWRKYDKTKGLKRQYPIDAIPFEQWVRLDFNGDGIPDYRSPYQLREELTLKPIDWDSQIDRYKFGRAMYHIAQRRGFKSSKGETLKDSKESEDLSNIEISASMKKSEEKKSKSLKDYMESHNLKTVGCAFAQLEREGIRVRNSIYQAVQSQYLDEVREICLFQHIDTIDHSLFTGLTSTKAKEGTIFYRRPLRSQKGAVGKCVLEPFIRRCPTSHPDYEEFRALSFINNIKFRCNDQEEWKSLSPSERANLYNDCFTRTKPTFRFEEIRKWLEKSYPGNQFSYDNHTINYRDYTTVAGCPVICRLKKIMGDDWRTHIFTTNRTRTNYHTGEAHSIAYNYEDIWHLAYSSDDYEALAEFARETIGFDQKQADELTRLWSVIREGYASLSLKAIRNILPFLREGMIYSKAVALAKIPDILGRDCWEEHRDAIMARLDTIATENDYDRCVLSITNSLISNYKSRTIDNQQAHRNTAYKLDSSDKKDVKNCIIDTLSTRRWNNMTHSEQNNLQHDVEDLYQQFFSSTKREYYTIPRQSDKLKESLIKQFPEIPSKKWDKLYHHSMIDLFPSQKCQNKNTGDIVMNIKQLGTPDIGSIKKPVALRALHVLRKSINQLLLSGMIDDKTRIVVESARDLNDANWRKAIERYQKERDRENSAITEIIKEFRPNYSAEDIEKGRLLFEQIETGTINKEGNNSLTSSSHMGKVKATKFATDMQKYKLWKEQKFRCLYTGKYISLTSLFDDNKVDIEHTIPRSISFDNSLSNRTLCDSHFNRYSKSNRIPTELSNYADIKERIKPWEENVSHIKSQIELWKGYAKTAPTVERKNECIQQRHMWELELNYWQAKLRTFTVMKDDLDLGFRNSQLVDTRIITKYAFHYLKSVFNRVDVQKGSVTADFRKILGIQSVDEKKDREKHSHHAVDAAVLTMIPVAAKRDRMIELFYKSQEAPDSEKGSYLHQLKEEIKTCNVGNISKLVDTIEKNILVNHISKDQTLSQAKKPRYSGKKRIKDQWLQGDSIRGSLHKETFYGAIQNNNTVRLVVRKEPRSLGIKNNKRIKDYDEQRINLIVDKKIRVDIAYQVKYYMQEENLTFADALEKDFYCLDKNMKAIKLDKNGRPISHIRHVRCFATSGQGELQYDTALCIKTQTYPSRCKYKNNYYVQNDDNYLCLYYNNEEKEHKAFRLISYYDVAQLHIRNVNALFLEPEFATLKKGNRKHGATEDIRLKAIIKKGTRILLYSNYPEEVRDYDKEKLSNNLYVVYKFNYINKPYIYIYLKHHLEAREEKKTHKEENSYLRFTANKFKALIEHVDFEVDPLGNITFK

SEQ ID NO: 8278 - protein, 1394 aa, synthetic construct
  REGION 1..1394: note = Synthetic
MEQKILGIDLGTSSLGIAVRNVDLGRNISEQLEYYGSIIFKSGVGNGKSGEYSFAAERTKYRSTRRLYQSRKYRIWATLKLLIAYGCCPLKSEDLDKWSKYDKGNNLKRRYPVDAKEFEQWVRLDFNCDGIPEYSSPYQLRAELMKHKLDWDNQTDRFKFGRAMYHIAQRRGFKSSKGETLKEAGEKDDIVSIDIKSEMKKSEESKSRMLKEYMANNHLETVGCAFARLEKEGIRIRNSEYQAVQSLYIDEINKICIFQQIDKKLPQLFNCLISTKKGEGTIFYRRPLRTQKHNVGKCTLEPTRDRVSVSNPEYEEFRALSFINNIRYRASSDDDWSSLDNEQRNRLFDSIFTRSKATFKFEDIRKWLEKEHKNQHFSYEEHTINYRDTTSVAGCPVISRLKKILGEDWRNASLDTNRNRINNITGEIHKVSYNYEDVWHLAYTSEDYEELAEFASKRMHLDDKQVDELTRLWSVVQDGYTSLSLKAVRNITPFLREGMVYSDAVALAKIPDIIGFKRWEENKADILLNYKQIQLDNNYLRMVYRVTNTLISNYKSKVLDEQQAFKNTQYKIDDIDRKEVMKCIIESISKKRWMELQANEQNRLRESVEFLYQQFFSSSKREYFKIPLVSDGLKRYLYIKFPDVQQEKWDKLYHHSQINKFTLQSPQQLLCDGHMMYVFQLGTPNIGAIKNPVALRALYILRNTINELLAKGIIDENTRVVVETARDMNDANWRWAIENYQKARNEENRAIAEVIKEFRPQYNDADIEKGRLLFEQNIVELDSPQQKTKAERFTIDFQKYKLWQEQRFICIYSGKTINVSDLFDDNIIQIEHTIPRSISFDDSLSNKTVCFTYANREKNNRIPAELSNYADIQDRIQHWKEKVEHIKSQIEIWKGKSRIATTVDRKNQCIRQKHLYELELDYWQAKLQTFTVQKDELEFGFRHRQLVDTRIITKYAYHYLKSVFSRVDVQKGSVTAGFRKILGIQSADEKKNRNKHSHHAVDAAVLTMIPVASQRDRMIELFYRYEEACDSEKNTLRLLMDKEIQSCRLGTINNIVDIIENNILVNHIYKDQTLSVAKKTRFVCGKRIVGQWNKGDSIRGSLHKDTFYGAIKTSDDEYLMVVRKPLKSLTEKDLDCIVDAKLRKCIEKQIYDYIEKEQLSFAKAIEKDIYMLSKEGQQIKRDKNGRPISPIRHVRCKAKAGRGLLKIDTTIKIKQQTYKSKKCYKNNYYVQNDDNYLCLYYEGTLQGKYKRCFRLINYFDVAQLNLNSTDSLYEEPEFKFFEGNKMMPLKAIIKKGTRVIPYIHYPEEVKEMDSDRLNKRLFVVYKFNEMGTPNIYLVNHIESRKENDCDSSERATEFSTQANISYLSLKADKFKALIENVDFEIDPIGNIVFK

SEQ ID NO: 8279 - protein, 1428 aa, synthetic construct
  REGION 1..1428: note = Synthetic
MEPTQSAGSQKSSAYSLIVKSLKRCCKNTKKIRNSTNMNQKILGIDLGTSSLGLALRDLNNGTDLFQQLEYFSSIIFQSGIGTGKSGEFSFASERRKYRSQRRLHQARRYRIWATLELLIEHGCCPLTIEGLDHWRKYDKNSEKKREYPINNTRFEQWVRLDFDGDGKPEYSSPYQLRAELVNRNLDWDIQTDRYKFGRAMYHIAQRRGFKSSKGETLSSASENEDLTSIDISTAMKKSEEKKSKDIKLFMETNNLKTVGCAFALLEKNGTRIRNSQYQAVQSLYITEVNEICKIQKIDTIDPQLYSKLISTKKGDGTIFYRRPLQSQKRLVGRCTLETTKHRCPISHPDFEEFRALSFINNIKFRLDSTEPWRTFSSDERHKLFSDCFTRSKSTFKFEDIRKWIEKEYPGHSFSYLGHTINFQDDTTVPGCPIIHRLKKILDNDWHSQKISTEKKRTVYRTRKTHIIEYNYEDLWHLAYTSDDYEQLAEHAETVMKLSPKKVGEVTHLWSSIQEGYTTLSLKAIRNILPFLKEGTIYSKAVILAKIPEIIGTIRWNENRTTIIKEIEIISNTNAYKRCVFGIANTLIANYFSEHKLDSNDKNNIIKCTIDTISEKKWNGLSQADQTKLISDVGELYQRFFSSPKKDYYKTPRLIDVIKDAMTNMFPDIANDSWNKLYHPSQISIFPHQKPIITNDGNCVMEVFQLSSPDLGSIKNPVVLRSLHVLRNSINQLLLKGMINEDTRIVVETARDMNDANWRKAIERYQREREKENEAIITIIKEFRPNYSQTDIEKGRLLFEQIENGYSYNKPSITINTSYIEKEQAMRFAIDMQKYKLWKEQKFRCIYTGNIISLSDLFADNIVDIEHTIPRSISFDNSLKNRTVCNAHYNRTIKGNHIPTELADYNNIKDRIKPWEDKVRHIKSQIELWKGNAKSAPTIERKNECLQQKHMWELELDYWQSKVRTFTIEKDELALGFRNSQLVDTRIITKYAFHYLKTVFSHVDVQKGSITADFRKIIGIQSSSEKKDRSKHSHHAIDAAILTAIPSAARRDHMIELYYQLTETSESEKKNSIKKALNDEIQSCHIGNVSNLVNNIEQKILVNHISKDQTLTPSKRQFRIHNKRYWKQGDSIRGSLHQESFYGAISDQQDNLRLVIRKPLKDLTEKDLNTIVDPALQKAIISQVHQVMTEQNVTFAKAIETPIYMTNKKGEPTKYDKHGNPISPIRHIRCFAKAGRGELKYDTVLKIKQQTYTSKQNYKNVYYAQNDDNYLCLLYEGTIKGSVQRAFRLINYFDIAQLRIHDPNTLFLEPEFATLKKKDNKKPEVIHDYKTMPLRAIIKKGTRVLLYKNHPEEAKDYDNEKMNSHLYIVYKFNIMGTPNIYLRHHLEARKEKECDNPNSYLSLKADNFKALIEHVDFQIDPLGNIYFN

SEQ ID NO: 8280 - protein, 1119 aa, synthetic construct
  REGION 1..1119: note = Synthetic
VECSSRAFGSGSFLYLGGHLMSTRYVVGIDVGSYSLGCAAIEVDEAGNPLQLLNTVSFIHDSGVDPDSNKTANTRLAVSGVARRTRRLYRRRKHRTIKLEKFLKAQNWTTRPFEEYSDPYFPWKARVALVNSFIADGAQRGEYLSVALRHIANHRGWRNPYHTTASLYSPGEASDAFNEIRENLSEKTGRPIPSDATVGQLISFAQFGHHRLRGGGKDKDKKHPDQAKQAVISARLQQSDHAREINEICRVQKIDDTLRKKIIDLVFAAESPKGAQQGRTGKDPLNPTQMRAAKASDSFQRYRVSALIGNLRIKESTGKTRRLTAEERALVFDHLINLPAKKDPSWLDVAAILSVDRGRLRGTATLTDDGERAGARPPVHDTNRVISRCRVKPLVTWWATADAAHRAEMVKALSNSEVINFDSKEGAAVQAFFAELDDEQHEKLDSLHLPIGRAAYSEDTLTRLTARMQSENMDLYEARRAEFGVSEDWAPPKPRIGEPVGNPAVDRVLKGIARWIEAAEAEWGAPQSIVIEHVRDGFSSENVAREITRENDRRHKRNLQLFAEMQEKLNIDGAVRRSDLWRYQSLQRQNEQCAYCGAPITYSNSEMDHIVPRAGQGSTNVRENLVAVCHRCNLAKKNIPFAVWAETCPIPGVSLTEALERTKFWLPEPGQKKSDFNAFRSAVCERLKRTHDDEPLDSRSIESVAWMANEVRGRVAQHFHEADTSVRVYRGALTAEARKASGIHKRLRFIDGPGKSRLDRRHHAVDAAIIAFTTPYVAQTLAERANKRQAAFIENAPDQWKEYTGADDSHRAAWNSWVPKVRKLAHMLQAALDEDRIVVTSNLRLRLGNGRAHEDTIGALKKIRVGGEISATDIDRASSEALWCALTREPDFDPKEGLPANPNRRIRVHGSWFNADDEIEVFPVGAGCIKVRGGYAELSRFHHARIYKITSGKKPSYAMLRVYNVDLLRHRHEDLFAVEIKPQTISARQAEPKLRKALAEGSAEYLGWLVVDDEFVIDTSSFTTGQIAGLQEVFGTVSRWRLDGFYGEGRLRLRPLLMSAEGIGSDAPKEARVIIEGRGWTPSVNTVFGKGQPTVIRRDSLGRVRLSSAAHLPVSWKVR

SEQ ID NO: 8281 - protein, 1119 aa, synthetic construct
  REGION 1..1119: note = Synthetic
LILSKHQLVSDDDCSNRCAHCVRRFFNLIGVVMAASSTRYVVGIDVGNFSVGMAAIKVDDDGMPQEILSAVSHIHDSGLDPDNIKSAITRLAVSGVARRTRRLFRRRRRRLIRLDAFIQSKGWGLPQNDESDDPYLPWRVRAELASRPIPTEEELGAKLSIAIRHIARHRGWRNPYSRVSSLMADVPPSDAFKAIQEEFSKILGRSLADDTTLGQMVAACNLTNTKLRGEGGAISARLQQSDLAREIRKICSMQEIDENTVREIIEYVFVAESPKGANAARAGKDPLQPGEPRALKATDAFQQYRIAALIGNLRIREGRERRELSLDERRLVFDYLVHLKPKVEPDWSAVADTLKIDRGDLLGTATTTDDGERAGARPPVHETNRRILTCSVKPLVKWWQEAGDAERRAMLMALGNGSVEDYDSAEGAKVQAFFTDLSDEDMEKLDKLQLPVGRAAYSEDTLTKLTKAMLSGGIDLYTARRQVFGISEDWAPPAPEIGEPVGNPAVDRVLKVVARWLRAAENAWGVPESINIEHVRAGFMSESKSRELDRDNERRAKRNLELFTQMQQKFGQDIEPSRADLWRYQSVQRQNGQCCYCGTTITYQNCEMDHIVPRAGRGSTNTRDNLVAVCHDCNLSKGNIPFAVWAAKSTKPGVSVAEAQERLRHWVCDPGLKTPQFKRFVKSVNDRLSRKTIDEELDARSIESVAWMANELRGRIAHKYQDIKVRVFRGQLTAEARNASGISKKIAFIDGPGKSRLDRRHHAVDAAVIALMSAKVAETLAIRSNLKFDQELRKDAPQWKEFSGSTDAHKIIWSKWRSRMTALAGLLQTALDEDRIVVMSNLRLRLGNGTAHEATIGKLKKLKVGDPISAVDVDRASTEALWCALTRHPDFDSNEGLPADPDRTIRVQGRHLSADDAIEVFPIGAGSIAVRGGYAELGSSFHHARIYKIVGGKKPVFSMMRVYTVDLLKYENEDLFAVELKPQTMTIRQCEPKLRKALAAGQAEYLGWLVVDDELLLDTTEISTNQLTSVQSVFGKISRWRVDGFYDVSRLRLRPIQMSAEGISDEMPAELKKILDTPGWRPSVNKLFDLGKVTVIRRDALGRVRLSSNAHLPITWAVG

SEQ ID NO: 8282 - protein, 1116 aa, synthetic construct
  REGION 1..1116: note = Synthetic
MLRRGLLTQVPAFYYLKGVAMTTADVRVSADKKHYLVGIDVGSYSVGLSAVEVDEDRNPVGLLSAVSYIHDAGVDPTARKEAATRRAVSGVARRTRRLYRRKRKRLVNLDRFIEKCGWPVVDNEAFDDPLLPWRARMALAEGFIEDDKQRALYLSIAMRHIARHRGWRNPYTKVQSLHSPQEHSDAFKAIREDVEKELGRPLPENATVAQVIGQLMVAGRRLRGEGGVISARLQQVDHALEINTICAKQRIPDDLRKQLMDMVFAAESPKGAASGRVGKDPLSGRCRAGKASDAFQRYRIAALTANLRIRQGGDKRRLTQVEMALVNDLLVNAKGAKQPTWVDVAEVLGIDRGQLLGTATMLDDGERAGATPPVHATNLMMASVRIAPLKNWWLEADQPARDAMIKALSLAEADDFDSQEGAQVQALFSSLTDEEHEKLDGLHLPAGRAAYSEDTLRKLTEHILAHGSDLYEARRAVFGVSEDWAPPAPDIAEPTGNPAVDRVLKIVNRWLSAAEAEWGAPLSVNIEHGRDAFVSELKSREIDRDIQRRTRRNYDLLKTMQEELGIDSKPSRADLWRYQSVQRQNGQCAYCGSPITYSNCEMDHIVPRAGQGSTNKRENLVATCARCNRSKLNIPFAVWAERSTIPGVSVKEAIDRTKMWLPDSGMRAADFRSFVKQVQDRFRRTTLDEPIDNRSAESVSWMANELRARIAQHFSSEDDQADTKVRVFRGEITARARAASGIQRDLNMIGGKGKQRLDRRHHAVDASVIALMQATVAQVLVERNDLKHEQALRRQAPQWKEYEGADEGTRFQFRQWKRRMHSLLRILNQALDEDRIVVMSNLRLRLGNSQVHEAQIGKLAAKKVGDAFSVVEIDRASSEALWCALTRDPDYDPKEGLPENPERTLRVHGTHLSANDEVHIFPVGAAAIAIRGGYAELGASFHHARIYRINGKKPSYGMVRVYSVDLQKFRQQDLFSVELKPQTVSMRYADPKVRKAIAEGNAEYLGWLVPDDELLLDASSFTGQVADTQAALGPIKRWRLDGLFSSSKLRLRPLQLAAEGLASDSEDYLKKTLDMPGWRPAVNKLLSVGRVTVVRRNALGRPRLESVANLPVTKSF

SEQ ID NO: 8283 - protein, 1108 aa, synthetic construct
  REGION 1..1108: note = Synthetic
MLQPTDLPPSAFFFTKGFALNSANVNYRVGIDVGSYSLGMAAIAIDDDGKPTEILSAISLIHDSGVDPDSAKSAATRLATSGVARRTRRLYRRKRKRLAKLDKFISSQGWQLKEFEEYKDPFYPWRVRAELATTTITDQQELGEKLSIALRHIARHRGWRNPYSKVTALYTVTEPSDAFLAMQEECAKKLGRSIPKTITVGQLVASMNLGKTRLRGENSLLAARPRQSDNANEIHTIAKVQGLSNDLVKQIIDHVFAAESPKGSTAERVGKDPLQPTKKRALKASDAFQRYRIAALIGNLRIRGGKGNRRLTAEETRLVFDYLRSLPAKQEPTWQLVAEQLRIDRGNLVGTAIMTDDGERAGAKPPVHDTNRIMESTKIKPLAAWWKSADTDARAAMVKALSNAEVDDFDSQAGAQVQEFFFGISDEDQEKLDGLHLPIGRAAYSEDTLVRLTKRMIDKGMDLYEARQAEFKIPNDWAPPAPEIGERVGNPAVDRVLKATARWLNAAERQWGAPKSVNIEHVRAAFMSESSARELDRDNQQRAKRNVKVVAEMQEKLGIEGRPSRADVWRFQSIQRQNGKCAYCGAQISFKNSEMDHIVPQAGEGSTNTRDNLVAVCRECNSSKSNIAFAVWAENTSRPGISVQNAVEQTRHWVTDSGLRKPEFDKFRKQVCDRLRRKATDEPIDARSLESVAWMANELRSRIAQKFKDGDTKVRVYKGALTAEARRASGISGKLEFVDGKGKSRLDRRHHAIDAAVVAFTSNYVAETLALRSNMKFDQELRRKAPQWREFTGSDHVHQVEWTKWKYRMQALAELLNNALAQDRIVVMHNLRLRLGNGAAHEDTIGKLTRLKVGDAISTTDIDRASSEALWCALTRDPDYDPKTGLPENPNRTIRIHGTHLTASDEITVFPVTAASIPIRDGFAKLGGNYHHVRLFRVPSGKKYKYCLMQVYTVDLLKFRKEDLFTVELKPQTISVRTCEALLRKALANGTAEYLGWLISDDELLIDTSSFDTPGIVKLREEYGPVNRWRLAGLTSVTRLNLRPLYLSKEGLKPNVNPEIKKIIDNRSWIITVNKLFSSGHVKIIRRDALGRPRLHSAAHLPICWEVK

SEQ ID NO: 8284 - protein, 1108 aa, synthetic construct
  REGION 1..1108: note = Synthetic
MLQPTDLPPSAFFFTKGFALTSATVNYRVGIDVGSYSIGMAAIAIDDDGKPTEILSAISLIHDSGVDPDSTKSATTRLATSGIARRTRRLYRRKRKRLAKLDKFISSQGWPLKEFEEYEDPFYPWRVRAELATTAIADQQELGEKLSIALRHIARHRGWRNPYSKVTALYAVAEPSDALVSIQEQCAAELGRPIPPTTTVGQLVASMNLGKTRLRGEDSLLAARPRQSDNANEIHAIAKVQGLSNELVKQIIDHVFAAESPKGSAAERVGKDPLQPTKKRALKASDAFQRYRIAALIGNLRIRGGKENRRLTTEETRLVFDYLRSLPAKQEPTWQLVAEQLKIDRGNLVGTAIMTDDGERAGARPPVHETNRLMESTKIKPLATWWKSADADARAAMVKALSNAEVDDFDSQAGAQVQEFFFGISDEEQEKLDGLHLPIGRAAYSEDTLDRLTKRMIGEGMDLYEARQAEFKIPNDWAPPAPEIGERVGNPAVDRVLKATARWLNAAERQWGAPKSVNIEHVRAAFMSESSARELDRDNQQRAKRNVKVVAEMQEKLGIEGRPSRADVWRFQSVERQNCQCAYCGTQISYMNSEMDHIVPQAGEGSTNTRDNLVAVCRECNSSKSNIAFAVWAENTSRPGVSVKEAVERTRHWVTDSGLRKPEFDKFRKQVCDRLRRKATDEPIDARSLESVAWMANELRSRIAQKFKDGDTKVRVYKGALTAEARRASGISGKLEFVDGKGKSRLDRRHHAVDAAVVAFMSHYVAETLALRSNMKFDQELRRKAPQWREFTGSDHVHQVEWTKWKYRMQALAELLNCALTQDRIVVMHNLRLRLGNGAAHEDTIGKLTRLKVGDAISTTDIDRASSEALWCALTRDPDFDPKTGLPENPNRMIRIHGTHLAASDEITVFPVVAASIPIRDGFAKLGSNYHHVRLFRVPSGKKYKYCLMQVYTVDLLKFRKEDLFTVELKPQTISVRTCEAPLRKALANGTAEYLGWLVSDDELFVNISSFDTPGIVKLQEAYGLVNRWRLAGFNSNTQMVLRPLYLSKEGLKPDVDPEIKKIIDNRGWFVTVNKLFSTGHVTVVRRDALGQPRLYSAAHLPICWEVK

SEQ ID NO: 8285 - protein, 1106 aa, synthetic construct
  REGION 1..1106: note = Synthetic
MQVQKRYTVGLDVGSYSLGMAAIELNENGNPVSILSAVSHIHDAGLDPDQVKNATTRLAQSGLMRRTRRLYRERRRRSRKLHEFLVEQQWKTLPFESYADPYHPWRVRTMLVDSYVEDDVERGELLSIALRHIFNHRGWRNPYTRVQSLYNVAEPSENFEQIRNDLEGRYGVPIDRDITVAQLVSVAEFGKDRLRGAVKSKKNGNAKGAPENEVKEAVLSHRLQQSDNAREICRICQVQRIDDDLYKKIIDLVFDAKSPKGAQQERTGKDPFFPKEYRALKASDAFQRYRIASIIGNLRIREDDSNVPLDHDQRQQLFNFLVNHTGNNLPTWQDVAEELGIDRGLLRGTAAVTEDGERANSRPPIHETNRALTNCKVKPLASWWKSEDWPAREALVKALSNATKADFASPAGLKVEQFLRSVDDELLTEIDKLKLPIGRAAYGETTLIRLTNTMLENDLDLRGALEAEFNIPKNWSPPKPPINEPVGNPAVDRVLREAHRWIEAAVSQWGEPESVVVEDTRAGFTSEATRREIERGIEKRTKRNLALADQMRLELGIDGPIRRSDLWRYQSIQRQNAQCAYCGNPITFSASEMDHIVPRAGAGSTNVRENLVATCARCNRAKSNRPFANWARTCGIPGVSVDEAVERTRHWVRDSAMKTGEFKQFVKDVTDRFRRTEYDAPLDARSIESVGWMSIELRSRIMQRFPNARVDLYTGKTTSQARGASGITKHLEFIGGTGKSRLDRRHHAIDAAVIAMMRPYVAETLAIRNNIKFGEFLEHGGSDNRRWKEFIGEDQAHRQSWQRWMQAMHALLPLLQEALDQDRIPVTRNLRLRLGNGAVHKAEIHSLETVSLSTALTVEQIDRAATEALWCALTRHPDFDPKDGLSEDPQRQITVNGKLIKSDDQIELFPVQAASIRVRGGYAQLEKIHHVRFYRVPGKVKPKYFMLRVFVHDLVNFGGRDLFSVELAPQTQSVRHSRKILREALVDGTAEYLGWVVTGDELHLNPTVLPKSVTPLLEEFGHLHRWTIDGFPDERRIRLRSRLLSGEGAENLPEECRKVLTGRGVLTSVNALLAQGELMVVRRDALGRVRLGSRANLPVSWRLDRQ

SEQ ID NO: 8286 - protein, 1104 aa, synthetic construct
  REGION 1..1104: note = Synthetic
MDPRRYVVGIDVGSYSIGFAAVELDDQDQPTELLSIVSHLHDSGLDPDQQKTATTRLASSGVARRTRRRYRRIKKRIRRLETFLNDQGWKTLPNEYYEDPYFPWKARIELAKQRVADPARQGELLSVAIRHIAHHRGWRNPYQRVQSLYSPQGTSDAFKEIKAGIEKAKNVKLPDDATVAQLIAVADFGEDRIRGGGKNKDKKKEPEQVKSALISARLQQCDHALEINKIFEVQGLDDALRKKVIDLVFEAESPKGAQVGRVGKDPLQPNKYRALKASDAFQRYRIAALLGNLRIRENNESKPLNPNQFKVLFDYLVSLPAKTEPEWILVAEQLDIDRGQLQGTATITDDGERAGARPPVHDTNRIIEGSKAKELAKWWKAAPQEHRDAMLKALSNADNIDLDSPEGAVVQAFFVSVSEEEHEKLDSLHLPFGRAAYSEDTLRRLTKRMVSEGVDLYTARRQEFGIPEDWAPPAQPVGEPVGNPAVDRVLKEVARWLDAAADEWGAPQSVVIEHVRDGFSSESVAREIDRENNKRAKRNNELFKELNDKLGTTGKRSRADLWRYQSVQRQNSQCAYCGSPITFQNCEMDHIVPQKGEGSTNTRDNLVAVCHRCNLSKSNAVFSVWAKQCNIPGVSLKEAIDRTRHWNHDPGQSSKDAKKFTQKVIERLRRTTQDEPLDARSIESVAWMANELRSRIAFRFQDTDTKVNVYRGAITAQARMAAGISDNLRFVDGTGKSRFDRRHHAVDAAVVSLLTPYVAQTLALRSNMKRESELKRTPPQWKEFTGSDAAHRAAWARWQPRMHKLGQLLQDALTNDRIPVKTNLRLRIGNGRAHEDSIGALATLKVSSAIPVEVIDRAASEALWCALTREPDFDWKDGLPANPERSIRVNGTHFGPDDEVEFFPVAAGAIKVRGGYAEISRFHHARIYRIDGGKKPAFAMLRVYSHDAAKFRNEDVFTAELTQQTISMRQAEPKLRKALREGTATYLGWIVTDDELHINPHPFNSGQVGNFQQEIGPTTRWRVDGFYSNSRFRLRPLQLSAEGLKDKNGVLKYHADVAKVVDSRGWITAVNVLWGAGDVVVVRRDALGRVRLRSAAHLPITWKA

SEQ ID NO: 8287 - protein, 1100 aa, synthetic construct
  REGION 1..1100: note = Synthetic
MVSLKYRVGIDVGTFSVGLAAIEVDEKDMPVKILSAVSHIHDSGLDPDQQQDAVTRLASSGIARRTRRLYRRKRRRLVQLDKFIEGLGWPVKEFEEYSDPFMPWHARAELAAGFIEDEAERNEKLSIAMRHIARHRGWRNPYSKVSTLHTEVAPSEAFLAIKEEIAKVAGIKIPDDITVGQLVAFCNLGKHRLRGKGGVLSSRLLQSDHANEIIVIGRMQNLDSSLVKQLINEVFKAESPKGSAAGRTGVDPLQPSKKRALKATEEFQRYRIASLIGNLRIREGSGQRRLTKEETSLVFDHLINLKPKSEPSWLAVCEILGIDRGNLRGTATMTDDGERAGAAPPVHETTRRILNCKVKPLVAWWMEANAEDRYAMIKALANSEVDDFDSQSGAKVQAFFAELSDEDNLKLDSLHLPMGRAAYCEDTLARITKRILENGEDLYEARLHEFQTPVDWTPPAPEIGAPVGNPAVDRVLKAVSRWLETAVDTWGVPTHITIEHVRDAFTSERKSREIDRDQQRRAKRNYEVFAEMEKTLGVQNRNRSDLTRYLAVQRQNGQCAYCGTPISYQGEGKDNFEMDHIVPQAGPGSTNKRENLVAVCPSCNRSKGNVPFAVWAAKSTNPNISVKAAVERTRHWLADPGLNATQFAKFRKAVCDRLSRVSIDEEIDARSIESVAWMANELRGRIAQRFAKDGTKVAVYRGELTAKARGASGISKRLVFLDGYGKTRFDRRHHAVDAAVITFITPTIATILAQRDSMRDSQNLLREPAQWKEFTGLEEKDRFMWTRWKIQMEKLSVLLNEALANDRIVVMSNLRLRLGNGSAHEDTIGKLTKLHVGDALSVAMIDRAASEALWCALTRHPDFDPKEGLPADPSRQIRIHGTRLGATDEIGFFPVNAGCIALNGGYVELGSSFHHARIYKITSGKKPVYAMMRVYTVDLLPYRNQDLFTAEIKPQSMTMRQCEPKLRKAIAEGNAEYLGWLVVDDELLIDPTPFSDGQVGNAQQELGPIRRWRIDGFPLNSKFRLRPIQMSTEGLDLKAPSGVKKDRFGPDVRKIVDSPGWRPAVNKLFSSGKVTVIRRDALGRPRLESAAHLPISWKVE

SEQ ID NO: 8288 - protein, 1099 aa, synthetic construct
  REGION 1..1099: note = Synthetic
VSLSYRVGIDVGTYSLGCTAIEVDDNDQPVNILSSVSLIHDSGLDPDQQKRAVTRLASSGVARRTRRLYRRRRRRMINLEKFLTSQGWETRPFEHYSDPYLPWNARVALVNGYISDDAQRGMYLSIAFRHIANHRGWRNPYWKVSSLYSPDKPSDAFEQIRKELEESTGHKIPETVTVGQLISFAQFGKDRLRGGGKKKDEKKPQEQVNQAVISARLHQIDHAREINEICRVQKIDDALRKQILDLVFAAESPKGAQIGRVGKDPLQPKLPRALKASDAFQQYRIVALAGNLRIYRDGVSTPLDRDEKLIVFNYLINLSHKEEPSWLKVAEVLNIDRGQLHGTATMTDDGERAGAAPPVHDTNRTILGCKIKPLVHWWEGANDDERAAMLKALSNSEVEDFDSPAGAQTQAFFANLDESEQEKLDSLHLPIGRAAYSEDTLMRLTSRMLDENLDLYEARLAEFDIPKDWAPPAPRIGEPVGNPAVDRVLKGVARWLEAAADEWGAPKSVVIEHVRDGFISKSKANEIDRANNARHKRNRELFKQMQENLGIDGKLRSSDLWRYQSVQRQNCQCAYCGSPITYTTCEMDHIVPRAGEGSTNTRDNLVATCHRCNLAKKNIPFAVWAAQTNIPGVSVKEALDRTRHWSEDSGMTSKDFKKFRKNVCDRLKRTVVDEPLDARSMESVAWMANELRGRVAQRFQEENTVVNVYRGELTAEARRAAGISDKLRFIDGTGKSRLDRRHHAVDAAVVAFTQNYVAETLAIRSNKKREAQLLQAAEQWKEFTGSDAEHRAAWNAWLPKMQKLAVLLQKALDEDRIAVTSNLRLRLGNGRAHEDSIGELKTIRVGDAISVTDIDRASSEALWCALTREPDFDENNGLPENPDRRIRIHGTWYDAEDDIEVFPVGAGAIKVRGGYAELSRFHHARIYKIPGKKAPVYCMLRVYNADLIRHRHEDLFSVEIKPQTMSVRQAEPKLRKALAENTAEYLGWLVTDDELVIDTSNFNTGQIAEMQSELGQVRRWRLDGFYSPSTLRLRPLQMSAEGLREDTSIGAKKIIDRPGWLPAINKLFGEGHVTVVRRDALGRARLTSNAHLPISWKAE

SEQ ID NO: 8289 - protein, 1099 aa, synthetic construct
  REGION 1..1099: note = Synthetic
LSLSYRVGIDVGTYSLGCTAIEVDENDLPVKILSAVSLIHDSGLDPDQQKRAVTRLASSGVARRTRRLYRRRRKRMIKLEKFLKAQGWETLPFEHYSDPYLPWKARVELVNSFIHDDEERGRYLSIALRHIANHRGWRNPYWKVSSLYAPSEPSEAFQQIRKELEAATGRAIPHDATVGQLISFAQLGTDRLRGGGKKKDDKKPANEVKQAVISARLHQIDHAREINEICRVQKIDDTLRKNILELVFEAESPKGAQQGRVGKDPLQPSQDRALKASDVFQQYRIAALTGNLRINRGGDTSPLDRDERLIVFNYLVNLSHKKEPTWLDIAELLRIDRGQLRGTAIMTDDGERAGARPPVHDTNRTILGCKVKPLAAWWERASDDERAAMLKSLSNAEVDDFDSPEGAQVQAFFAELDETEHEKLDSLHLPMGRAAYCEDTLKRLTSRMLDENLDLYAARLAEFNIPKDWTPPAPRIGEPVGNPAVDRVLKGVARWLEAAADVWGAPKSVVIEHVRDGFVSKSKANEIDRENNARHKRNQKLFQDMQEKLGIEGKPRSADLWRFQSVQRQNCQCAYCGEPITYSTCEMDHIVPRAGQGSTNTRDNLVAVCHRCNLSKKNFPFAVWAAQSGIPGVSVKEALDRTRHWAEDSGMSAKDFNKFRTSVRERLKRTAMDEPIDARSMESVAWMANELRGRVAQRFQDNGTTVSVYRGALTAEARRASGISGQLRFIDGTGKSRLDRRHHAVDAAVVAFTQNYVAETLAIRSNKKREAELLRSAPQWKEFTGADEAHRAAWNAWLPKMRKLAMLLQQALDEDRVVVTSNLRLRIGNGRAHEDTIGELKKIRVGDAISVTDIDRASTEALWCALTREEDFDPKEGLPENPERRIRVHGTWYDADDEIEVFPVGAGAIKVRGGYAELSRFHHARIYKIPGKKASSFSMLRVYNVDLMQHRHGDLFSAEIKPQTMSVRQAEPKLRKALADGTAEYIGWLVVDDELVIDTSSFNTGQIAEVQKEFGQIQRWRLDGFFSNSKLRLRPLYMSAEGLSSDVSQASKKVIDRPGWLPAVNKAFGEGNMTVVRRDALGRIRLTSKAHLPISWKAE

SEQ ID NO: 8290 - protein, 1099 aa, synthetic construct
  REGION 1..1099: note = Synthetic
MAVTPVPYRVGIDVGTHSVGFAAIQMDENNLPLKILSAVSLIHDSGVDPDENKAAISRLAKSGVARRTRRLYKRRRARLRRLEAFLTALGWRTVPFENYSDPYHPWKVRAELVNGYIADEQERGEKLSVAVRHIANHRGWRNPYKGVSSLYNPGDASDNFEQIRAELSKKKGIAIPKDCTVGQLISFASFGVDRLRGGGKKKDAKKPADEVKNAVLSARLHQRDLAREVNEICRVQRIDDDLRKDLLDHIFVAESPKGAQAGRVGKDPLQPTRNRALKASDAFQRYRIASIIGNLRIKDAGPLSSDQFALVFEFLVNADPKKDVSWNDIADLLGIDRGDLRGTAAITEDFERAGNRPPIHETAKIFSTTKIKPLKEWWSLASPAARSAMVGAMSNGAMEQVTAEPMAEVESFFASLSEDEQAKLDDVHLPMGRAAYSEDTLERLTARMIKEGTDLFNARKAEFGVANDWRPPALPIGERVGNPAVDRVLKAVARFLAAAEKQWGAPAAVVVEHVRDGFISEAKTRELERDNERRRKRNEKLVEEMHRTLGIQGKVRSGDIWRYQSVQRQNCKCAYCGETITYHTAEMDHIVPQAGPGSTNTRDNLVAVCHRCNLAKKNVPFATWAGRCGIPGVSLQNAIEQTRFWSEDEGLTRPQFNKFRNSVRARLRRTSLDEPLDNRSLESVAWMANELHARIAQHFQAYGTKVNVYRGELTHEARLASGIHDRIRFVDGTGKSRLDRRHHAVDAAVVSMTTPYVAETLSLRRNQQRNHRLTGQAGQWREICGIDVEHRAAWSAWKRRMDILAELLAAAMKNDELVVTSNRRLRPGNSRAHEDTIGELETRKVGDALPAEVIDKASTEALWCALTRHPDFDPKNGLPENPQRKIRVHGTHLNANSEIGFFPIKSGAVAVRGGYAELSRFHHARVYKIHSGKKPTYAMLRVYDYDLRNKKDVDVFSVGIPPQTMSMRQAEPKLRRSLAEGSAEYLGWIAPNDEFVIDPLLIQGPDTEALFEAYGHIDRWVLKGFYGRSKLTLFPLMLSAEGLQPDEDPRVAKLLKNKGLIKSVNPLFSAGEIQVIRRTTLGRERWKSSAHLPVSWKSR

SEQ ID NO: 8291 - protein, 1099 aa, synthetic construct
  REGION 1..1099: note = Synthetic
MSLLYRVGIDVGTYSLGCTAIEVDDNDQPVSILSSVSLIHDSGLDPDQQKRAVTRLASSGVARRTRRLYRRRRRRMVKLENFLTAQGWETLPFERYSDPYLPWHARVALVNGYISDDTQRGQYLSIAFRHIANHRGWRNPYWKVSSLYSPDKPSDAFEQIRKELEASTGRQIPETATVGQLISFAQFGKDRLRGGGKQKDKKKPQEQVNQAVISARLHQIDHAREINEICRVQKIDDTLRKQILDLVFAAESPKGAQKGRVGKDPLQPKLFRALKASDAFQQYRIAALTGNLRIYRNGVTVPLDRDEKLIVFNYLVNLPKKEEPSWLKIAEILNIDRGQLRGTATMTDDGERAGATPPVHDTNRTILDSKVKPLAHWWENASDDERAAMLKSLSNSEVEDFDSPAGAQVQAFFADLDETEQEKLDSLHLPMGRAAYSEDTLMRLTNRMLDENLDLYEARLAEFGIPKDWAPPAPRIGEPVGNPAVDRVLKGVARWLEAAADEWGAPKSVVIEHVRDGFVSKSKAIEIDRANNNRHKRNRELFQKMQENLGIEGKVRSSDLWRYQSVQRQNCQCAYCGSPITYTTCEMDHIVPRAGEGSTNTRDNLVATCHRCNLAKKNIPFAVWAEKSTIPGVSVKEALDRTRHWSEDSGMSKKDFQKFRKNVCERLNRTVVDEPLDARSMESVAWMANELRGRVAQRFQEENTTVNVYRGALTAEARRAAGITDKLRFIDGTGKSRLDRRHHAVDAAVVAFIHNYVAETLAIRSNKKREAQLLQGTSQWKEFTGSDDKHRAVWNAWIPKMQKLAVLLQIALDEDRIVVTSNLRLRLGNGRAHEDTISELKTIRVGDAISVTDIDRASSEALWCALTREPDFDEKDGLPENPNRRIRVHGTWYDAEDEIEVFPVGAGAIKVRGGYAKLSRFHHARVYKIPGKKAPIYCMLRVYNTDLVQHRHEDLFSVELKPQTMSVRQAEPKLRKALAENTAEYLGWLVTDDELIIDTSTFRTGLIEEMQSEFGLVRRWRLDGFDSPSLLTLRPLHMSAEGLPDDCALGSRKIIDTKGWRVSINKVFNAGNTTVVRRDALGRARLTSNAHLPISWKEE

SEQ ID NO: 8292 - protein, 1095 aa, synthetic construct
  REGION 1..1095: note = Synthetic
MQKNYRVGIDVGTHSIGFAAIEVDDHDRPIHILSAMSLIHDSGLDPDSNKRALTRLAESGVARRTRRLYRRRRKRMVRLEKFLQHQGWETKPFEDYSDPYIPWNARVALVNGYIEDDQQRGEYLSIALRHIANHRGWRNPYWKTRSLYSPEGPSDAFETIRKDLEKRAGRPVPKDITVGQLITFARIGTDRIRGEAQNKKTGHNNPAILSARLHQLDHAREINEIAKVQKLDDDLRKHIIDLVFAAESPKGAQLGRVGKDPLQPGKDRALKATDAFQRYRIAALTGNLRIRGTQGNDRLTREQRQLIFDHLVNLPHTEEPSWLNIAEILGIDRGDLLGTATMTDDGERAGSKPPVHDTNRAILSSKVKPLVHWWKAANFDEQKAMLKSLSNAEVDDFDSPAGASVQAFFADLDEKQHDKLDSLHLPMGRAAYSEDTLVRLTERMLNNNQDLYEARLAEFNIAKDWTPPKPRIGEPVGNPAVDRVLKATARWLEAAHKEWGAPKSIIIEHVRDGFISEAKAREIDRDNNRRAQRNRELFGKMQSKLGIEGKPRSADLWRFQSVQRQNCCCAYCGDTITFQNCEMDHIVPRAGEGSTNTRDNLVAVCHRCNLAKKNIPFAVWAKNANIPGVSLKEALNRTRHWVEDTGMSSKDFQRFVSNVRARLKRTSVDEPLDNRSIESVAWMANELRSRVAQHFGEYGTKVGVYRGELTAEARNAAGIRRKLRFIDGTGKSRLDRRHHAVDAAVICFTQNYVAEVLAKRSSMRRAAQLNREPEQWREFTGSTDAHRAAWNAWVNKMHLLANLLQTALDEDRIVVTSNLRLRLGNGRAHEDTIGELKKIRVGDAISVTDIDRASTEALWCALTRDPDFDPKEGLPENPHRRIRIHGTWYDADDHIEVFPVGAGAIKVRGGYAELSRFHHARVYKITSGKKPTYAMLRVYTTDLTAYRNEDLFSVEIKPQTMSMRQAEPKLRKAIAEGQAEYLGWIVIDDELLIDTSSFNSGQIAEMQAEFGMVRRWRLDGFVSPSKLRLRPLQMSGEGLAPGASAGSRKIVDQPGWRPAVNKLLSAGNVTIIRRNSLGQVRLNSNAHLPTTWKVD

SEQ ID NO: 8293 - protein, 1091 aa, synthetic construct
  REGION 1..1091: note = Synthetic
VERINYAVGIDVGTHSVGFAAIALDDNGAPTEILNLVSHIHDSGIDPDSNKKADTRLAVSGIARRTRRMFRRKKKRLQKLDKYLEGLGWPVKAFEVYSDPFLPWKVRAELAQGRIADASEMQEKLSIALRHIARHRGWRNPYSKVESLMARTEPSAQLIEIRTNISKAIGYPIPEDATVGQIVAASALGNARLRGEGGLLSARLMQSDHANELWTIFDAQGVDHEIARKLVSLVFSAESPKGSASGRVGKDPLQPHLPRALKASDAFQRYRIAALIGNLRIREGSAKAPLSIEQRRVVFDYLVNLAPKMEPEWINVAEILGIDRGSLLGTATITDDGERAGARPPVHDTNRSILSSKLKPLSSWWKTASDEDHRAMLKALSNSESFDFDTESGSSVQAFFESLEDSDHEKLDSLRLPLGRAAYSESTLERLTDRMLNDGIDLYEARKLEFDVPNDWAPPAPDIAEPVGNPAVDRVLKAVARWLNAAESEWGAPSVINIENVRSGFLSEAMSRQLDREMEKRGKRNLEIVSEMQARLGIEGRPRSADLWRFQSIQRQNGQCAYCGQPIDFKTCEMDHIVPRAGMGSTNTRENLLAVCKRCNHSKSNTPFVLWAEKSAIPGVSVAEALERLNHWLVDPGLTTRDFAQFKSRVAQRLKQRTFDEEFDARSIEPVAWMANELRARVQQKFGGSSANSADTTVNVYKGSLTAEARRASGISGNLRFADGVGKSRLDRRHHAIDAAVIAMMSRTVAEVLALRVNLKEAQRHRREAEQWKEFTGTSTNHQIRYNKWLSSMKRLGAMLQVYLEEDRIPVTHNLRLRLGNGAVHEDTVGKLTKKLVGDAMSIADIDKAASEALWCALTRCPDFDKKDGLPANPERTIRVGNRYLNADDEIEFFPVSAGAIAVRGGYVELGRSMHHARVYRVPSGKKTAFAMMRVYTADLARFRNDDLFSVEIPLQTMSVRQSEPKLRKALEDGTAEYLGWLVVDDEIQVDMATFNTGQIGAAQEQLGEITSWNLDGFFSNSRLRLRPRLFSAEGLKDDAVSDVRKVLDTTGWLPAINKVFGDGKAVVIRRDSLGRVRLESAAHLPVSWKA

SEQ ID NO: 8294 - protein, 1084 aa, synthetic construct
  REGION 1..1084: note = Synthetic
VKYHVGIDVGTFSVGLAAIEVDDAGMPIKTLSLVSHIHDSGLDPDKMKSAVTRLASSGIARRTRRLYRRKRRRLQQLDKFIQRQGWPVIELEDYSDPLYPWKVRAELAASYIADEKERGEKLSVALRHIARHRGWRNPYAKVSSLYLPDEPSDAFKSIREEIKRASGQPVPETATVGQMVTLCELGTLKLRGEGGVLSARLQQSDHAREIQEICRMQEIGQELYRKIIDVVFAAESPKGSASSRVGKDPLQPGKNRALKASDSFQRYRIAALISNLRVRVDGEKRILSVEEKNLVFDHLVNLAPKKEPEWVTIAEILGIDRGQLIGTATMTDDGERAGARPPTHDTNRSIVNSRIAPLVDWWKTASALEQHAMVKALSNAEVDDFDSPEGAKVQAFFADLDDDVHAKLDSLHLPVGRAAYSEDTLVRLTRRMLADGVDLYTARLQEFGIEPSWTPPAPRIGEPVGNPAVDRVLKTVSRWLESATKTWGAPERVIIEHVRDGFVTEKRAREMDGDMRRRAARNAKLFQEMQEKLNVQGKPSRADLWRYQSVQRQNCQCAYCGSPITFSNSEMDHIVPRAGQGSTNTRENLVAVCHRCNQSKGNTPFAIWAKNTSIEGVSVKEAVERTRHWVTDTGMRSTDFKKFTKAVVERFQRATMDEEIDARSMESVAWMANELRSRVAQHFASHGTTVRVYRGSLTAEARRASGISGKLEFLDGVGKSRLDRRHHAIDAAVIAFTSDYVAETLAVRSNLKQSQAHRQEAPQWREFTGKDAEHRAAWRVWCQKMEKLSALLTEDLRDDRVVVMSNVRLRLGNGSAHEETIGKLSKVKLGSQLSVSDIDKASSEALWCALTREPDFDPKDGLPANPERHIRVNGTHVYAGDNIGLFPVSAGSIALRGGYAELGSSFHHARVYKITSGKKPAFAMLRVYTIDLLPYRNQDLFSVELKPQTMSMRQAEKKLRDALATGNAEYLGWLVVDDELVVDTSKIATDQVKAVEAELGTIRRWRVDGFFGPSQLRLRPLQMSKEGIKKESAPELSKIIDRPGWRPAVNKLFSDGNVIVVRRDSLGRVRLESTVHLPVTWKVQ

SEQ ID NO: 8295 - protein, 1084 aa, synthetic construct
  REGION 1..1084: note = Synthetic
VKYHVGIDVGTFSVGLAAIEVDDAGMPIKTLSLVSHIHDSGLDPDKIKSAVTRLASSGIARRTRRLYRRKRRRLQQLDKFIQRQGWPVIELEDYSDPLYPWKVRAELAASYIADEKERGEKLSVALRHIARHRGWRNPYAKVSSLYLPDEPSDAFKAIREEIKRASGQPVPETATVGQMVTLCELGTLKLRGEGGVLSARLQQSDHAREIQEICRMQEIGQELYRKIIDVVFAAESPKGSASSRVGKDPLQPGKNRALKASDAFQRYRIAALIGNLRVRVDGEKRILSVEEKNLVFDHLVNLVPKKEPEWVTIAEILGIDRGQLIGTAIMTDDGERAGARPPTHDTNRSIVASRIAPLVDWWKTASALEQHAMVKTLSNAEVDDFDSPEGAKVQAFFADLDDDVHAKLDSLHLPVGRAAYSEDTLVRLTRRMLADGVDLYTARLQEFGIEPSWTPPAPRIGEPVGNPAVDRVLKTVSRWLESATKTWGAPERVIIEHVRDGFVTEKRAREMDGDMRRRAARNVKIFQEMQEKLNVQGKPSRADLWRYQSVQRQNCQCAYCGSPITFSNSEMDHIVPRAGQGSTNTRENLVAVCHRCNQSKGNTPFAIWAKNTSIEGVSVKEAVERTRHWVTDTGMRSTDFKKFTKAVVERFQRATMDEEIDARSMESVAWMANELRSRVAQHFASHGTTVRVYRGALTAEARRASGISGKLEFLDGVGKSRLDRRHHAIDAAVIAFTSDYVAETLAVRSNLKETQAHRQEAPQWREFTGKDTEHRAAWRVWCQKMEKLSALLTEDLRDDRVVVMSNVRLRLGNGSAHEETIGKLSKVKLGSQLSVSDIDKASSEALWCALTREPDFDPKDGLPANPERHIRVNGTHVYAGDNIELFPVSAGSIALRGGYAELGSSFHHARVYKITSGKKPAFAMLRVYTIDLLPYRNQDLFSVELRPQAMSMRQAEKKLRDALATGNAEYLGWLVVDDELVVDTSKIATDQVKAVEAELGTIRRWRVDGFFSPSRLRLRPLQMSKEGIKKESAPELSKIIDSPGWRPAVNKLFSEGNVTVVRRDSLGCVRLKSTAHLPVTWKVQ

SEQ ID NO: 8296 - protein, 812 aa, synthetic construct
  REGION 1..812: note = Synthetic
MPVNYGLNYRVGFDVGTHSLGCAAIEVDDNDQPIQILSAVSLIHDSGIDPDQNEHAITRLATSGIARRTRRLYRRRRHRIIKLEKFLRSQGWKTVNFEYYSDSYLPWKTRVALVNGFITDEKQRGEYLSIALRHIANHRGWRNPYWKVSSLYSPDAPSDAFEQIRKELEAKTKRKIPHDVTVGQLISFAQFGQDRLRGGGKKKDKNKSASEVKQAVISARLHQIDHAREINEICRVQKIDDALRKQILDLVFAAESPKAARPGKDSLQEDKYRALKASDAFQRYRIAALIGNLRILHAGATRRLNGDERHIVFEYLVNLAPKTEPSWLKVAELLSIDRGQLRGTATMTDDGERAGAKPPVHDTNRTILGCKVKPLAKWWQNASEPERAAMLKALSNAEADDFDSPAGAQVQAFFAELDEKEHEKLDSLHLPMGRAAYSEDTLVRLTKRMNQENLDLYDARRAEFGIAEDWTPPAPRIGEPVGNPAVDRVLKGVARWLEAAADEWGAPKSVVIEHVRDGFISKSKAREIDRENNKRHKHNEKLFREMEEHLGIEGKPRSADLWRFQSVQRQDYQCAYCGSPITYANSEMDHIVPRAGEGSTNTRDNLVAVCHRCNLSKSNIPFAVWAQKVSIPGVSVKEALDRTKRWSVDSGLNKTEFNNFRAKVRARFQRTAHDEPLDARSMESVAWMANELRARVAQRFHQENTSVSVYRGAITAEARRAADITKKCASLVVPAKRDLTVAITLWMQQLSHSPVNTSLKPWLSVPIRSVQPNFSVMLQGGKSSLVRMKNDVQHGMRGCRKSRNSLHCCKLP

SEQ ID NO: 8297 - protein, 1106 aa, synthetic construct
  REGION 1..1106: note = Synthetic
VKKYNIGIDVGTHSVGFAAIELDEQGIPCNILSAMSLIHDSGVDPDSNKSGITRLAVSGVARRTRRLYHRRKKRSIRLDKFLASLGWPVVPFEEYTDPFLPWTARAQLATRYIETKEVREEKLSIAIRHIANHRGWRNPYSKVSALYAPKGPSDNFEEIRAQLSKKLHVDIPSDLTVGQLISFAKVGEDRLRGGGKRKDKKKAPEDVKQTVISARLHQSDLAREINKICEVQRIDDSLRKELIDHVFAAESPKGAQAGRAGKDPLQPHLVRALKASDAFQRYRIAALIGNLRIRTEEEKHPLDVPQRQLVFDYLLNLPSSTVPSWVSVAEVLNIDRGRLVGTATMTDDGERAGARPPVHDTDRLLSSTTVKPLKLWWKSATSDQRVAMIKALSNAEVDDWDSEAGASVQAFFTTLSEEDQEKLDSVHLPIGRAAYSEDTLRRLTERMLQDGVDLYEARRVEFNVPADWTPPAPEVGEPVGNPAVDRVLKAVARWTAAAEREWGAPQRIVIEHVRSGFMSVAKARELERENEKRYKQNQKIVQKMHEKLGIENAVRREDIWRFQSVQRQNGCCAYCGKTITYFTAEMDHIVPQAGPGSSNIRENLVAVCHQCNLAKGNIPFATWASKCGISGVSLKEALDRTRDWNEDSGLSRPQFKKFVSAVQTRLRRTSFDEPLDNRSLESVAWMANELRARLAQEMKKHGTRVNVYRGELTHEARLASGISGKLQFIDGPGKSRLDRRHHAIDAAVISMTTPYVAEVLALRRNKKRAQYLAKQPPQWKEYEGDDTAHQIEWRKWKTRMYKLSELLESALLKDQIPVTSNLRLRPGNGRAHEDTIGALDKLRVGDALTPEQIDRAATEALWCALTYHPDYDEKEGLPADQNRRIRVHGTHLDASDTIEFFPGKPGKDGAGAVKVRGGFAKLTRFHHARIYRITTGKKPVYAMLRVYDHDLVRHRNTDVFSVELPPQTISMRQAEPKLRKALQEGTAEYLGWLTENDELVIDVSGFNTGQISTLRHTYGDISRWRVDGFNHRAKIRLRPLMMSAEGLCDDAPSDVKKLIDSTGWRAAVNVVFSSGEVSVIRRNTLGQERWFSKGHLPICWKVENDK

SEQ ID NO: 8298 - protein, 1108 aa, synthetic construct
  REGION 1..1108: note = Synthetic
MPISPAPTRYRVGIDVGTYSLGMSAIAIDDNDYPVEILSSLSLIHDSGLDPDQQKSAITRLASSGVARRTRRLYRRRRRRMIKLEKFLSAQGWKTIPFEQYSDPYLPWKARVELVNEFITDPDTRGEKLSIALRHIANHRGWRNPYIKTVSLYNPGDSSDAFQQIRTELEKRVGHKIPENVTVGQLIAFAKFGEDRLRGGGKAKDRAKEKSGNTAAIKHAIISARLQQVDHAREINEICRVQKIDDDLRKNIIDLVFAAESPKGAQKGRVGKDPLQPTKNRALKASDAFQRYRIAALIGNLRIRNGESKSELSHEQRLLVFNYLTNLDHKTDASWINIAELLNIDRGDLLGTATMTSDGERAGARPPVHDTNRAILGCKVKPLAAWWRSASCAERQAMLKALSNAETDDFDSPAGAVVQAFFAELDEEEQGKLDALHLPMGRAAYSEDTLVRTTKRMLDENLDLHHALRAEFGIPEDWTPPAPRIGEPVGNPAVDRVLKGVARWLEAAAAEWGAPESIVIEHVRDGFVSEAKAREIDRENNTRAARNQRLFHEMQERLGVDGITRSSDLWRYQSVQRQNCQCAYCGSTITYQSCEMDHIVPRAGEGSTNVRSNLVAVCHRCNLAKKNIPFAVWAAKSTIPGVSLKEALERTRHWVEDSGQSKKDFNKFRDEVCQRLKRTTFDEPLDARSIESVAWMAIELRGRIAQRFAEDGTNVAVYRGKITALARSASGISGKLRFIGGTGKSRLDRRHHAVDAAVVAFVKNYIAETLVKRDSMRRASHLTQGTYQWKEFTGSDAAHRAAWNAWVPRMQKLAALLQQALDEDRIVVTSNLRLRLGNGRAHEDTIGKLKKIRLGNAISVQDVDRASSEALWCALTREYDFDPKEGLPANETRRIRVNGTWLEADDLIEIFPVGAGAIKVRGGYAELSHFHHARIYKIPGKKKPSYAMLRVYDVDLAKHRNEDLFTVELKPQTISVRQAESKLRAALSDGSAEYLGWIVIDDELHIDTDAFATGQIAAMQKEFGKQTRWRVDGFFSSSKLRLRPQLMSAEGLSDKNSAESKKVIERPGWLPAINKVIELGNVTVIRRDSLGRVRLTSAAHLPVSWKVG

SEQ ID NO: 8299 - protein, 1089 aa, synthetic construct
  REGION 1..1089: note = Synthetic
LTSANVNYRVGIDVGSYSIGMAAIAIDDDGKPTEILSAISLIHDSGVDPDSTKSAATRLATSGIARRTRRLYRRKRKRLAKLDKFIRSQGWPLKEFEEYEDPFYPWRVRAELATTPITDKQELGEKLSIALRHIARHRGWRNPYSKVTALYTVTEPSDALVSIQEQCATELGRPIPPTTTVGQLIASMNLGKTRLRGEDSLLAARPRQSDNANEIHAIAKVQGLSNELVKQIIDHVFAAESPKGSAAERVGKDPLQPTKKRALKASDAFQLYRIAALIGNLRIRGGKKNRRLTAEETRLVFDYLRSLPAKQEPTWQLVAEQLKIDRGNLVGTAIMTDDGERAGAKPPVHETNRLMESTKIKPLAAWWKSADADARAAMVKALSNAEVDDFDSQAGAQVQEFFFGISDEDQEKLDGLHLPIGRAAYSEDTLDRLTKRMIGEGMDLYEARQAEFKIPNDWAPPAPEIGERVGNPAVDRVLKATARWLNAAERQWGAPKSVNIEHVRAAFMSESSARELDRDNQQRAKRNVKVVAEMQEKLGIEGRPSRADVWRFQSVERQNCQCAYCGTQISFKNSEMDHIVPQAGEGSTNTRDNLVAVCRECNSSKSNIAFAVWAENTSRPGVSVQKAVERTRHWVTDSGLRESEFKKFRKQVCDRLRRKATDEPIDARSLESVAWMANELRSRIAQKFKDGDTKVRVYKGALTAKARRASGISGKLEFVDGKGKSRLDRRHHAVDAAVVAFMSHYVAETLALRSNMKFDQELRRKAPQWREFTGSDHVHQVEWTKWKYRMQALAELLNNALAQDRIVVMHNLRLRLGNGAAHEDTIGKLTRIKVGDAISTTDIDRASSEALWCALTRDPDFDPKTGLPENPDRTIRIHGTHLTASDEITVFPVAAASVPIRDGFAKLGSNYHHVRLFRVPNGKKYKYCLMQVYAVDLLKFRKEDLFTVELKPQTISVRTCEAPLRKALANGTAEYLGWLVSDDELLIDTSSFDAPGIAKLREEYGPVTRWRLAGLTSVTRLNLRPLYLSKEGLKPDVDPEIKKIIDNRSWIITVNKLFSIGHVKIIRRDALGRPRLHSAAHLPTCWEVK

SEQ ID NO: 8300 - protein, 1120 aa, synthetic construct
  REGION 1..1120: note = Synthetic
LNLSKHRLVFGVDCSKPVTQLLPASFLFLQGRIMTDIRYRVGIDVGSFSIGMAVIAIDEQDNPSAVLSMVSLIHDSGLDPDQIKSAVTRLASSGIARCTRRLYRRKRHRLQKLDSFITSHGWALKDFEEYPDPYLPWQVRAELSTSKITDQGELGEKLSVALRHIARHRGWRNPYSKVNTLLTQVPHSSGFVAVQEEFSKLLGTSFPEDVTLSEMVVSVPTGSKALRGPKGLLSARLQQSDYANEILKIAQLQDLSEGLTKEIIRHVFAAESPKGSGEGLTGKDPLQPNEDRALKASDAFQKYRIAALIGNLRISDKSGQHRLSKEQVNVVFDHLCNLSFKEEPSWITIANLLNIDRGQLLGTAKITDDGERAGAKPPVHDTNRRIEGSKITPLVNWWKQANEEERAAMINAMSNGKVDDYDSATGAKVQAFFSDLPDEEHTKLDALYLPIGRAAYSEDTLQRLTAQMLDNALDLHEARKAEFNIENDWAPPAPAIGEPVGNPAVDRVLKGVARWLKAAESTWGAPVSINIEHVRAAFMSELKTRELDRDNKNRAERNEKLVAEMYTNLNIKGRPRAADIWRYQSIQRQNGQCAYCGVPIDFKNCEMDHIIPRAGQGSTNTRDNLVAVCKPCNSEKSNAPFAVWAAKTSREGVSVEQAVERTRHWIADPGLNKKQFDAFVKSICNRLTRKTIDEEIDSRSIESVAWMANELRSRIAQRYKTTGTKVRVYKGALTAEARAASGISGNLRFIDGVGKSRLDRRHHAVDAAVISFISDYVAETLAQRSNLKFSQELRRKAPQWKEYQGSNAAHRAEWNRWLQRMHHLSQLLSQALEQDRVVVMSNLRLRLGNGAAHEDTIGKLTSIKVGDVITTEEIDRASSEALWCALTRHPDFDQKTGLPANPERSIRIHSTHLAADDTITLFPVNAGCIALRGGYVELGSSFHHGRIYKVPQGKKFAFYMMRVYTIDLLPYRKEDLFSVTLKPQTMSVRQCHPKLRQALENNTAEYLGWLVTDDELLIDTTKFNTGQVAGAQQEFGQIKRWRLDGFVSDSKLRLRPLHMSKEGLKPDASSDSKKIIDNPGWRPAVNKLFTDGHVTVIRRDALGRPRLQSTAHLPITWQVK

SEQ ID NO: 8301 - protein, 1099 aa, synthetic construct
  REGION 1..1099: note = Synthetic
MPVNYRVGIDVGTHSFGCAAIEVDDNDQPIQILSAVSLIHDSGIDPDQNKSATTRLATSGVARRTRRLYRRRRHRTIKLEKFLRSQGWKTKEFEHYSDPYLPWKTRVALVNGFIADETQRGEYLSIALRHIANHRGWRNPYWKVSSLYSPDAPSDAFEEIRKELEAKTKRKIPHDVTVGQLISFAQFGQDRLRGGGKKKDEKKSAGEFKQAVISARLHQVDHAREINEICRVQKINDTLRKQILDLVFAAESPKGAQSGRVGKDPLQPGKYRALKASDAFQRYRIAALIGNLRILHEGAIRRLYDNERHIIFEYLVNLAPKTEPSWLEIADLLNIDRGQLRGTATMTDDGERAGAKPPVHDTNRTILGCKVKPLAQWWKNASEPERAAMLKALSNAEVDDFDSPAGAQVQAFFAELDEKEHEKLDSLHLPMGRAAYSEDTLVRLTKRMNQENLDLYDARRAEFGIAEDWAPPAPRIGEPVGNPAVDRVLKGVARWLEAAADEWGAPKSVVIEHVRDGFISESKAREIDRENDKRHQHNEKLFREMEERLGIEGKPRSADLWRFQSVQRQNCQCAYCGSPITYTNSEMDHIVPRAGEGSTNTRDNLVAVCHRCNLSKSNIPFAVWAQKVSIPGVSVKEALERTKHWSVDSGLNKTEFNNFRGKVRDRFQRTAHDEPLDARSMESVAWMANELRGRVAQRFHQENTSVSVYRGAITAEARRAAGIANKLRFIGGPGKTRLDRRHHAVDAAVVAFTRQYVAETLAIRSNKKRAAELLRDVPRWKEFTGADEKRRAAWNVWLPKVQKLASLLQVALDEDRIVVTQNIRLRVGNGRAHKETIGKLKTIRVGDAISATDIDRASSEALWCALTRDKDFDAKAGLPENPERKIRIHGTWYGADDEIEVFPVGAGAIKVRGGYAELSRFHHARIYKVPKKTGYDYCMLRVYNTDLVRHRNEDLFSVELKPQTMSVRQAEQKLRKSLAENSAEYLGWIVPNDELVVDTSRIASAQLNEVQEIYGKIHRWRLLGFDSNSRILLRPLQLSAEGLPDDANAASKEIIKGRGWRTSINGFLTGGNVAVVRRDALGRVRLTSAAHLPVSWKVD

SEQ ID NO: 8302 - protein, 1099 aa, synthetic construct
  REGION 1..1099: note = Synthetic
MATKYLVGIDVGSYSLGCAAIEVDDAGNPIQLLNTISFIHDSGIDPDSNKSATTRLAVSGIARRTRRLYRRRKRRTIKLEKFLCAQGWKTVPFEQYTDPYLPWTARVALVNGFIADSEQRGEYLSIALRHIANHRGWRNPYHSTSSLYSPGEPSDAFNEIREGLSKRIGHPIPCDATVGQLISFAQFGRDRLRGGGKKKDLKNPDHAKQAVISARLQQSDHAREINEICRVQKIDDGLRKKIIDLVFAAESPKGAQAGRVGKDPLQPTKYRALKASDNFQRYRVAALIGNLRIRQSDKTQRRLTAEERSLVFDHLINMPANKEPSWLDVAEILSVDRGRLRGTATITDDGERAGARPPVHETNRVIARCKVKPLTHWWTAADPDHRAEMLKALSYSAAPNFDSKPGAAVQAFFAGLEEDDHQKLDALHLPIGRAAYSEDTLSRLTAWMQSENMDLYEARRAEFGVSEDWTPPKPRIGEPVGNPAVDRVLKGLARWLEAAEAEWGAPESIVIEHVRDGFSSENVAREISRENDRRHKRNLKLYAEMQEKLNIDGAVRRSDLWRYQSLQRQNEQCAYCGSPITFSNCEMDHIVPRAGQGSTNVRENLVAVCHRCNLAKKNIPFAVWAQTCTIPGVSLREALERTKFWLPDPGQKKSDFNKFRSAVCERLKRTHSDEPLDSRSIESVAWMANEVRGRVAQHFRDSGTNVSVYRGALTAEARRASGIHKRLRFIDGPGKTRFDRRHHAVDAAIIAFTTPYVAQTLAERANKRQAAFINNAPHQWKEYTGADDAHRAAWNSWVPKVRKLALMLQQALDKDRIVVTSNLRLRLGNGRAHEDTIGALKTIRLGNEISATDIDRASSEALWCALTREPDFDPKNGLPANPDRRIRVHGSWFDADDNIKVFPVGAGCIKVRGGYAELSRFHHARIYKITGGKKPSYAMLRVYNVDLLDHRDEDLFSVEIKPQSISARQAEPKLRKALAEGTADYLGWLVVDDELVIDTSSFTTGHIGEFQTVFGPVSRWRLDGFYSESRLRLRPLLMSAEGIDPQMPDVVQKIVDRPGWLPSINVVFGTGQAKIIRRDSLGRVRLSSAAHLPVSWKVR

SEQ ID NO: 8303 - protein, 1109 aa, synthetic construct
  REGION 1..1109: note = Synthetic
MTIAPTDARIARVGFFNLIGVAMDTSLTRYAVGIDVGDFSVGMAAIKVGEDGMPQEILSAISHIHDSGLDPDNIQEARTRLEISGIARRTRRLFRHRRRRLIRLDAFIQSKGWGLPQNDESDDPYLPWRVRAELASRPIPTEEELGAKLSIAIRHIARHRGWRNPYSRVNSLMADVPPSDAFKAIQEHFSNILGRSFSDDMTLGQMVAACNLTNTKLRGKGGAISARLQQSDFAHEIRKICAMQEIDESTVREIIEHVFAAESPRGANATRIGKDPLQPSEDRALKATDAFQRYRIAALIGNLRVREGSGKRELSFNERKLVFDHLVHLEPKVEPDWTAVAEKLNIGRRDLLGTATTMDDGERAGARPPVHETNRRILTCSVKPLVKWWQEADDAERRAMLIALGNGSIEDYDDAQGAKVQAFFTDLPDEDIEKLDKLQLPVGRAAYSEDTLTKLTKAMLSNGVDLYTARRQVFGISEDWAPPVPEIGEPVGNPAVDRVLKVVARWLRAAENTWGVPESINIEHVRAGFMSRSKSLELDRDNERRAKRNLELFTQMQQKFGQDIKPSRADLWRYQSVQRQNGQCCYCGTTITYQNCEMDHIVPRAGRGSTNTRDNLVAVCHDCNLSKGNIPFAVWAEKSAKPGVSVAEAQERLRHWVCDPGLKTPQFRRFVKSVNDRLSRKTIDEELDARSIESVAWMANELRGRIAHKYRDAKVRVFRGQLTAEARKASGISKKIAFIDGPGKSRLDRRHHAVDAAVIAFMSAKVAETLAIRSNLKFDQELRKDAPQWKEFTGSTDAHKIIWSKWRNRMSALADLLQTALDEDRIVVMSNLRLRLGNGAVHEEKVRKLKKLKVGGPISAVDVDRASTEALWCALTRHPGFDPKEGLLADPDRNIRVQGRHLSADDTIEVFPVSAGAVAVRGGYVKLGRSFHHARVYKIADGNKVEYAMLRVYSIDLKKYKNEDLFTVELQPQTMTMRKCKSSLRKALAVGKAEYLGWLVVDDELHLDTAKFNTGQIVNIQEELGEITRWRVDGFKTESKLRLRPLQMSKEGIRKDMSEDVNKILDSEGWQPTVNKLFGVGKVTVIRRDALGRVRLSSNAHLPVTWTTG

SEQ ID NO: 8304 - protein, 902 aa, synthetic construct
  REGION 1..902: note = Synthetic
MNLGKTRLRGENSLLAARPRQSDNANEIHTIAKVQGLSNELVRQIIDHVFAAESPKGSAAEQVGKDPLQPTKKRALKASDAFQQYRIAALIGNLRIRGGKGNRRLTTEETRLVFDYLRSLPAKQEPTWQLVAEQLKIDRGNLVGTAIMTDDGERAGAKPPVHDTNRIMENTKIKPLATWWKSADADARAAMVKALSNAEVDDFDSQAGAQVQEFFFGISDEDQEKLDGLHLPIGRAAYSEDTLDRLTKRMIGEGMDLYEARQAEFKISNDWAPPAPEIGERVGNPAVDRVLKATARWLNAAERQWGAPKSVNIEHVRAAFMSESSARELDRDNQQRAKRNVKVVAEMQEKLGIEGRPSRADVWRFQSIQRQNGKCAYCGAEISFKNSEMDHIIPQAGEGSTNTRDNLVAVCRECNSSKSNIAFAVWAENTSRPGVSVQKAIERTHHWVTDSGLRKPEFDKFRKQVCDRLRRKATDEPIDARSLESVAWMANELRSRIAQKFKDGDTKVRVYKGALTAEARRASGISGKLEFVDGKGKSRLDRRHHAVDAAVVAFTSNYVAETLALRSNMKFDQELRRKAPQWREFTGSDHVHQVEWTKWKYRMQALAELLNNALVQDRIVVMHNLRLRLGNGAAHEDTIGKLTRLKVGDAISTTDIDRASSEALWCALTRDPDYDPKTGLPENPNRTIRIHGTHLTASDEITVFPVAAASIPIRDGFAKLGSNYHHVRLFRVPSGKKYKYCLMQVYTVDLLKFRKEDLFTVELKPQTISVRTCEALLRKALANGTAEYLGWLVSDDELLIDTSSFDTPGIVKLREEYGPVNRWRLAGLTSVTRLNLRPLYLSKEGLKPNVNPEIKKIIDNRSWIITVNKLFSSGHVKIIRRDALGRPRLHSAAHLPICWEVK

SEQ ID NO: 8305 - protein, 1028 aa, synthetic construct
  REGION 1..1028: note = Synthetic
MECGGRLDKEIRMSKSVSTILGLDIGLASVGWSLIETHADIPTKIIQAGVRVFPMGMELDDRGKGTSRSVERREARLRRRQLDRRAMRKAHIRKLLFVNNLAPDRKADAQAWRAFEGLQPYELRAKGLDQPLTTHEFGRVIYHMAQRRGFLSNRKAPEREDDKPGEVKQATQALETEMKAAGCRTLGEFFSKLDPHQQRIRKNYTLRRWYIEEFDALWAVQTKAAPDRFHEALGKQLRQALFYQRPLKIKEGSVGTCELEAGKKRSRIALLDAQRFRLLQQVNNLRLETGPGKERALTPEERAKIMEMLATKASVKFGTIRKALKIRGDFNLERGGSEALVGDATTAIITAKIGSAWDDLDRAERDQLVNDMLSIDHAEVLKRRLMTRWALDEAAADALSEVALEDGHSALSMAAISKLLPHMEAGDPYMTAVMKAYPDNANWKPADEVPPFPNLRNPLVQRSLAETRRVVNAIVQRHGKPGRIRVELARDLKKAAKERESEWSRMRVREKERAEAREALQRLKEYHIANPKASDIEKWLLFKECGGMCPYTGKAITHAGLFGEHPQFDVEHIIPFSRSLDDSFGNKTLCCVDYNRNTKKNKTPYETSGGTPQWEEIIARVKKFNGVYAEAKLRRFVLENVAEGGAFLENFSQRDLAITRYATKAAYQALSRLYAPGEAKSRVEATQGVATSYLRRAWRLNNVLGLANEKTRDDHRQHAIDATVVALTNRSTVKALADAAVMGRAGAFTPIPEPWEGFKEDLASTIQGIVTSHRVSKKTNGPLHKETYYGIITDPSDLKTNRAVVRKDVASLSDKDVAGEVIVDPAVRDAVRARLSELGESDPRKAFKDRAQHPYLTAKDGRKIPIHKVRAFQKCDPLALETAPGSRHVVLGNNHHVEFFLVKDSKGNPTLKSAVISQLDVRRLVAKARKENVAPVIVRKADEEGNPLAFSLAIGEVVVLDDEGTLNKFVVQKLSSRDYVFKSLNDARIFKDIPKSELVRITSDSGLMQKFKGKLICDPLGHTYRTRD

SEQ ID NO: 8306 - protein, 1071 aa, synthetic construct
  REGION 1..1071: note = Synthetic
MIQPLVRPFEIALDIGHSSIGWAVFKNGEKFDLLGTGVVLFPADDCLAVKRRAYRRQRRHVRATRQRIERLKKLLLHVGALSETELNAPGCAWPWKLAAEVLSGSGRVLTWSELWDVLRWYAHNRGYDGNTRWSRQEDADAGDTEKVEAAKSLMQEKSASTMAETFCAVLKIKPLAVTKSSRERFKGLNAAFPRHVVYDEVKNILEKHLGVLAQMTPELVRTLVGNDNHQTGEWDDDAWKTISVSGVVLPKRYKGSYLFGQSVPRFDNRIISSCPITYAKVFAQAFADTNDHKKAAKKAVRDSKVPVKKCREFLLYRWAMILANLTVNMGQGMRSLSSEERKAIHQVMIKGDPAIKSEPGHLTKTQLKKVVIQKTGALLNNIDTYFLTPHAEDALWLRPEKAPSGRAPYTRQVMKAAVRDVFEGKHPTEKSNSLYLSDEIKKAQLERTLEEKTNNHLVRHRVLITRRLVADIIKSYAVADASKIGRITVEVNRDLQAFSGKTNKEIEGELNQMLKDHGSVVKKLEKDLADSKYRITAGLIRKARIAEDLDWTCPYSQKRYGAIELASGAFDKDHIIPRSLRPSDSLESLVITSKAINAMKGNRTALYFMQEFEGKDIEGDLGVGKEKSNLTTVVNFKKFVEKLSIKASHRQDADRKKKRKALLLLEKYEEKGFLPKDLTQTSHLVRLAATELEKEFDGIEDKPTIVSLPGSVTGEVRKGWKLYGCLAAHNPEVEKLLERAKTEELNVKKELRDLTHLHHALDACVIGFASHFIPNEGNLWEALIKRNRQPHEDDLLVKMGKGHFIRDAKGHARLHEFSPELKQQITDRLGECRVVQHVPKRMGGLAGLEENTRGIVSIEVPDTEASPGKKSKGPKLKEIWNNKSGQPLPPSSALEGAVVHLQQYGPRDAKNQDKRSRKYTDEKAGKLLGLRPDNGDGKLRAIKGVRIVSTNFGLALWRKDGKPDGEAQMRIIVWRKVWPQLNDIAQKENGGKWPQVFRNGQTIHVPNAMGRSDYRGYWKIRSIKIGCLFNMIRADMVDHKDGVSWSKENVSVLSLLQCGMKAVPCGLTRES

SEQ ID NO: 8307 - protein, 1066 aa, synthetic construct
  REGION 1..1066: note = Synthetic
MNHQVPRPFEIALDIGHSSIGWAIFRNGEKFDLLGTGVVLFPADDCLAIKRRAYRRQRRHVRATRQRIERLKKLLLHIGALSETELNQPGCAWSWKLAAEVLSGSGRLLTWPELWDVLRWYAHNRGYDGNVRWSKQEENQEDSDKEKQARGLMQQHAKNTMAETFCAVLEIMPLGVKKSSRERFKGLNAAFPREVVYSEVKSILEKHAGVLPHLSPDLIRTLISNDNYFTRTWDDDAWQAVAVPTVQLPKRYRGSYLFGQSVPRFDNRIISSCPITYARILADTHDSKKAVRDSKVPAKKCREFLLFRWAMILANMTVNMGQGARPLTADERKAIHQVMIQGDAQIKCETGHLTKSQLKKVVIQKTGALLNNIDAYFLTPHAEDALRLRPDPLPSGRAPYTRQIMKQAIREVFEGKHPTEKGNCLYLSDDIKRAQLGRTLDEKTNNHLVRHRVLITRRLVHDIIKSYVGGNASQVGRITIEVNRDLQAFSGKTNKEIEGELNQMLKDHSSVVKKLEKDLAETNYRITAGLIRKARIAEDLDWTCPYSQKRYGAIELASGAFDKDHIIPRSLRQSDSLESLVITSKAINAMKGNRTALQFIKEFGAKDINGDLGVGKEKSNLSSESSFKKFVEKLNTKASHRQDADRKKKRKALLLLERYEEKGFLPKDLTQTSHLVRLAATELEKEFSDLENKPRVISLPGSVTGEVRKGWKLYGCLAAHNPEVQKLLERAETEEMNIKKEMRDVTHQHHALDACVIGYASHFLPNDGGLWEILIKRNRRPDETDMLISRDIFSRDSEGRARLRELSSSSKKQITDRLAECRVVQHVPKRMSGLVGLKENTHGIVAIEVPEKETGTNKKNKEPKLKEIWNNQDSNPIPVLDKLDGMIVHLQQYGPRDPKNGNKRKREALKQSALKLLGLRPENGSGKLRAIKGVRIISENFGLALWHKDGHSEGEQQIRVIVWHKVWPQLKAIAVKENGGKWPEVLRNGQIIHVPVAKGQSDYRGYWQILSIKNNKSGLAFNMIRPDMVKERDGVDWAGINISVNTLIKCGMTIINSTLTGVSLNM

SEQ ID NO: 8308 - protein, 1219 aa, synthetic construct
  REGION 1..1219: note = Synthetic
MATKTLGIDLGTNSIGWAIVENQETSKRLLDRGVNIFQVGMKVEKNVESPTVSKRTEARASRRKYFRQRCRKIKLLEILVEQKMCPPLSDDDLKLWRTKKLFPLNEDFIEWIHTSDNDDRNPYHDRHRCLHQRLNLDDEADRFTLGRALYHLAQRRGFLSNRKDPGEGSDDKDSETGKVKKSISELSAEMNACGCEYLGDYFYRLYGTGTRIRNRYTARKEHYLAEFDQICRTQQLDDALVRRLNNAIFYQRPLKSQKGSVGHCTFEKGKPRCNLSHPAFEQFRMLQVLNNIRIRRPGDAEFRSLNAEERQSAEPLFYRKSKPKFEFAEIAAAIAGKKTPRAFRESANPDAVLFNYPDTFTVTGSPVTARIREAFGNDYMAALRRDCKIADGKSDSQLVNDLWHALYSFDDEDALQKWLTDNYGLSADAARKLAKPLPQGYASLSLNAISKILPWLLRGMRYDQAVFLANLKAVLPADLWNSPDDREAVVEDIAAIVDDYSSNPLRKEYTLRQLICDRLLEIPEVEPRRLSRLYQPSVVEAYPVATADGQGRLMLGSPRNDGLRNPVVMRALFRLRHLVNALLASGKIDRHTIVNVEMARELNDANRRKAIYDYERNREKENLAYAAEIAKLYREETGRTIEPTETDIQKYRLWKEQEGICLYTGQQIGVADFIGADPRFDIEHTVPRSKNGADALANKTLCECRFNRDVKQALIPAQLRNHAEILARIESLGWNGKIESLRKKISSLSHKQRATKKAKDRNIVEIHLLRMELDYWVTKIKAFTIKEVNGGFANRQAVDIGIISKYAIPYLHTVFEKVFTVKGATTAEFRKLWGLQDRNEKKVRDTHLHHCIDAITIACIGRNEYQNWAQYQADQERYRWLKGAEPVFPMPWPGFAADVRNTMAEVLVKHISQPDMIRQTKKKFRKRGKVQYSDRRDEEGNPIPLYLQGDTARARLHEDTLLGAIRVDGEEKYVLRKSLATLKDEKEAAKIVDPVVRAKVLDAIGRLGFKDAMASTIYMNEALKIPIRKVRVFTSVTNPLDLKQQRFESKHPYKNMVHVDNDSNYCLAVYEGINAKGKRKMRFKVITNLDAARKLNSHAAVKEDIIPLSDGDGFDLKYFLRTGDMVLLYENSPQELYQADSRELQRRLYKVRGLDKYGRMKLISATEARRTTDLQIKKGAYKSGEILRPFIGITYLQFNAMIEGVDFKLGLDGEVTFMR

SEQ ID NO: 8309 - protein, 1472 aa, synthetic construct
  REGION 1..1472: note = Synthetic
MDNILGIDLGTNSIGLSLRNTNFNGSIQNQLEYFTSIIFPSGVGKGKSGEFSYAAERTKHRSSRRLYQARRYKKWETLGLLIENDYCPLSMEDLEKWSKYDKAKGLKRQYPIHATNFEQWIRLDFDGDGKPDYANPYELRAELMEKQFDFTKQINRYKLGRALYHIAQHRGFKSSKGETIKEQEQNEKDNIQDFDLAEALKKSEEKKSGKLSEYMKKYNLPTVGCAYAHLRKNGIRVRNSIYQAVRSQYKDEIKQIFEYQNGLDKNSDFYKRLLSEKKGEGTIFYKRPLRSQKGQIGYCTLEPNKPRCPISHPEFEKFRAWCLINNIRFGEDLKETLTLEQKRELFHERFLLTRSSFKFEEIRKWIERETFMRLDYKAKTINYKDKTNVSGCPISGRLKNLLGEDWEKWMCKTGITKVIKQKKDGKYTERQVEIGYSSYDLWHICFSFDEPENVETFAKEKLHFDDKQAKQLVRIFFAIQQGYSMLSLKAIKNINRFLEEGLIYSDAVLLAKLPDIFKDRWAIEKDAIVSQIDLVIENNRKQKLLFNIVNTLIANYKSLGYDDEIQFNERFADHNTTYKLQPSDYNDIKTVTIKAIGEKTWAKKDEEKQKAILEQVAVLYQNFFASEQRDYYKLPKVADDLAKLLHEKYNFLQEKDLKKIYHPSMIEFYASAKEQHLDDGRWMKLLGSPVIGAFKNPMAMRVLHVLKKQINDLLKASLINGEETRIVVETARELNDANMRWAIETYQREREAENKEYEKILNEYFPNRNINDKEIEQARLMCEQHDIPESDILQQKEKIDKDKTLKSLIYKKDLTKYRLWLEQGCRCIYTGKMINITNLFDENAYDFEHTIPRSLSFDDSLANLTICDAHYNRTIKQNQMPTQLANYDKDANGYTAILPRLQPWIDKVERLKDNVEFWKTQSKRAQDKDRKNQCIRQQHLWKMELDYWKAKVDRFTMTEVTSGFRNNQLNDTRLITKYAYHYLKTVFNKVDVQKGKITSNFRKILGVQSTDDKKNRDKHSHHAIDATILTMIPSAAQRDKMLEIFYKIQEEEKLHRDTTVLKKELSKEIKKCNLPTNVSLIAPFIENNILINHVSKDQTLTPAHKRKRIRGKIVPLRDADGKIIYETNADGTVKKNKYGHPIPKAKQWITGDSIRGQLHKDSFFGAIKYPIIDKEGKPTRKNGSFIYEKESNGQDVISMVMRVPITSFTKEDELKKIVDPTIRASIAKTIAKRKEEGKSFKAAIEEPIWLLGKDGNEIKIDKNGLPISPIRHVRCKVAAGRGFFTKDKAIEVKEQTYPSKYPYKNIYYAQNDGNYLCLLYEGVKKGKVVRQFKFINYFETISLGIKNTNSLYSEPYFQKIEDRKTELKLSAVIKTGTHILMWKDSPDELESLTNEQLSRRLFVVYKFNLKGANCIYLENHLEARNEIPQKEDYTIFDTTKYQARLTLVANGFNCLIENRDFKINAIGNIEWL

SEQ ID NO: 8310 - protein, 1455 aa, synthetic construct
  REGION 1..1455: note = Synthetic
MSKILGLDLGTNSIGLAIRDTDNGKNLEEQLERFAVTRFKSGVGNGQSGEFSYAAERTSHRSPRRLYQARKYRIWATLKILIEYGYCPLSMDDLEKWSKYDKAKGLKRQYPVNAEKFEQWVRLDFDGDGDIKYSSPFQLRAELMEKQFDFSNETDRFKLGRALYHIAQRRGFRSSKGETIKEQEQAEIDANLENEIDLSTELKKSEEKKSGKLVSYMKEHNLPTIGCAFHHLEKSGIRVRNSEYQAVRSQYKDEITAIFSFQNGLNIDSDFYKRIISEKKNEGTIFYKRPLRSQKGLVGKCTLEPKKARCPISHPEFEKFRAWCFINNIQYRKTTDDDWQNLTMEQKQKLYQDKFLRTKSHFKFQEIREWIEKEIKDDTRAYILEYTQKKEMRTINHKDNTSVSGCPITGRLRNLFGENWEQWTLQTSHERANHKTGEIHTITYDIHDVWHVCFSFDEPEFVEEFARNELNFDAQQTKQLVSVWGAIAQGYAMLSLKAIRNINRFLLKGLIYTDAVLLAKLPEIFGDKWSENENDVVAQIDDIIAQNREEKQIYNIANALISNYKSLDYDDELQYNEKFAEHDYQYELQPSDYDDVKKVTIEAIGEKTWANKTEAEQNDILSKVAALYQQFFFSQERDYFHLPKLADALAKYLSKRFAFLSEKSLSKIYHPSMIAYYAPAKEQRIEDGRYIKLLGSPVIGALKNPMAMRVLHTLRRQINYMLKNGFIDEDTRIVVETARELNDANWRWAIETYQEEREKENKEFEKIIKEYDSQRNITHEDLDKVRLLAEQYDIPEQGEIPNDTPKSKKKKEKIEKANPYKKDIAKYRLWLEQGCRCIYTGNPINMGTLFGDNQVDLEHTIPRSISFDNSLANLTVCEAHFNRTVKKNQIPAQLQNYDEILGRIQPWIKKVETLNNNIEYWTAQSKRAQDKTRKDYCIRQRHLWELELDYWQKKVNAFTTKEVTSGFRNSQLNDTRIITKYAYHYLKTVFNKVEVQNGRYTADFRKMLGIQSIDEKKNRDKHSHHAIDAAVLTMIPVAAKRDRMLELFYQIEEDEQLHKNVTTKKEKLRKEIAGCQLGKNVSTVTEIIEQNVLVNLVGKDQTLTPAKRKARSRGKEIFVTNSKGEKVNKWITGDCIRGKLHKESFFGAIKIAKTDEQGFLIKENGMFVYEKDANGNDIISMVKYVPINSFKNEQDLNKIIDPFVKKSILQVLAKRKQEGKSFEAAIAEPIWLLDKDCNEIKQDKKGKKLCPIRHVRCRVSAGRGFFTKDKAIEVKEQTYKSNKDYKNYYYAQNDGNYLCLLYEGLHKGKIERQFRLINYFEAVQLKIKNANDLWQEPYFKTLRNGKKQYNLSAIIKVGTHVLMWQNTPDEIYELSKSQLSSRLFVVYKYNSMGSNFIYLQNNIEARLDNEIKDDDATFNSGRYQARLHLVANNFNCLIEGRDFEITPMGEIKFYD

SEQ ID NO: 8311 - protein, 1429 aa, synthetic construct
  REGION 1..1429: note = Synthetic
MAGKILGIDLGTNSIGLAVRDTDNGDNITDQLEYYTSIIFKSGVGNGDKGEFSYASERTRYRSIRRLYQSRKYRIWATLRLLIEYGCCPLTNEELDQWSKYDKSKGLKRQYPINATKFEQWVRLDFNYDGIPEYSSPYQLRAELIDRLIDWNDQTDRYKFGRAMYHIAQRRGFKSSKGETLKEANEDEDSSTIDISEAMQKSEEKKSKVLEEYMRSHNLQTVGCAFALLERDGIRVRNSEYQAVQKQYREEVDVICKRQNIHLKDPELYTRLISTKKGEGTIFYRRPLRSQRGNVGECTLEKGRRRCPISHPDYEEYRALTFINNIKFRLEEDGKWLKLSNEQRNRLFEKLFTRANATFKFEEVKNWIAKEYPGHDFNYKNHTINYPDYTTVSGCPVINRLSKIMGNEWRTAVIETDKCRTNYKTGEIHTIRYNYEDIWHLCYNSDDYEELADLAKVRIGLNEEQIGNIKRLWSVLQEGYAPLSLKAIRNILPFLREGMIYSEAVAIAKIPDIIGKEKWTECKETINEEIKRISAKASTLRTEYNIANTLIANYKSLSIENQKAYRDYHYKLDGRDKEDVLKCIIDSIGLKVWNTLQLEEQQFIQETVESLYQQFFSSTKRDYYKLPHQSDALKEYLSQTFPEITPKEKWDALYHHSQISLFPHQKAIIDDIDGCIRSYYQLGTPNIGSIKNPVAMRALHTLRRAVNELLKQGMIDEDTRVVVETARDMNDANWRKAIERYQNERKKENDLITNIIKDFRPNYSDDDIEKGRLLFEQIESGDFKEPYIDKYAKASRIQKEKAERFALDLQKYKLWKEQRFRCLYTGDAISITKLFDGNAVDIEHTIPRSISFNDSLTNRTVCSTHFNRAVKGNLIPTQLSNYEETKERIKPWEEKVEHCKSQIELWKKNARTATTVDRKDECIQQKHLWELELDYWQTKVKTFTIQKDELDLGFRNRQLVDTRIITKYSFHYLKSVFTRVDVQKGRITADFRKILGVQSVDEKKDRAKHSHHAVDATILTMIPVAAKRDRIIELFYQVQEAPDEEKASLYSKLSDEIKSCRLGNISNLVETIGTNILINHISKDQTLTPAKRKLRIHGKIQYKDKQHKEPYYVQGDCIRGSLHKDTFYGAINNGDNTLRLVVRKKLTSLGIKNNKPIKEYNDKYLEPIVDIGLRKAISIQVQQFMKEKGLTFSKALEETYYLLDKEGTPIKTDKYQHPISPIRHVRCYVKAGVGYLKTDTALHIKEHTYTSKNEYKRTYYAQNNGNYICLLYEGIVNGQEKRKIRPLNLFEVSQLHLTNTEVLFHEPEFALYKHKKELPLKAIIKKGTRILFYVNQKEELMDMDNCKLSSRLYTVYKSNINSGTPYIYLRHHLEAREEKDCYKQEFATSYDSHRYIAYLSVTADNFKALIEHIDFEIDPLGNITFKSNQ

SEQ ID NO: 8312 - protein, 1429 aa, synthetic construct
  REGION 1..1429: note = Synthetic
MAGKILGIDLGTNSIGLAVRDTDNGENITDQLEYYTSIIFKSGVGNGDKGEFSYASERTRYRSIRRLYQSRKYRIWATLRLLIEYGCCPLTNEELDQWSKYDKSKGLKRQYPINATKFEQWVRLDFNYDGIPEYSSPYQLRAELIDRLIDWNDQTDRYKFGRAMYHIAQRRGFKSSKGETLKEANEDEDSSIIDISEAMQKSEEKKSKVLEEYMRSHNLQTVGCAFALLERDGIRVRNSEYQAVQKQYREEVDVICKRQNIHLKDPELYTRLISTKKGEGTIFYRRPLRSQRGNVGECTLEKGRRRCPISHPDYEEYRALTFINNIKFRLEEDGKWLKLSNEQRNRLFERLFTRANATFKFEEVKNWIAKEYPGYDFDYKNHTINYPDYTTVAGCPVINRLSKIMGNEWRTTVIETDKCRTNYKTGEVHTIRYNYEDIWHLCYNSDDYEELADLAKERIGLNEEQIGNIKRLWSVLQEGYAPLSLKAIRNILPFLREGMIYSEAVAIAKIPDIIGKEKWTECKETINEEIKRISAKASTLRTEYNIANTLIANYKSLSIENQKAYRDYHYKLDGRDKEDVLRCIIDSIGLKVWNTLQLEEQQSIQETVESLYQQFFSSTKRDYYKLPHQSDALKEYLSQTFPEITPKEKWDALYHHSQISLFPHPKATTGDIGGCIRSYYQLGTPNIGSIKNPVAMRALHTLRRAVNELLKHGMIDEDTRVVVETARDMNDANWRKAIERYQNERKKENDLITNIIKDFRPNYSDDDIEKGRLLFEQIESGDFKEPDIDKYAKASRIQKEKAEKFALDLQKYKLWKEQRFRCLYTGVAISITKLFDENAVDIEHTIPRSISFNDSLTNRTLCSTHFNRAVKGNLIPTQLSNYEEIKERIKPWEEKVEHCKSQIELWKKNARTATTVDRKDECIQQKHLWELELDYWQTKVKTFTIQKDELDLGFRNRQLVDTRIITKYAFHYLKSVFTRVDVQKGRITADFRKILGVQSVDEKKDRAKHSHHAVDATILTMIPVAAKRDRIIELFYQVQEAPDAEKASLNSKLSDEIKSCRLGNISNLVETIETNILVNHVSKDQTLTPAKRKLRIHGKIQYKDMQHKEPYYVQGDCIRGKLHDDTFLAKIKPPKYVKDDNGDYIISREHGKTIYEEEPIFVVRRELNKLFTGRSNWTWEILEKNIVNKELYSIIRKQFPEDVTFKEAVTKGIYMLDKRGNKINRIRHIRCITDNKEPLPIKKQTYLSKQEYKTNYYAGNNTNSYMAIYWSGKMGDKRLKEVRTLFDITKSKKLFGNISVHDSFEKSKGNIPLYAIIRPGTNVIVFDKNEIKKGNDAPTEMIARLREMDDDELQKRLYVINSFEKNGTTILIHNNEARPEKELGRGQSFIDLSNPNPKDRVSITTRYMLIEGIHFTISGLGKISFDKND

SEQ ID NO: 8313 - protein, 1410 aa, synthetic construct
  REGION 1..1410: note = Synthetic
MAGKILGIDLGTNSIGLAVRDTDNGENITDQLEYYTSIIFKSGVGNGDKGEFSYASERTRYRSIRRLYQSRKYRIWATLRLLIEYGCCPLTNEELDQWSRYDKSKGLKRQYPINATKFEQWVRLDFNCDGIPEYSSPYQLRAELIDRLIDWNDQTDRYKFGRAMYHIAQRRGFKSSKGETLKEANEDEDSSTIDISEAMQKSEEKKSKVLEEYMRSHNLQTVGCAFALLERDGIRVRNSEYQAVQKQYREEVDVICKRQNIHLIDPELYTRLISTKKGEGTIFYRRPLRSQRGNVGECTLEKGRRRCPISHPDYEEYRALTFINNIKFRLEEDGKWLKLSSEQRNRLFERLFTRANATFKFEEVKNWIAKEYPGHDFNYKNHTINYPDYTTVAGCPVINRLSKIMGNEWRTTVIETDKCRTNYKTGEVHTIRYNYEDIWHLCYNSDDYEELADLAKERIGLNEEQIGNIKRLWSVLQEGYAPLSLKAIRNILPFLREGMIYSEAVAIAKIPDIIGKKKWTECKETIIEEIKRISAKASTLRTEYNIANTLIANYKSLSIENQKAYRDYHYKLDSRDKEDVLRCIIDSIGLKVWNTLQLEEQQFIQETVESLYQQFFSSTKRDYYKLPHQSDALKEYLSQTFPEITPKVKWDALYHHSQISLFPHQKASTGDIGGCIRSYYQLGTPNIGSIKNPVAMRALHTLRRAVNELLKQGMIDEDTRVVVETARDMNDANWRKAIERYQNERKKENDLITNIIKDFRPNYSDDDIEKGRLLFEQIESGDFKEPDIDKYDKASRIQKEKAERFALDLQKYKLWKEQRFRCLYTGVAISITKLFDENAVDIEHTIPRSISFNDSLTNRTLCSTHFNRAVKGNLIPTQLSNYEEIKERIKPWEEKVEHCKSQIELWKKNARTATTVDRKDECIQQKHLWELELDYWQTKVKTFTIQKDELDLSFRNRQLVDTRIITKYAFHYLKSVFTRVDVQKGRITADFRKILGVQSVDEKKDRAKHSHHAVDATILTMIPVAAKRDRIIELFYQVQEAPDAEKASLYSKLSDEIKSCRLGNISNLVETIETNILINHISKDQTLTPARKRRRLGKKDKKVQWLQGDSIRGSLHQETFYGAISDGKKNLRTVIRKPLKSLKEKDFDSIVDPSVRHSIETQVKQRMTEESLSFSKALEGDIWLLDKDGVPIKQDKHGHDIAPIRHVRCYAKAGRGYFKIDTAIQIKQQTYLSKKEYKKHYYAQNSDNYLCLHYEGTYKGKHQQVLRLINYYQIAQLHIRNSDVLFNEPEFACYEGVKTMVLKNIIKKGFRVLLYVNHPDELRDMDPDKLSKRLYVIYKFNAVGTPSIYLRHHLEARKETECSTTELGTSFTPLSRASYLTLKSNNFKALIEHSDFEIDPLGKITFKSNQ

SEQ ID NO: 8314 - protein, 1401 aa, synthetic construct
  REGION 1..1401: note = Synthetic
MRKTLGIDLGTNSIGLCLRDEDKGIYLRNQLDFFTSVIFKSGVGRNKTGEFSYAAKRTERRTSRRRYQARRYRIWNTLEVLIEYGFCPLSKEDLEKWSRYDLAKGLKRQYPVEAKEFEQWIRLDFNGDGVADYSSPYQLRAELMTTRLDFTNKTERFKLGRALYHIAQRRGFKSSKGETIKEQETDRNTLEDDAGMDILVELKESEEKKSKNLVEYMQEHNLPTVGCAYAHLEKEGVRIRNSEYQAVRSQYKEEVQKIFEYQTGLDGEREFCRRILSEKKDEGTIFYTRPLQRKKDTVGKCIFEPAKYRCPKSHPQYEIFRAWQVINDIQYRFNTHEEWQTLPMGLKRKLLDNKFMRTTSYFRFGEIRKWLSKELKFAFSYEDETMKCEDDTNVYGCPVCGRLKEILGGDWQSTILNVTRTNPKNHVEYPTKYDYEDLWHICFSFEDVEYVEEFARQELHFNESQVQQFVRMWGAMPSDYSMVSLKAIRNINYFLQQGFIYTYAVLLAKLPEIFKERWKEEEHAITKDIDNLVKENRTQKSILNLANTLIANYKSLDVREQFAFRNMAYKLDADDLRDVENVIVAAVGANRWKKKTKEEQQYLLDAVSAKYQHFFATPERDYYKLPKLTDSLADYLKQRYSFLTEKDLNKIYVPSPTKLYPSAKEQELDDGREMRLLGSPVIGALKNPVVMRGLHVLRNQINTLLIDGVIDEDTRIVVETAKDVNDANMRWAIEAYQRIREAENKEFEKVIKEHFPDRIITEDDIDKTRLLLEQHDIPEIEKEIKQEEVEKKKKREIKFELFRKDIAKYRLWLKEGGRCVYTGKNIQMDTLFVGNNVDFEHTIPRSMSFDNSLSNLTVCDARFNRNDKKNRIPSQLLNYDEILQRIQPWVEKVEKLKGNVSFWGEQAKRAQDKPRKGYCMRQKHLWRMEWDYWQKKVDAFTRTEVTSGFRNSQLNDTRIITKYAYHYLRSLFNRVEVQKGQYMSDFRKMLGIQGIYRKKNRDKHAHHAIDAAMLTLIPVAAKRERMMELFYKIEEEKRLGNNDISMLVWQLEKERKECGFKNAAGIDEFIENNIIVNHISKDNALTPAKRKGSRQGKEIWMKGDSIRGQLHGETYYGAITQAQKDANGKIIRDGKGKMCIDEQVRYYVARKELKFKKGDNDSGFKDWEELEKAIVDQSLLTKMKQQFPLGTSFKEAAEQGIFMLNRHGDKVNRIRHIRCYAHHVKKPLKIKRHTYLSDKEYKQYYYAEMGELYGMCKYESADTMKHEYKVWSLFDISEHRKAKLKDIPDSIVSRKGEPMMLVEQLKAGDMLLIYEENKDELQKMDSSRLAERLYVIEGFESDGKRIKLKKALHAKRKTGNGVSIKDFDAMPDQIRCGIATLNYMVRGKDFTIERGKIRFPE

SEQ ID NO: 8315 - protein, 1424 aa, synthetic construct
  REGION 1..1424: note = Synthetic
MDKTIGLDLGTNSIGLLLRNISKGTDILKQIEYFTSVVFKSGVGKEKSGEFSYAAKRTEKRSHRRLYQSRKYRIWATLELLIENGLCPLSMDDLNKWRIYDKQKGLKRQYPTWATDFEQWVRLDFDGDGIPEYSSPYQLRAELMERQFDFTEKVDRFKLGRALYHMAQRRGFKSSKGETISGQNAEEGKDVDISVEMKKSEEKTSGRLDEYMKENGLATVGSALYQLEKAGVRIRNSEYKAVRSRYKEEINCVFDFQNGLNKNSELFERLVSEKKGVGTIFYKRPLRSQKGLVGHCTLEPTKSRCPISHPEYEKFRAWSFINNIRFGESLNETLTLEQKLKLYEDKFLLSRSSFKFEEIRVWIENQIGRQLDYKLKTIKYKDKSNVPGCPISGRLHNLLGDNWESWHFDTYQNKTNKKTGETSTISYTALDLWHVCFSFDEPEFVEEFAKNKLGFEEKKTKEFVRIYGAIQQGYGMLSLKAIRNINRFLEKGLGYSDAVLLAKLPDIFQNKWHLVENEILAELHNFLAEYRNRKQLYGISNVLIANYKSLGYDEDLHFSERFADRNCDYKLQEDDYKEITRVVEEWFGPKSWGEKTNEERNRLICDVAVLYQQFFSSSIRDYYKLPKISEELAGYLKEKYPYLCEKKLKKIYHPSMIEFYAPAKETLLDDGRLLKLLGSPVIGALKNPMAMRVLHILRRQINALLKSTDEYGNSLIDENTRVVVETARELNDANMRWAIDEFQRQREAENREFEKIINEYYPNRLSNKSDTDRMRLVCDQHDVIENEDSIPEAIFNDDKNKVAQYRKEITKYRLWLEQGCRCVYTGKIINIKNLFDDNAFDIEHTVPRSLSFDSSLANLTICDAYFNRTIKKNQMPSQLPNYQDILNRIKPWFEKVEHLKSMVDFWKAKAKRAQDKSYKDQCIRQRHLWQMELDYWRNKVDRFTMTEVTTGFRNSQLVDTGIITKYAYHYLKTVFNKVEVQKGSTTADFRKMLGIQSVDEKKSREKHSHHAIDAAVLTMIPTAAKRDEMLKLFYEIQEKSKLGIDVSQYEKLLMRERKQCGLAGNVSEIVPFIENNILVNHLSKDQTLTPAKRKLRRRGKEIMVENSQGIMVNKWLKGDCIRGKLHGETFYGAITQAKKDNNQKSLLRDAKGSIIKENQIYYVVRRELKYKASSVESGFKDWDELEKAIVDKNLFKIMKSQFSENTTFKEACERGIYMYKREKRGFVYSEENRKNKIRHVRCYSSVKNPLTIKTQTYKSDSDYKNSYYAEMGDLMVMCKYESFDHSICEYHIWSVFDVSENRKAGVEDVPRVIMSKKKNIELFLAQMYRPGDMVLLYKNDVRELKEMDLINLLQRLYVVRGFENPSRIILVHHLNAQQDNVIGKGESVKDYQCLPQKIRCGVNTLSLLVDKIDFEISPRGIKFL

SEQ ID NO: 8316 - protein, 1431 aa, synthetic construct
  REGION 1..1431: note = Synthetic
MTKILGLDLGTNSIGVSLRNPDRGKNLTDQLEYFSSVIFKSGVGTGKSGEFSYAAERRKKRSLRRLYQSRKYRIWATLELLINNGYCPLSIEDLDRWRKYDKEKGLKREYPIDAVRFEQWVRLDFDGDGKPDYTSPYQLRSELMNRQFDFSDELERFKLGRALYHIAQRRGFKSSKGETIQEQEKDDFVDDNSEYDVTEALKKSEEKKSGKLVEYMEAHDIKTVGCAFYELEKSGVRVRNSEYQAVRSQYRKEIDLIFEFQNGLDFNSDFYKSLVSEKKGEGTIFYKRPLRSQKGTVGYCTLEPGKLRCAVSHPEFEKFRAWCLINNIKFGEGLKEELTLEQRRRLYNDRFLLTRPNFKFEDIRGWIEKEIGCSLDFRSKTINYKDNVNVSGCPVSARLKKLLGDNWETEVIETGECKTNKKTGEIKKLSYTAYDLWHICFSFDEPEFVKNFALSKLNFDEDKANQLVRIYGAIQQGYGMLSLKAIKNINRFLEKGLIYSDAVLLAKMPEVLGDQWEMEEDNVISHLDSIIKENRKQKLLYNIANSLIANYKSLDVVEQFAYKNFDYKLDNSDYDDIKKVTIDNIGEKSWNAKSNEEKSEILEKVANLYQAFFSSKKRDYYILPKVSDDLASFVESTYKNVNQKQLSKLYHPSMIEIYPSAREEKIADGRWMKLLGSPVIGAIKNPMAMRVLHSLRRQINGMLIAVDEDNNALIDENTSVVVETARELNDANMRWAIETYQREREKENKEYEKIIKNLFNDRVVSDDDIDKVRLLLDQHEIPERGSEQLEKTKKNKAEKNVPVYKKDVSKYRLWLEQGCRCIYTGKVINIANLFDDNAFDVEHTIPRSISFDDSMENLTICDAHYNRTVKKNQIPTQLSNYEEIKGRLQPWLNKVERLQDNVNFCKSKAKMAQTKDRKDYYIRQRHLWQMELDYWKSKVERFTMRDVTSGFRNSQLNDTRIITKYAYHYLKTVFNKVEVQKGAVTSNFRKMLGVQSVDEKKSRDKHSHHAIDATMLTLIPVAAKRDKMLELFYKIQEKKKFNENTTLLERELSKDIESCHFGGNISDVVPFIENNILVNHISKDQTLVPAHRRQRVREKVAWKYDEKGNIICDKNGNPQPLRWITGDSIRGQLHKDSFFGAIKQAQTNDEGKLLRDENGRILTTDNVSYVIRRELKYKENAQSAGFADWNDLENSIVDKNLFKIIRGQFSDGTSFKDAFERGIYMFKKNARGIIDFSEECKLNKIRHIRCVTSVKNPLPIKRQSYLSDKDYKNSYYAEMGDLYVMCKYESEDRTVREYRIWSLFDVSQNRKMGLEDIPSTIENKKHIKLVQTEQLRSGDMLLLYEHDPMELREMDFSELSKRLYVICGFENPGRVVMVRHLNSQADKDLGKGESIKSFAIMPEKIRCGINTLKFLRMGTDFHLTSMGVDFE

SEQ ID NO: 8317 - protein, 1482 aa, synthetic construct
  REGION 1..1482: note = Synthetic
MKVLGIDLGPSSIGLSVRNANRGNNLQEQLEYFSSVVFKSGIGKGQSGEYSYAAERRIKRSSRRLYQARKYRIWATLELLIKEGYCPLSLEDLDKWRKYDKKKGLKRQYPIHAQGFEQWVRLDFNGDGKADYSSPYQLRAELMQQQFDFTQQGDRYKLGRALYHIAQRRGFKSSKGETIKEQEATETDLLNEVEVDITEELKKSEEKKSKDLKAYMEANNLKTVGCAFAKLEDEGVRIRDSVYQAVRTQYKDEIRQIFEFQKGLDINSEFYKRLTSEKKGEGTIFYKRPLRSQKWLVGKCTLEGSKPRCPISHPEFEKFRAYSFINNIQYRKSTDDEWQNLTLEQKQKLYKDKFLRTAKGFDFKEIREWIEKDIRDNTRNYILRYDRDKEKRTINYGDKTNVSGCPISSRLKNLLGLDWEKVVLTTEKERINKKTGEVRKITYTAEDIWHIAFSFDEPEFVRIFAEETLKFDKAKSDAFVRLHNDIKPGYSMLSLKAIKNINYFLEKGFIYTESVLLAKLPEIFGEKWGENESEIVSQISSIISENRKEKDIKSIANALIAKYKSLSLDDGEQFAYKNHEYKLGENDLKDIENACIDKYGNRTWSKKSDDEKREIIKQVGQYYQSFFKSEDRDYYKLLRLSDSLAKYLLDNFEFLNVKELKKIYHPSMISFYIPAKEQQIEDGRWLKLLGSPVVGAIKNPMAMRVLHTLRRQINSLLKAVDEDGNQLIDENTRIVVETAREINDANMRWAIRAYQDGREAENKVYEKAINELLKEVQATDDNIDKVRLLCDQHEILGNDQLQEPSSEDKSQKKKIYFVEDYKKSKENEIKKYRLWLEQGCRCIYTGEIINIKKLFDDNVSDFEHTIPRSKSFDNSLENLTVCDAYYNRAIKKNRIPTELENYNKDATINGKLYSAILPRLKPWFDKVDRLKDNVEFWIGKSKKAADKERKDYCIRQRHLWQMELDYWQNKLNRFTMTEVTDGFKNSQLVDTRIITKYAYHYLKTVFDKVEVQNGRHTSDYRKMLGIQGIDEKKDRSKHSHHAIDATVLTLIPASAKREKMLKLFYEIEEDRRSNKDITEKTKELKKEIAQCGFGRNVNEIGNFIEENILINHISKDQTLTPTRKRWRTRGKVAWQRDKDGSIIYKNGEPQPKRWITGDSIRGQLHKDSFFGAIKYPKTDKYNIPIQGDDGKYVYETDKSGNEVISMVIRVPITSFKDEKDLDKIIDPTVKNSILKTIAKRQSEGKSFSVSINEPIWLLDSDGKEIKKDKNGRLLLPIRHVRCRVAAGRGFFTKDKAIEIKEQTYKSKKDYKRYYYAQNDGNYLCLLYECYHKGKLEREFKFINYFEVAKLGIKSSDDIKNEPYFNELSKNKKQYKLSAIIKTGTRVLMYSKKPEEIFDLENTELLKRLYNVYKYNFTGSNRIYLQQHLEARENEKIKNDEDFSVFDNTKYQARLNLVASNFNCIIEGRDFEISDSGKINFIN

SEQ ID NO: 8318 - protein, 1389 aa, synthetic construct
  REGION 1..1389: note = Synthetic
MSKILGIDLGTNSIGLAVRDTDKGNSFVEQLDFFSSVIFKSGVGTGTSGEFSYAAERTKKRSIRRLYQSRKYRIWATLELLIKNDCCPLSMEDLDKWRKYDKEKGLRRQYPIDAAEFEQWVRLDFDLDGKPDYTSPYALRAEIMQKQFDFTQQIDRFKLGRILYHIAQRRGFKSSKGETLKELSEAEITGELDFSTELKKSETKKSQKLVDFMEKNNIPTVGYAFHELEKQGIRIKESEYQAVRSQYKEEIKKIFEFQEGLDTNSEFFKRLTSEKKKEGTIFYKRPLRSQKGKVGTCTLEPGKARCPISHPEFEEYRAWCFINNILYRTNPTAEWQRLTLELKEQLFKEKFLRVKSYFPFSEIREWLSAKLNIALSNDKGKETINYPDKTNVSACPVSARLKNLLGDDYKQWTFETNKERINHKTGEVHKVTYSYLDLWHICFSFDEQEFVEEFAKNTLGFDDKKAKQLCTIYNNIQQDYASLSLKAIRNINPFLKRGLIYTDAVLLAKLPEIFGDKWSEVENDVVEKLKTITANNRHQKEVYNIVNDLISDYKSLDYDQRFAEHNTDYVLQENDYSDIECKLKRHFGEKAWTEKTNQEQEEIRKKVGELYQNFFRNSSRKYYEQPKLADSLANYLTETYFYLDTKDLQKIYHPSMIEIYPIASKVVLDDCRCVRLLKSPVIGALKNPMAMRILHTLRSQINKLIEEGKIDESTRIVVETAREVNDANMRWAIKEYQQRQEDENKAIEKIIGEYYPNEPISDDRIRKAKILIDQANITDTDKQEKDEVSNKGINDTWTKVKTSKIAKYKLWLEQNCCCLYTGKTISISELFDENKFDIEHTIPRSISFDDSLSNLTICDARFNRSTKRNSIPSQLPNYDEIKPRLEMWEKKVKSLKERVYHWKEESKKAQTKDRKDYCIRQKHLWNMELSYWEKKLNTFTITEVTDSFRNNQLNDTRIITKYAYHYLKTAFDHVSVQRGEITSTFRKIIGIQQIDEQKDRNNHSHHAIDAAVLTLVPSAKEKEKMMRLFYLMKEYKTNPAYRQELEKEKQTYFPNDVTAVKDYIEQNIFVTHIAKDQTLTPAKRRKRIRGKIDRKHEQWITGDCIRGSLHQDSFYGCIEIDGEQHFVIRRVLKYKANEKDKGFKNWKELENAIVDKALYKRLIKPFCPEGSEVPSVDFKTAIAEKGGLFDNGRKVRHIRCYTSVKKPLQIKEQTYKSKKDYKNYYYAEVGDLCTMCKYENKDTKEVKYIPYNLFEIAQNHKECGEFIPRTTQSDNNNTLYLCQKLTRGQMVLIYKDTPHELFDIDNDQLSKRLYVINGFEKKSCLIKLIHHANAQPDKELGKGESIKSFDNIPQKIRQSINGLKYLLIGVDFEIINGRIEFLNKSKHYD

SEQ ID NO: 8319 - protein, 1422 aa, synthetic construct
  REGION 1..1422: note = Synthetic
MTKILGLDLGTNSIGIAVRNTEKGKNLQEQLDYFSTVRFQEGVGKGKTGEFSFAAERTKKRSTRRLYQARKYRIWATLELLIKNNCCPLSLEDLEKWSKYDKNKGLKRQYPINAEKFEQWVRLDFDGDGVSDYSSPFQLRAELMERQFDFSKEIERFKLGRALYHIAQRRGFRSSKGETISEQEKEENTIVENEDLSVALKKSEEKKSGELIAYMQLHNLPTVGCAFARLEKEGVRIRNSKYQAVRSQYKEEIEAIFTFQKNLSRVDGFYKHLISEKKGEGSIFYKRPLRSQKGLVGKCLLEPGKSRCPISHPEFEKYRAWSFINNIQYKKQDEWCELTLEQKKTLYNEKFLRTKNYFEFEEIRKWIEKNITFHELKYDRDKQKRTINYKDNTNVSGCPITARLKNLLGENWENITIETCKERTNSKSGEVHSVTYSAEDIWHVCFSFDDVEYVENFAKNDCGFEAKQIKQMATLWGAILQGYSNLSLKAIKNINRFLEKGYIYTNAVLLAKLPDIFGSQWEQYSSVLEKSLDDILKENQYQRNVYSIVNTLISNYKSIDHENKFAYKDYTYKLQKNDFEGGAGLKGINEVTVEFFGEKTWKSKTTEEQTRIIESVSCLYQKFFESTQRDYYKIPKISDALADYVSTHYQFVSKKDLSKIYHPSMIEIYPKAKEQLLEDNRFMRVLGSPVIGALKNPMALRVLHALKKQINGMLLSGIIDEDTKIVVETARELNDANMRWAIAEYQKQRELENKEILEILKEFYKDKSIGDDDIDKARLLMEQPQENAKEDKDEKDFKYKNNVLKYKLWKEQGFRCMYTGKILKLSSLLNENEVDIEHTIPRSISFDNSLSNLTVCDAYFNRSIKKNLIPTQLANYQKEANGYSAIIDRLKPWIGKVEKLKDNVNYWKKQSKIAQAKERKDYCIRQRHLWQMELDYWQKKVNSFTTTEVTSGFRNSQLVDTRIITKYAYHFLRTVFNNVAVQKGAVTAEFRKILGFQGINEKKNRDKHSHHAIDAAMLTLIPFSAKREKMLDLHYRILEAQKLGGHYSSMVQELNKEIVSCGFGSINGIDSFIEENILVNHIQKNQVLTPAHRRMRIQGKVIWKKDEKGEVILDEYGKPIPKFLITGDSIRGQLHGDTFYGAIKQGKLKKNGALIRDKNGKVQTEEEIKYVVRRDLVYKKSSNDPGFSNWDELEKCIVNKNLIPMMKKQFNKEMSFKEACEQGIYMLDKQGNKVNKIRHIRCYTSIKNPLAIKKQTYLSKKEYKQNVYAEVGDLYVMCKYQNNELKNLYQVFNLFDIVQNRKINGDSIPNIIEKKEKIYNLKQVLKSGDMLLLYQKSIDELKEMDNQSLSQRLYVVERFETAGNLVVLKKHINAQIDKILGRGESVKDFKRTPERIRCGINTLNFLVKDSDFIFSTKGIEFY

SEQ ID NO: 8320 - protein, 1397 aa, synthetic construct
  REGION 1..1397: note = Synthetic
MSKILGIDLGTNSIGLAIRDTDKGETFVEQVDFFSSIIFKSGVGSGQAGEFSYAAERTKKRSIRRLYQSRKYRIWTTLALLIENGYCPLSIEDLDKWRRYDKEKGLKRQYPIEAIQFEQWIRLDFDGDGKPDYINPYELRAEIMQKQFDFNEEINRYKLGRILYHITQRRGFKSSKGETLKELSENEINEDLDLSVALQKSEEKKSQKLKDFMKEHNIPTVGWAFYELTKRGIRIKESEYQAVRIQYKEEIQKIFEFQEGLDTTSDFYKHLMSEKKGEGTIFYKRPLRSQKSKVGTCTLETGKSRCPISHPEFEEYRAWSFINNIKYRTSTTAEWKTLPLNLKQELFKDKFLRTKSYFKFEEIKNWLSSKLCLQLEYTNKKETSTINYKDKTNVVGCPISARLKNILGEDYKQWKFNSDKERTNRKTGEVHRITYDYLDIWHICFSFDEAEFVEEFAKCTLKLDDKQAKKLCTLHNNIQQEYASLSLKAIRNINPFLQKGLIYTDAVLLAKLPEIFKDKWNEVENDIVAAIDDIIKENRYEKEILDIVNDLIANYKSLDYGERFAEHNTEYILQSQDYTDIESKLKGHFGERTWNAKPCEEQEQIRKDVRKLYQIFFGSSSRGYFKQPKVSESLAEYLKKQYTYLNDDDLKKIYHPSMIEFYPKVKPTLLDDNKYVKLLGSPVIGALKNPMAMRILHTLRTQINQLIKEGKIDEYTKIVVETAREVNNTNKRWAIEEYQRKQEEENKEVEKIIRQYYQKDNISDDEIKKAKILLDQFDVEKDNKQEKKKDTQPDKLSDTWSKVKSNNIKRYKLWLEQNCCCMYTGKVIRISELFDNDKFDIEHTIPRSISFDDSLSNLTICDSHFNRSIKKNQIPTQLDNYNEIKSRLELWEQKVKSLKERVEYWKEQSKRSQTKDRKDQCIKQRLLWQMELDYWEKKLASFTIKEFIDGFRNNQLNDTRIITKYAFHYLKTVFDHVNVQRGNITATFRKIAGIQAKDEKKDRSNHSHHAIDAAILTLIPSAKQRDKMLELFYKVEEYKELQKEKEQVAYQEKLETEKTANLPKDVAKIKDHIEQNIFVNHISKDQTLTPTKRRKRIKGRIDKNKQWVITGDCIRGSLHKDSFYGCIKLDGERHYVIRRVLKYKATEQDKGFKTWKELYEAIVDKTLYQRLIKPFCNDNSDEPAIDFKTAMLEQGGLYDNGMKVRHIRCYTSIKNPLQIKRQTYNSKQDYKNYYYAEVGDMYAMCRYENKETKEVEYKTYNLFEVAENHKSMLEFIPHQIISKKNNRLYFIHKLIDGDMLLIYDNTATELFDMSNEHLSKRLYVVKGFENPSTIKLVQNSNARQDTDLGKGESIKSFNDLPQKIRQSINKLHYLLRGTDFEIINGRIEFLNKMNHYD

SEQ ID NO: 8321 - protein, 1474 aa, synthetic construct
  REGION 1..1474: note = Synthetic
VKSLSLRILTAKIQYNFEITKLNHKNMSNKILGIDLGTNSIGLSLRNTEIVGGVKEQLEYFTSIIFPSGVGKNKTGEFSYAAERTKNRSSRKIHKVHRYRKWETLKLLIENDCCPLSMEDLLKWSKYDKSKGLKRQYPIHATHFEQWIRLDFDGDGKPDYTSPFELRAILMEKQFDFSDKTNRYKLGRALYHIAQRRGFKSSKGETLKEQEKNEKEELLEVDINEALKKSEEKKSGKLAEYMKAHNLPTVGCAFYHILKDGIRVRNSEYQAVRSQYKEEISRIFEFQKGLDKESDFYKRLVSEKKGEGTIFYKRPLRSQKDAVGKCTLEPNKPRCPISHPEFEKFRAWSFINNIKFGEELREELSPEQKKDLYKEKFLLSRKSFKFEVIREWICERTGMTLNYKNKTINYKDSTSVSGCPISGRLKRLLGDEWESWKLESTEEKINKKTGEVRKITYDVYDLWHVCFSFDEAEYVDDFAKNKLKFDDNKAKQLVAIFNDIQQGYSQLSLKAIRSINMFLQEGMLYNDAVLLAKLPDIFRGRWDEAKENVVSQIDNIMKENRKEKLLFSIANHLIGNYKCLTYDERFADHNYDYILDDSDYKDIKDAILNVVGEKKWSKKDASEQSEILNDVAKLYQDFFASSKRDYYKTRKVADALADYLSSKYDFLSEKELKKIYHPSMIEFYSPAKEQRLDDGRWLKLLGSPVIGALKNPMAMRVLHTLRKRINTMLKKSMIDADDTRIVVETARDLNDANMRWAIEAYQREREKENKEYGKILKEYYPERSISDKDIVQIRLMCDQHDIPGDDNNTDMEIRKTVKDKKDESPVYKKDVTKYRLWLEQGCRCLYTGRIINISNLFDDNAFDIEHTIPRSISFDDSLKNLTICDAHYNRSVKKNQMPTQLANYNKDANGYTAILPRLQPWIEKVERLKDNVDFWKAQSKLSQDKERKDYCIRQRHLWEMELDYWKSKVERFTMADVTSSFRNNQLNDTRIITKYAYHYLKTVFGRVSVQKGSVTANFRKILGIQSVDEKKSRDKHSHHAIDATVLTLIPNAEMRDKIIKTFYSIQEKERFNEDVSALKKELTKELKNCQLPSNISEIVPFIEENILVNHISKDQTLTPAHRRKRIRGKIVPKRDEHGNIVYETNADGSTRKNKHGHPIPQAKEWISGDSIRGQLHKDSFFGAITQWLKDDNGEKVLDKEGHRISDTKIYYVIRRLLKYKSSDIDSGFKNWEELKSAIVDKDLFIIIKNQFPENTSFKEACEQGIYMYKKNRNGILDYSDECKLTKIRHIRCFTSVKNPLAIKSQTYISTKPYKQNYYADMGDLYAMCRYESVDKKEKEYHLFSLFDISKNRKLGLEDIPTTIESKKNHRLFLKHMLRKGDMLLVYTDSEEALKEKDYKTLLQHLYVVRGFENDGNRIILQKHVNAQQDKDLGKGESVKGSHQMPEKIRCGINTIKYLLCGIDFKITPKGVEFA

SEQ ID NO: 8322 - protein, 1436 aa, synthetic construct
  REGION 1..1436: note = Synthetic
MEKSLGLDLGTNSIGLTLRNDDYSKDIIEQIEYINSIIFQSGVGKEKSGEFSFAAKRTEKRSARRLYQSRKYRIWATLKLLIENDYCPLSLADLEKWSKYDKEKGLKRQYPIKATDFEQWVRLDFDGDGKPDYSSPFQLRAELMEIQFNFTNQADRYKLGRALYHIAQRRGFKSSKGETIKEQEKNEIDYSSEIDISTELQKSEVKKSGKLTEYMEEHNLPTVGCAFAHLEKDGIRVRNSDYQAVRSQYKDEIKQIFEFQNGLNTNSDFYKCLVSEKKGDGTIFYKRPLRSQKGLVGYCTMEPNKSRCPISNPEFEKFRAFCLINNIRFGEELKESLTLEQKHQLYKEKFLLTRVSFKFSEIKEWIQKKTGKKLEYSKTTKTINYKDNTSVSGCPISGRLKNLLGENWETWKYESTEEKANKKNGEIRRISYTTNDLWHVCFSFDEPEYIEEFAKNKLHFDDDQTKQLVRIYGSIQQGYGMLSLKAIRNINRFLEKGLIYTDAVLLAKLPDIFKEKWNDVEANIISRIDEIISENRKQKQLFFIVNSLIANYKSLDVTEQFAYKNYYYKLVASDFNDIKTTTINVIGQKTWEKKDINEQNKLLNNIADLYQKFFSSEDRDYYKLPKVSDALAEFVSREYQFISASDLKKIYHPSMIEFYAPAKLEKTEDDRYLKLLGSPVIGALKNPMALRVLHILRKQINDMLKASMIDENTRIVVETARELNDANMRWAIEAYQRERESENKEYERIIKEFYSGRDIKTSDIDQVRLLCEQHDISENIIENKQKGNIKVPTYKKDITKYRLWAEQGCRCIYTGKIINITNLFDDNAFDIEHTIPRSISFDDSLANLTVCDAHYNRTIKKNQIPTQLPNYEEIKLRIQPWIQKVDELKDNVEFWISQSKRAQDKERKDYCIRQRHLWQMELDYWQNKVNRFTMTEVTSSFRNNQLNDTRIITKYAYHYLKTVFNKVEVQKGSVTSNYRKMLGIQSLDEKKSRDKHSHHAIDATVLTLIPSAAQRDKMLELFFKIQEKKRLNESTETFEKELEIEKKKCGIAGNISKIVPFIEENILVNHINKDQKLTPAHRRKRIRGKIVPLKDSDGNVIYEINDDGTIKKDKHGHSIPQAKEWITGDCIRGQLHGETFYGAITQGLKDENGKLLRNDDGSIKTNEEILYVVRRELKYKANDNDSGFKNWEELEKAIVDKDLFKIIKNQFKENTLLKEACASGIYMYKKNKSGVIDYSDECKVNKIRHIRCLTSIKKPLEIKEQTYLSKKTYKRKYYAEMGDLYVMCKYESSDKKEKEFHIFSLFDVSINRKTGIEDIPNCIESKKRTKLILSQQLKRGDMLLIYKNSVEEIKDMDTKTISQNLYVIKGFENPSLIKLVKNSNAQADKDLGKGESIKDYEKMPEKIRCGINTLKYLIKDKDFYLTPKGITFRKDL

SEQ ID NO: 8323 - protein, 1395 aa, synthetic construct
  REGION 1..1395: note = Synthetic
MSKILGIDLGTNSIGLAIRDTDKGETFVEQMDFFSSIIFKSGVGSGPSGEFSYAAERTNSRSIRRLYQSRKYRIWTTLALLIEHKHCPLSMEDLDKWRRYNKEKGLKRQYPIDAIKFEQWVRLDFDGDGKPDYTNPYELRAEIMQKQFDFNSEIDRYKLGRILYHIAQRRGFKSSKGETLKELSEKEMNEDLDLSDALQKSEEKKSQKLKDFMKTHNIPTVGWAFYELTKQGIRIKESEYQAVRIQYKEEIQKIFEFQEGLDINSDFYKHIMSEKKNEGTIFYKRPLRSQKGKVGTCTLEQGKTRCPISHPEFEEYRAWSFINNIKYRTSTTAEWQTLSLKLKEELFKDKFLRTKSYFKFEEIKNWLSAKLSIQLECNDKKENSTINYKDKTNVIGCPISARLKNILGEDYKQWKFKSDKDRTNLKTGEVHRIIYNYLDIWHICFSFDEAEFVEEFAKDSLKFDNKQAKQLCTLHNNIQQDYASLSLKAIRNINTFLQKGLIYTDAVLLAKLPEIFKDKWREIEDDVIADIDNIIKENRYQKEISDIVNDLIADYKSLDYDKRFAEHNTEYILQNQDYTDIENKLKSHFGEKTWIAKPCEEQEQIRKDVCELYQIFFGNSTRDYFKQPKVSESLAEYLKNKYTYLNDDDLKKIYHPSMIEIYPIAKKEIINGNKYVRRLGSPVIGALKNPMAMRILHTLRSQINKLIDESKIDEHTRIVVETAREVNDANKRWAIEEYQRKQEEENKEIEKIISKYFEEGNISDNDIRKAKVLLDQFDIEKNDKQAKEKKTKSDDKLSDTWSKVKSDNIKKYKLWLEQNCCCMYTGKVITISELFDGDKFDIEHTIPRSISFDDSLSNLTICESHFNRSIKKNQLPTQLDNYNEIEARLETWRKKVLSLKDRVNFWKEQSKRAQTKDRKDQCIRQRLLWQMELDYWKKKLASFTITEFIDSFRNNQLNDTRIITKYAFHYLKTVFRHVSVQRGEITSNFRKIVGIQKEDEKKDRSNHSHHAIDAAILTLIPSAKQRNRILETFYQMKESKETNNKDKLEKTTKELEKAKRAALIPDAVAAIKDHIEQNIFVNHISKDQTLTPAKRRKRIRGKIDKNKQWIITGDCIRGSLHKDSFYGCILIDGKKYFVIRRALKYKANDKDKGFKTWNELENAIVDKALYRRLVKPFCQEGAEEPSIDFKTVMLEKGGLYDNGIKVRHIRCYTSVKNPLQIKKQTYKSKQGYKNYYYAEVGDLYTMCKYENKKTGEIVYQPYNLFEVAANHKITHEFIPSKYDDKVLTQQLVKGDMLLIYKNNPNELFEMDNVQLSKRLYVIDGFERKSCLTKLIRSSNAQQDKELGKGESIKDFNNLPQKIRQSINKLHYLLRGIDFKIINGRIEFLNKTKYYD

SEQ ID NO: 8324 - protein, 1388 aa, synthetic construct
  REGION 1..1388: note = Synthetic
MEKILGLDLGTNSIGLAVRDFDNTVPITEQIELVGTNIFPSGVGKDKSGEFSYATARTKKRTVRRMYQARKYRLWATLELLINNNCCPLSIEDLDKWRKYDTKSGLKREYPINAIKFEQWVRCDFGDGKNTNPYELRYELMNRQFNLEDETERMKLGRALYHIAQRRGFKSSKGETVSDKDDDKVVEKEDVDVSEMMKKSEIDKSAKLDEYMKVNKLPTVGWAFHHLITNGVRVRNSDFQAVRSQYKDEIKKIFEFQKQLDTESDFYKHLVSEKKSEGTIFYKRPLRSQKGLVGKCTLEPDKDRCPISHPDFERFRAWCFINTIKFGQDCQQELTNEQKKKLFNEKFMLLKSDFKFEEIRKWIEKEIRKPLDYKAKTINYKDRTSVSGCPVSGRLKKLLGDNWQSWKYETSFQKKNGETKHACYDAYDLWHVCFSFDDVEYVEEFAKNKLNFNNEQTKQLVKVFGAIKQGYAMLSLKAIRNINRFLEKVMLYSHSALMAKLPEIFGEEKWAENENKIVSLLQNATDVNRKQKTIYYIVNSLIANYKSLEPNEQFARKNTDYVLSESDKNDVSAMAQKTFGEKSWQNKSSEERNEIIATTEKLYQEFFASSDRDYYKLPKLAEALAECIKKEYDFIDPKQLKKIYHPSMIEVYAPAKDQTIEDGRVMKLLGSPVIGALKNPMAMRVLHSLRHMINKLLTTNDENGNPIIDENTRIVVETARDLNDANMRWAIETYQRERENENKKFAEIINEFLPNREVSDEDKDRMRLLMEQLKTPENQKEKQKFERYKKDVTKYRLWMEQGGLCIYTGKPINITNLFAENAFDIEHTIPRSKCFDDSLANLTICEAHFNRSIKKNQIPSQLSNYDDILSRIQPWKDKVEHLKDNVEFWKSQSKKAMTKERKDDCIRQKHLWQMELDYWKNKVERFELKEVTDGFRNSQLVDTRIITKYAYHYLKTVFNKVEVQKAGVNVAFRKMLGIQIDEKKSRDKHSHHAIDAATLTLIPTAVQRDKMLELFFKKLEGYQTSDWENQLNQERRKCGLGGDLSAIVPYIENNILINHQSKDQTLTPAHRRKRIRGKIVPNVWLTGDCLRGKLHGESFYGAIKLGKKDADGKSLLRNPDGSIVQENEKKYVIRRELKFKKNDQESGFKNWDELEKVMVDKALFATIKSKFPEGTSFKDAYEAGITDPQGNKIRHIRCFEPTVKNPLAIKKQTYLSKYPYKQSYYAAMGDLYVMCKYENISKTQTKYIIWSLFDISQNRKERTPDVEDIPTTLTVEDKKHNTFVLNLVCKIRKGDMVLLYENSPDELVEADKNLLSQRLYVVTGFENPSRILMVKHINAQKDSDLGKGEALTTFDKMPEKIRQSISKLNFLLRGKDFDFSADYGIVFK

SEQ ID NO: 8325 - protein, 1534 aa, synthetic construct
  REGION 1..1534: note = Synthetic
MAKKVLGLDLGTNSIGWAIVDKENQKILDAGVRIFQEGVKKDTIGKGDKEESKNSERRQHRQARRLNFRKRIRKAHLLKLLIDNQMVPLTIEELNKWRYWNKNEKSSGKIFPHSEAFVNWLRMNPYLLRKKGLHEDLTLFEFGRILYHFIQRRGFMSNRKGKAKDTGVIYKGKENMDGVDETRELLQNRTLGEALFEIHPKEGEAFFIRKDIKGKEVRVRARYTLREMYVDEFDRLWEKQSARLGLTDKMVSIRRKVFLKGTINQKRNQNKLNHLIDRYGKGNVIVYDDSIGVLEKKPLKEVLAGKIESTEEGVRFKSNESVLFWQRPLRSQKSLLSKCSFESQKIFDKKLDKWIVIGKSPAYTSHPDFELFRAHQFINNIKIGKANHLLNDEQRADVLDLINSKDKAFEFKVIKKALKLPHEFFNYEDDFKVAGNKTHASVASVFSKKDWEEIKEEIWHDLVFYEDSDLLSAKLMRRYHLDEQSANKLSKIELEEGYASLSLKAIRNILPFLEMGYRYSTAVILGGVKNSFGERWERFSIVHDEIIRDVVRITENEKHKEFELVEQVKLYLSDPENKYGFNKDDKAFSKLYHPSQAIEKKALKTRLSEIENLRNPIVQKALYEMRRLINSLLDRYEEPNGDGFRFDRIQVEFGRELKNNKKRRQEMSIRNRENENKNALARERLSEYGLRPSRNNITKYLLYQEIEQKNGIVQCPYTGRTISISDLLGNENRYQIEHIVPLSVSLDDSYGNKTLCESNFNREKGELTPYEFYQRNSSRELWAASSWEEVEQRAYKLLPYSKAKRFTMMKKPGADDFIQRQLNDTRYISKKAAEMLSEICDDVRVLPGQLTAELRRLWGLNHLLRDPLLKSKNITVSTDGELEHFVVFDENGQVKQLLPAQNQKPSSGFPVLCMPGYIDKNGLFSEEKRYKQLRFEQNKTGFKEGKYWAKTELSNPLDFTLIFTARPPLSNKYISLRGQVSKGRFTHDSIKQKIAANVEDGTYWVSFPVKNFQLVPASRDQKPAPGTKEILLFGKVNGGLFSSYIFETTTDLPDGRYWLILEPDTTTPEFLKARNIPESKADNEVFVEGVVDDLGKFTSDQDPDFSFKTSHAPGKYFVRFRAMKTEGYYPLQNDPPVFGKNENLALAYTWVDKATGEIKIDVQKNREDQRHHALDAIVVAMSELSYLNQLSRYSGQIKDWERGKDERPVFDLPWSEFSDAVNTAIEQILVSYAQNRKVVSKISKMVNKGGRSYKSSGFAARGRLHREFYFGQHPRPILHQKNPQTGDLLFEKDKYGNKQYYYHIRKAVTTIQNNKHVDKIVDEAIRLLIISRLEKEYHIDTTKPYNIPSDFFYDKDKKPNLFLPNKNGHPVPVKKVRMRENIGNAEQLKSDVNQWVNPYNNHHVVIYEDFEGNLQEQVVSLWEVVERLNQGLKTVQLPVNGRRIVETLQENEMFLIGLPQDMRDNLDKNLNSVTALSPYLYRVQKISSMYYTFRQHLVSSVSTEQGELSIRSFKAWEELNPIRVIIDQTGKISF

SEQ ID NO: 8326 - protein, 1027 aa, synthetic construct
  REGION 1..1027: note = Synthetic
MKYTLGLDVGTNSIGWAVLELNTNGEPQRIEKLGSRIFTDGRHPKDGTTLASKRRQKRHERRRRDRLHQRKKLVLNQLVSMGLFPQSEQEQQDLKSLDVLTLRANGVSKQLSAYELGRVFYYLNLKRGFKSNRKGGSEEDKANKISERIKKLQEQLKENDFKTVGQYLHDRYIKGLSTKATIENDFHLLRQLIEDEFDFIVETQSKFFPEISDEQWNTLRNRMFHQRPLKPVETGTCSLFEDKKRTYKYMPSFEEYRFLTELFNLSYQDENFHSHSLSSEQIFKVFHELKNTREATYTKIKKLLKLPSDLSFSIERSKSKDKIKISTTNHFFSKSLLFAEEWASLDLKLKDEVAEIYFSDMSVEEIKKGLLQLKIDSEIIENLLEEKVPNVQEATCSYSKEALQKIVSLILEEERHPTLIVDDLFKNEKEETSLIDRLDYYGASIPDSMQPIPQHIKDNNLTLNEDEKRYGKIANPTVHAALNQIRQVVNDLIEQYGKPTNIHIEFARDLKKSKEERDFDNRKKKKNEELNEQVRDFIEKHNQKPSAFNFERVKLWFELDAMNNQVCAYSGKTISARMVLSDEVQVDHILPFSRTLDDSLANKVLVLASENVKKRNRTPYEAFGQDTEKWASIQELAKRLPYHKQWRFAEDAIKKFEEKDQFLQRHLNDTRYISKIAKKYLGSITDPYKIVASRGQMTSIIRGKLGLNQFIQKPDGTKNREDHRHHAIDALTVALTSRSYLKRISDASARNQDPNRIPIPEPWKGFIKDADVKFNEIIVSHKVDHGKNGPFMEETCFGLIKNPNKYEEENDFKLITTKSLDSVKDPSTIRSQSLQNLAEKSGVISLAKSGVKKLRVYDVTKENPADIGLIESGLAKITHGKDKQHVKHYQKGDINYLAIWCLPQNITLKSDNHKKRKTDYIFTAIKTFDLNSKNPNDLRPHPAAKLVTKVYKGDTVALEVNNQLNYYIVKSIRAANKKLYFLKINQSSELANETQFIPAYTKLVDYKFRKVSVSPTGVITDNGPLLK

SEQ ID NO: 8327 - protein, 1182 aa, synthetic construct
  REGION 1..1182: note = Synthetic
MKKVLGLDLGVASIGWAFIQEDEKKSEILGMGVRIIPLNSEERDEFTAGNAISKNAKRRIKRGMRRNIYRRTLRKTLLKRALSEVGIEPGKELFEGFSKMNLWELRSKAAHEQISLEELGRVLYHLNQKRGFKSNRKTDGAEEDPKKESEYKAEIRKNAQDLLDAHMTIGQYVFKQLQEDQYFKLKGRIFPRQAYADEFMAIWNCQSKFYPSVLTEQLRKRVQDEIIFHQRPLKSQKALVSRCEFEKRYAWVNDKKMDVSPRVTPRTSPLAQWSKIYEAVLNLRFKDEMGVVVSVDLQKALALAEELKWKEKMTANDIIKFLGIPKGVTHNIGEKGIQGDTTFSTIEKAVKGIKKADDLLGRIKKIEFDIELKDNKDLTLVDEETGELFHYQSKTISSHFEKSDYYRLWHLLYSVENEESLIKNLIEDFECTAEIAQKLVKLDFTKAGYSNRSAAAIKKTLPYLMDGLDYSKAMACAGYRHSDYLDKMENEARVLLDKVPLLQKNSLRQPVVEKVLNQLINVVNAIIEHPQYGRPDEIRVELARELKQSKEERNRTSSNITKQEKRNKDIEDRLRREYGFVKVTKSLINKVKIYEEVGGISPYTGKRIALADFLNGAGVDVEHIIPKSRLFDDSLSNKTMAEAWVNKAKGNMTAFDFMKAQPIAGLQSFEDYIAMVNLWFKSGVNGAKISKTKYDRLLCPEENIPKDFIERQLRQTQYISKKASQVLGLACRNVHATSGGVTDFLREKWGWNDVLKKVNWERYEKLGLTSIETREDGKRIYNIAGWSKRDDHRHHAIDALVVACTKQSYIQSLNRLNQFVNKTNTADGLKEAGHFKLKEIAGKAPFEVDEIVERASKIIVSFKPGKRVSSKSKNKATGYTSIIPRGALSKETVYGKIKVQTKREVALNKNFNPEWLVVDRFLRVMIKERIKAFDGDLTKAFKAPIYLADGVTPVKKVEIYEWNEEAVVKYPLSSIKQKDLEYVLDPVVKQKLQAFFDQYPNEKEAIKNLGAAPIWFNEEKRIPIRTVRLMTGLGKVVPQKQVSPDDAKGFVDSGNNHHLAVYEREDGSLFDVMVSFQEAFERKANGLPLYFTEWEGAKLKWKFEQNDLFEIDNEEKQYYRCQKITKDSNDNITIFLRLISETKLDDSKENKEMKVYFSLRNHKNIVDTNPRAIRLSILGELL

SEQ ID NO: 8328 - protein, 1102 aa, synthetic construct
  REGION 1..1102: note = Synthetic
MEQKESYILGLDLGANSIGWALLEAHPDPEEKGRLKAHGIKQIGVRIFEAGVEGEIEQGKDQSRAVDRRDARLARRRLDRISRRLSHLFYLLMSAGLLPEHPAYKTELGKKKSAKERKQERDLKAKARHEVINQLDQDLVKKWREKEPLAKETLPYILRAKALDEKLELYELGRALFHLAQRRGFLSNRKAKAKDDEELGKVNQGILELEGKIEGAGARTLGEYFSKLNPKEERIRSRWTSREMYLKEFEQIWNAQEKHYPKILTPEFKKKIWRCIFYQRPLKIQHHLIGECQYEKGKKRAPSACLAFQRFRMLQQLNNSYLISPDGEILNDGRLTNEQRERLIEVLEKKAELKFSKAKKILGLTKEYRFNFEKEDGKGEFLGNETAEKLIKVFGEERWSRFSEQEKNEIVQDLISIQHKSGLVKRGKNKWGLDDENAEEFSKINLEEGYCGLSRLALSKLIPLMETGLTYMEAVKQVYPDRLQNEAFDQLPMVINQMPELKNPVVKRVLTELRKIVNAIIRKYGKPEQIRIELAREMKKTRQQREEIWKKNKQNEEKRKQAAQAIIKEAGENPKPGDIEKYLLWDECNGICPYTGKSISLKQLFSGEVDVEHIIPYSICLDNSYFNKTLCFHDENAKVKNNKTPWQAYGSDEKKWNEILERVKRFKGDAAKEKLKKFQIKDLEELDDFISSQLNDTKYASKLAKKFLGLLYPGQEALSRVQATKGGITANLRDVFNLNSILKDGDSVERDGYEPKKTRADHRHHAIDAICIALTEPSTVKMLSEASSRALKERKRRFGKVQPPWENFWEDVKKAIDNTIVSHRVSKKVNGPLHQETFYSPPKEVQGKIICHVRKPLENLSAGDIEDIVDPVVKKKVQEKIKELGGGDPKKLFAGSSTLPPEKLPCMTAKDGRVIPIRKVRIKCVMTPFQVGDKGRERFVTSDTNHHLEIFETKDKKGNVRWDGAIVSQYEAMRRLRAGEPIVKREHGKGKEFKFSLALNECVKLLDEKGQEIVCVVKGISQLSAGPIVITLRHICDARPTSEYQKQIKMRKELKKNYDKKLAEEIEKMLPVFIFKGPDSLREAKGQKILITPLGEIRTAND

SEQ ID NO: 8329 - protein, 1082 aa, synthetic construct
  REGION 1..1082: note = Synthetic
MAEKDHFILGLDLGSNSIGWALLKAVPSEKEGRLKPFAIEKTGVRIFEAGVDGDIASGKDQSRGVVRRDARLTRRRLDRTSRRLSHLFYLLMSAGLLPEHPAYQTKLGKKKSSRQRKEERHLKAQARHEIINRLDQELIKKWQGKEPMASEVLPYLLRAKALDQKLEPDEFGRALFHLAQRRGFLSNRKANSKKDEDFGIVKADIEKLAGEIEGANVRTLGEYLSKLNPEQIRIRGRWTGRDMYSAEFEEIWGKQIEYFPQMLNPEFRERIKKAIFHQRPLKPPIIGVCEYEKGRKRAPKACLTFQRFRTLQQLQNTKVVTTDGEIKEFTEEQMALLLKELDIKEELTFSQVKALLKPLKVLKFNFEGRGEKGFRGNRTAAQIIDVIGFEKWMGLPVQDREEIVRDLISIQHEKGLVKRGKEKWGLDDKTAEKFSAIELEDGYCGLSRMALSKLLPLMENGMKYMESVKNAYPDRFKGDARDCLPMVHEELPELSNPVVKRVLTELRKVVNAIVREYGKPAEIRLELVRDTKRTRQSREIHSKMNEQNRAERDKARNILKEIGIQNPSRDDLDKYLLAEECDWKCPYTGKGISMANLFGKNPQFQIEHIIPFKICLDNSFINKTLCANEENAIKGKKSPWQAYGSDQERWSDILRRVKDFKPLLTVSVKRKNGKGFKKVKSSSAQAKLERFQIDSLEKLSDFVDSQLIDTAYAASKGRDYLGLLYGEKALGRVQTTKGGITSYLRGKEIWDLNRILSEGGDKARTDHRHHAIDAICIALTDRAIVNQLSKASENAQKEKRHRFGKMDEPWGNFYEKVKEAIDQTIVSHRVSKKVNGPLHADHIYSPQKVDERGNTYSHIRKPIAALTNKELENIVDPVIKKLVIEKLKSLGGDIKKFENIENHPFMETKDGRKIPINKVRIKKPNTTIPIGKPVTLPDGTQKFTRNLETSSNHHIEIFEAKDKKGNPYWDADVVTTFEAMRRLRTKGKEPIVKRNHGEGTKFIFSLARNESVLMKDDKGIQQLWIVQKIGQNQQMFFVKNTDARPVSEIPKEGRSRYPESLRVSEAKKVLIDPMGNIRWAND

SEQ ID NO: 8330 - protein, 1043 aa, synthetic construct
  REGION 1..1043: note = Synthetic
MNYKLALDLGSTSIGWVALELDRREPVSLLDMGVRIFDDGRDDKSKEPLAVGRRLARGMRRNRDRKKDRVLKLRDALTRHGLFPEDSLTQKALAGLDPYALRVKGLDSELAPVELGRALLHIAQRRGFKSNRKSDRGDNEAGPVKLAAAYLEQEMMTAGARTLGEYLDKQDVKRVRKTGKEYNLYPLRKMLEQEVELLLAEQQKYHGALLTDEVAEELKHIIFFQRELHKPKVGLCAFEYEAGEERAPHAFPSVQRFRIWQEVNNLDFERYNPDDPHMTQDQKNRIAENLLSGKNQTFKQIRKALDLEDSQRFNLESDARSELKGDQTAKILSNKKCFGPGWLKLSGDEQDEIVAFLLEEEDEGAVLEFLMDRYGLSAEGADNVSHARLPDGIGRLSLKAIGKILPHLRQGLTYDKACAEAGYHHSDRRTGEVPDRLPYYGEMLPHRVIPGDRTTANEGKPELFYGKVNNPTVHIVLNQVQKLVNACIERWGHPEQIAVELARDLKMPAEEHRKINARNRKENERIAKELAKLDVRNTYVNRMRFKIWEDLSSDPIERCCPFTGVVISETDIFSSRFEIEHLIPFSQCYDDGRANKVLALQSANRDKGNRTPFQAFGSSPTINGHSYDWNRIQARADRFHKSRRWRFRPDALEQLEEKGGIIARQLNDTRYLSRLASEYLQFACLSARVDTIPGQLTALMRRKWGLESEIWDGEIKNREDHRHHAIDAFVVGCTTRGMLQRIAGAARNLENNAALQEKRHKLVDDMPDPFPGFLDQVKDRFESMVISHKPDHGNAQKAIQSKNPYTIARLHEDTAYGYVGPSEAKGKSYYVVRKGVEGLTKRKDIEGIRDDVIRGRFLDAIEGFKDGSAEFSEALQAEARAREPVIHKVRVLVEKSDAVMIGITNGQEAAFKFYQGGSNAFTEIYSPTHGKDAGKWFAETIRQFDAHQPDFSRQWRRNDPTARLIMRLHNNDMVAYEQDGVRIIARVKKMTGGRVYLRSHQIAQELGDKLSWAASANELAKRQARKISVDIMGRVRDPGPKTS

SEQ ID NO: 8331 - protein, 1051 aa, synthetic construct
  REGION 1..1051: note = Synthetic
MKYRLALDLGATSLGWTILALDKNNEPHSLVDMGVRIYDDGRDAKSFEPMAVARRLARGARRNRDRNLARKQRLMALLVELKLFPISIDEQKSLESLDPYELRARALDEQLTPFEIGRALFHINQRRGFKSNRKSDKKSNDAGPVKKAIADLEQKMMIAGARSLGAYLNAQEAKRVRYDGKAYSLYTMRQMYVDEVKLILDKQATYYPEILTQDACAQINDIIFFQRDLHKPKIGFCTFEYEARERRAPLALPSVQNFRIWQEVNNLDLEQYTPTDPRLESEDRQKIIETLQICNKKTFKALRKVLDIDDGAKFNLEYDARTEMKGNETAAKLSNKKAFGKAWFNFDEDEQNEIVLRLLEEENEATLIVWLQDQYALSEEQAEYVSEIHLPDGYGRVSLCAINKILPHLRKGEKYHDACQSAGYHHSDFRTGEIFDHLPYYGEALQHRVIGGSLNKDDAHSPEKFYGKVGNPTVHIVMNQLQKLVNACIDKWGHPESISVELARDLKQPKDEIRKQQAKNKKDNERIVVELEKLDVKNNYANRMRYKLWEDLSREPNMRCCLFTGVTIGVSDIFSPEYEVEHLIPFSRSFDDGRANKVLAKRSANRVKGNKTPFDAFGHSPTIGGVTYNWNDIQARADQLHRSKRWRFQPDALERVEKEGGPIARQLNDTRYLSRLAREYLQYVCGPENIHSIPGRLTAFMRDKWGLNDVLSDSGKKDRADHRHHAIDAFVVGCTTRSTLQKVSGAAKKLEENEALQDKRHKIVSDMPEPYDGYLKQVQSLYDTMVVSHKPDHGNAAKAINAARPYTTGKLHEDTAYGYVGKGNKKGTSSYVVRKAVNAMTKRADVEAIRDDRIRCYLLKAVEGVKDKSKDFETALQTAAQNWSTPIYRVRTLVQKSDAVMIGIKDKKTKQPYKYYQGGGNAYTEIYEILHGKYAGKWKAETINQYDVHTPSRGRKWKMEHPTAKLVMTLHNNDMVAYDDNGETIIARVKKMSGGRVYLRDHRIANEDADKLSWAASANGLKERKARKISVDILGYIRDPQKKHTNKRSVA

SEQ ID NO: 8332 - protein, 1244 aa, synthetic construct
  REGION 1..1244: note = Synthetic
MKKILGLDIGTNSVGWALVHEPELPDESYSIAGIGVRIIPLSSDENDEFTKGNAMSKNADRTLRRGARRNLQRYKLRRRQLGILLEALNMMPDKKLFLLSALDLYGLRAKGVTEQLALQEIGRIFFHLNQKRGYKSNRKANNDEEQTAVTAAEETEASNAKPKKKGYLDLINDREQALKDEGITIGQHFYTQLLIDDKIRIKENIYLRSTYLDEFDRIWNKQQAYYPEVLTEDNKQKIRNETIYYQRPLRSQKGLVSNCLFEKHHKATPKSSPLFQVAKIWQELNNIELTSFKAMKGQEQGFDKQGKRPLTIEEKQSLFNLLTVKGKLTTKDCLKELGYKSGYDEYKLNIRNEKELEGNRTYAAIRKVFDHFKINHEELLQFNLTSDQKVNKQTGEVYGQLQIGAGFEREPLFQLWHLLYSVEEIDTLIAKLQSRYGFSPEAAKALAKIDFAKQGYGNLSAKAFRNIVPYLQKGLNYAEACKTAGYNHSNSQTTAQNEARDLIDKLELYPKNSLRQPVVEKIINQVINLVNEIIDENNGYVTNQERYKGAFEIRVELARELRQNAEERNKAYSRNSKQDKRHKEIEAIIKQLLPFRRVSRNDIERYKLWEEFGKVSPYEPQKAISLGELFSGEYDIEHIIPKSRLFDDSFSNKTICPKRLNSGSFGSKNQMTAHDFMKSQGDHTYNAYLEFIKIHLYKKDGISKAKFNKLMMSLDKIPEDFINRQLQETRFITKEVRNLLTQICRNVHATSGPVTSEIRHLWGWDDVIMDLQIDRYKTVNQTELIEYVTNGQTHKKEKIIGWSKREDHRHHAIDALTVACTKQGFINRINKVNAQENRDEMFNEVKGTRFNDRLSLLQKYLILQRPFETAKVLTAIDNILVSFKSGKKVTSNSNNLIKQGSSTHKTIEVIPRGFLHKETVYGRIKRFKEISLSPRFNNLKEVARREIRAQITEYLRQFDNDIKQAFNNKNLSLFKERTGYDKVVIYYYEHVVRYKLDTNFKVADVESIVDEGVKAIVKAHLAKYGNNPKEAFKNENTIWLNQEKGIAARSVRCFTGYTDLQPLHKNEYGEPIDFVITRNNHHIAIYRDKDGKMQENTVSFWDAVKRKQAKLPVIIKEPGMVWDEVINSGFDDQELLQGLPQPDWVYLTSLQQNEMFVFGLADKELQSAISVKNYALISKHLYRVQKMSKRSSGAIDLWFRHHLETKLDDSLAAKELNKFLNIQSLGGVNGMKVKVDNIGRIVKV

SEQ ID NO: 8333 - protein, 809 aa, synthetic construct
  REGION 794..797: note = misc_feature - Xaa can be any naturally occurring amino acid
  REGION 1..809: note = Synthetic
MRKILGLDIGVASIGWAFINEPETENEQYSIVQMGSRIIPLNPDESDEFTKGNAISKNANRRIKKGIRRGGHRYKMRKWKLNNLLDELGMRPTLDLFKLNSLELYGLRNKAVSEKISLLELGRIFYHLNQKRGYKSNRKANNEEETVKETEEKIDKKKGYLDLINDREALLKNKGITIGQYFYQELQHNPWFRIKENIFLRSSYQNEFNKIWDKQKEYYPNILSDTNYKKLFSEIIYFQRPLKSQKNLISECRFEFTFAKDKEGNRMKDEKGAFKKIHPKVIAKSSPLFQVAKIWQDINNLKIRSKSGETILLTTEQKRELFNYLNENEKISITQLKRKLKLTPPEDYYINLRKDSLEGNKTTAAIRKALKNEREDLLSFTLNTQVKQVVNQQSGEVEEQPVISPEFEKELLFKLWHLLYSVEENETLIKNLQEDFTLTEQQAKSLAKIDFNKGGYGAISTKAYRKIIPHLMNGMMYSNACEAAGYRHSDYLTTEENTARPLLDKLELYAKNTLRNPVVEKIINQVINLVNAIIADEQLGRPDEIRVELGRELKQNAEERNKTYSNNGKRDKRHKEIADRLQRELGFRNVSRRDIERVKLWEEFGGVSPYEPDRPISLKQLFNGDYEIEHIIPRSRLFDDSFSNKTISSKQFNVKKDNATAFDYIQNLGEQQFHNYTEFVKKNFYRKDGISRTKLNYLLMSGENIPQDFINRQMRETAYISREVKNLLMNICRNVYSTSGGVTDYLRENWGINNILQQLNFEKYKDAGQTEIITIEKEDGSTHQKEIISNWSKXXXXNGTITGITQLMH

SEQ ID NO: 8334 - protein, 1163 aa, synthetic construct
  SITE 1158: note = misc_feature - Xaa can be any naturally occurring amino acid
  REGION 1..1163: note = Synthetic
MERSLGLDIGANSIGWAVIEQNGTGGAILGVGVYTFPEGVENFGEGDREISRNATRRAARQRRRQLFRRKLRKRALLKLMATHGLCPALSEDELRQWHKSGQFPERTEVQQWIKLNPYHLRLRATQERVTLYELGRIFYHLAQRRGFPTSSRRAQQDERSTIEKGDVKAGKPGIEQTRALLDHAPTLGSALATLYPPEGQPYRNNTSRIRNRYTDRQMYVAEFEFLWEKQRQFYPYILTDDLKAQLGGRRKDGYSIDGVLFLQRPLRSQKHLLGRCTFEPSKPRCLRSHPLFERFRALQFINSILCNDLPLDADDRSRVLRLMLTKKNLKFTDIRKAIGKLSAEYIFNYADDDSIVGSPTNAALASKNIFGKAWFDKSDHEQHQIWHVLQSFDDRDKLIHHATTKLGMSDTAAKHFASVQLTDGYASLSLKAIRAILPFLEQGYPYHLAVALAGTRRALGPRWDQLDEEQRTALCDTIEGLVGSGVRGGYLDKLKEMLRTKFKLSDKELSKLYHHSQFRAANQLLNRIPTDAVYTSQLLALRNPAVTNVLFASRRLVNELLSRFGHFDRIVIELARDLKRTKSQRAQIRKEQQRREIINRTISAILEKEGIRPTAENILKYRLWLECNKTCPYSNRSISFHQLYNGEVQVEHIFPYDRSLDDSYLNKTLCFADINRKKGNRTPYEFFTNDFGMDRWEEVKQRLRQTFTNQRSWQKDSPLDYFPERRKKYERFIAEKLPSDFVGRQLNDTRHASIRAVEMLQLVCPIVSASAGTATAKLRNLWGLDRVLGDLESDTKSRNDHRHHALDAIVLACTRPAHIQQLATANARKYSKEPQLEPPWSSFRFDVEDAMQRCIVVHHRTNRVITRLNVTTTVGGTVLRYRSLAARGPLHRETFYGKHLDPSDGQVYYHVRKPLAQITKRAQVEKIVDRAIRELVEARIKELGSYGSNDDVPKGAFFGTNPDGSPQPLLFLPNRRGEPVPILNVRLRESLANARPVHPNQNRYVDPSNNHHAIIYRLPDGTLEISVVQFWDAVLRCRLRQPLYQVPPNCELVMTLHINDIVLLGCPDKVLEEVFQTLTPDQRCKSLWPYLHKVQKLSQSSPKSWELCFRHIADARPSEEAKKDYILIRNWGTGKQGWFTYNPIKLRVTPSGLIYRWXELPHH

SEQ ID NO: 8335 - protein, 1156 aa, synthetic construct
  REGION 1..1156: note = Synthetic
MAAKYRLGLDVGTASVCAAAFSLDKDGFPDKLIWHHTRIFNEPLEKGQGGLVSKKAGRRKARMQRRQIDRRAARLRRIAHLANLLGLNREEIPPDDGSSLPRLRAQAATEKIEPADLLRIFLRLSKRRGYKGEFRAKKKGEVAEGSNELKQAMRALATERGIALKDENDAGITLGQYLLYRLDNGLPTKLKVKEDDDGDFKGKRTEKANAPKNLYALRSMVEHEFETIWNTQAKHHPILNSVYKDKPIREHFYDALFFQRPLKSAAGLVAQCSLEPTLQRAPRAQMAFQRFRIEKTLADLRWGSGKRAEKLTCEQKQIIRDLLDNQEKATFESIYEVLEEAGYPKPQGKGLNLDRSSREELPGNKTLAAFRKLDKHSAKHHPERANNLEQTFLKLDEKTQIAVINFLAELGSPEQLDDPEWHNSFVKRDRSKREFREPLIEFVNRIKDHDNFDRLSKMGFDSGRASYSVKALRKLTDWLKEPEWPGDWSDTEDGAMSVDEEGAIRACYRAEIKKRRKVVQQNRLPAPKPTGNAVVDGALRQIQWIINKMIAELGYPPEEIVVELSRGMNLGITRRNEREAENAKNQKVRRDAEQEIRDHGMYPTDTKVDRYLLWSEQDKSFCPYCNQSISFEQAMSGAATECEHIIPKKLSQIGKKRSELVLSHSSCNHAKGDFTPFEAWGMGRNSIRWQSVESAANRFLAKALALKKKFDDARRNDRQAPFRGEMNGLFRKAALLKLQEAREDETVDGFADRQLHQTSWIAKEAALWLACLCPNKVSTSRGELTAMLRKSWKLDTVIPEVRYENKLPVLDEEGKPVTPEDFAQLRKYLERNVSKEERGADKKANPGLNFNRRPNKRIDHRHHLIDAITLALTSRSLFQQMAIAYKIAAEKEERPRLKAPAPPLLNVRSAALQAVRECKISFKPDRYPEGALFKDTAYGVAQRDGEGRLRLTLRTAVAGLGKIKGKTSLESARKAISNIVSDSVREIVSEVFESRIKQGLAAGTVLEKPIFHPRYNKPIKKVRCYETFAEDSLPIMFRSRHGEHRKYLVSAGYAYVDLRTDGSKEHRLVKIRDALCNRKRAAPENVLRLYKGDTVLDSKDGLLYRVCLFKAAGTIALLPIWEPRSFKEANEKAEKGSKVGGTISFAPAAKRLKRID

SEQ ID NO: 8336 - protein, 1126 aa, synthetic construct
  REGION 1..1126: note = Synthetic
MKYRVGLDLGTASISLAAFLLNNESQPSDLAWASIRIFDEPLDNSTAGLQSKKAARRAARMQRRQVDRRRGRNRRVAALAPMLGVACFQSAEDGGASTLKLRSTAARNRIELDDLLRVFLRMTKRRGYAGEFRQRKEGAKTGEVEGGSNDLMAAMTALAESCKLESCTLGEYLYHRWQQGLPTKLKVKKDRSDDSADMPNLYALRSQVEAEFEQIWSTQAEHHPVLNGEHQGQPIKAIFKNAIFHQRPLKSIGGMVGQCSLEPTLPRAPKAQPAFQGFRIEKTLADLKWGSGKRATDLTAEQKAVIRAILAEKETVSFKAINEALKKANHPGPEGRGLNMDRVSREEIPGNKTNHAFRKLGLGDEWLALEPRIQVQVINFLADLGSPEQLDDPCWHTRFVRRVKTNRKDADDRWIYELQPRQFDPAFVAFVSLLKSNDKFDRLPKMGFDGGRASYSVKALKELGDWLAEPWWDESWQGEKRLDEEAAVRVCYRHTIVRPTSQSTRLLAPAPTGNDVVDGALRQLHGEFNRMIDTLGAPPHEIVVELAREMGVGVKKRNEREKESTKNRNARLDAGKAIRDAGVAVTDPRIRRYLLWREQGETYCPYCTKPINLADALSSIETEHEHILPKTLTQVGLKRSEIVLAHRNCNQEKGDRTPWEAWGNGKDDERWSAVERQAARFIKDRQYRKAKLLLIKDFEAEVLNDESIADFADRQFHQTSWIAKEAAKWLQSVCATPVSVCRGNSTAALRRGWKLETVIPEVRIEEGLPVLGEEEERIGKNGKPEKYLPVITPEEFEKYKPVWEGHRAPSRELHTDRKLNKRIDHRHHLIDAITIALTSRALFQQMARAYKQESERCGSGKRPRLHAPEPPVRNVRELAMKTVRECPLTIKPDRFSDGQMFQDKAYGVAMKEEDGECLSVLTLRADLRSMVDRKKGTVEQARKAIDTIVSPATRKIVSQAFEARIANGESAPAALAKPIFQRQYGRDIAIKRVVCFTGKYAEGAMLVRHTSRNGKVHDKRLLHGGYAWLETDFSEERIVRQELVTIQQAMRLNRKSIQKGVMRLYRGDVVLDSNDARKYRVGFFKKEGCIFLVPHIDPRAFDAIKEPGSGKKKVSFGQIKRLSIVS

SEQ ID NO: 8337 - protein, 1137 aa, synthetic construct
  REGION 1..1137: note = Synthetic
MAVKYRLGLDVGTASVGAAAVSLDKDGQPDALIWHHVRIFSEPLENAQGTLISKKAGRRKARMQRRQIDRRASRLRRIANLASLLGLKREEIAPDDGSTLPYQRAQAATERVELDDLLRIFLRISKRRGYKGEFKAKKKGPVAEGSSELSLAMRELAAKHGIALQDENDTGITLGQYLRHRMESGLPTKLKVKEVSDEPKSKKGEDANVPKNLYALRKMVEHEFNIIWDTQAKHHDILNEIHDGKPIRAHFHEALFYQRPLKSAANLVAQCGLEPTLPRAPRAQMAFQRFRIEKTLADLRWGAGKRAEPITPDQKRVIRDLLDHNDKVKFDGIYEALENAGCAKPQGKGLNLDRASREELLGNSTLAALRKLDRHSMKKHPERAANLEQAFRALDEKAQIATINFLAEIGSPEQLDDPEWHTSFVKRDGKPRQFSEPLIAFVNRIKEHDNFDRLSKMDFDGGRASYSVKALNNLADWLEEPSWPGDWLDDMKRMDEEAAIRVCYPKSLNHEIKRMDKLPAPESTGNAVVDGSLRQIRWTVNKMIAELGTPPDEIVVEMAREMSLGISRRNERESDINKQNKARREAEKEIRAHNQTPTPSKIRRYLLWAEQDKSFCPYCNKNISLAEALSGSATEYEHIIPKSLTQVGMKSSEIVLAHHGCNQEKGDLIPWERWGNTDRWQSVEAAATRFEAKKRYRKAKLLRLKDFEREVLTDESIDGFADRQFHQTSWIAKEAAQWLECLCPNKVSVSRGELTSMLRRNWKMETVIPEVRIENNLPLLDTEGKLIAQNDFDNLKKYLEGHPVRSEDRKTNPGFDFNRRPDKRLDHRHHLIDAITLALTSRGLYQLMAKNYKTAAEKMQPREGETQEERERRMKSETRLRLEVPEPPLRNVRAAALNAVRECNISIKPDRYPDGALFKSTAYGVGQREGEDRLRLTLRQPIENMGKVQGKTKLEAARKAIASIISDDVRRIVGDTFEDRIANGMEAGAALALPIRHPLYDNPIHKVHCFENYAEDAQPIGFTSRHGEHHKYLVNEGYAYLELITDGSSEPRLVKIRDAMQGKNKLVSQGVVRLYKGDTTKDSKDGKLYRVGYFTAEGNIFLIPMVDPRSFDKITEAGSGKKKVAFTQAVKRLSLIG

SEQ ID NO: 8338 - protein, 1094 aa, synthetic construct
  REGION 1..1094: note = Synthetic
MRYRVGLDVGTASLGVAAFSLDENNNPLELKWSHVRIFDEPLEKSQAGLKSKKAGRRAARMQRRQIDRRLGRTKAIAALAPLLGIQIEPSHDSGRTLLKIRANAAREQIDLSDLIRVFIRLGKRRGYPADKFSKKGEVEGGSSDLIAQMQAVAESRGVTIITLGEYLYERWQQGLPTKLKIKEKRDKEDELQNLYALRSHVEAEFEQIWQTQSAFYPILNSQHEGKALKEVFNHAIFYQRPLKAVGGMVGQCGLEPTLARAPRAQLAFQRFRIEKTLADLRWGAGKRAEKLSVAQKAVIRQLCNEKEVVKFDVIYQALEAAGCPKPETKGLNLDRLSRDEIPGNKTNQVFRKLDLGDKWLALDERTQIQVINFLADLGSPEQLDDSLWHTRFAKADGTVRQLPEAFVAFINLVKSHEKFDRLSKMGFEGGRASYSIKALNKLIDWLDTPWWPNGWQGEMRPDEDAAVRVCYPESLNKPVTLKDKLDFAPSTGNAVVDGSLRQMRYVLNRMMADLGAQPEQMVVEMAREMSVGVSKRNERESENNKNRKARESAEKAIRAAPATVTPSRIRRYLLWVEQGEGHCPYCTKKINLGDALNGAETEYEHILPKSLTQVGLKRSEIVLAHRSCNQEKGNRTPYQAWGHDTDRWQIIQMRAKYFADNRQYRKAKLLLLEDFETEVLTDESIAEFADRQFHQTSWIAKEAAQWLQGICKTPVSVSRGELTAMLRRKWKLETVIPQARVEEGLPILDEEMQVVSVEDFEKYRDVWEGHRVLDSHGHLDKSRHTDRKLNKRIDHRHHLIDAITIGLTSRSLFQKMARQYKIDSEREARGQKPRLEVGEPPIKNVREIVLAAIRECPLSIKPDRYPDGAIFQETAYGVAVKEGEDKARLALRVKVADLIDRKKSTVEQARKAIQSIVSETIREIVAKEFESRIVAGKSAPEALAMPIYQTMYGQRVEIKKVKCFTGNYADDVAIISHTSKDGCEHLKRLPNAGYAYLETEIFDGRIGKQELVNTHLAMKRKHKPQSENMVRLHKNDTVLDSKVGKKYRIGYFKAVGVVALIPITDPRAFDAIKEPESGKKMVSFNQIMRLKRLD

SEQ ID NO: 8339 - protein, 1001 aa, synthetic construct
  REGION 1..1001: note = Synthetic
LLGTAPDGSPTHLIKCGVRIFQEAVDAKTRTPKNKARRDARSLRRTLARRRRRIAKLKGILFRHGFIPKELATATNPEAALNAIGDPYELRCRALDTPLSLVEFGRVLLHLCKRRGFLSNRKTLVTELADDPRFTTLLAQVDDAKSSRDSDSEEAKDEGEIKEEIKGLKRHIRESGARTLGEFLARQRSEVVDGHTRRIHTDRAMYREEFDLVWNSQERFHESLRDVVLRAEIHSAIFFQRPLRSQRHLVGRCTLERDRQRAAKASPEAQRVRILQDLNNVEILNRVTGELRPLSSDERELLLRELDGGKVRKLPWSKVKKLLGIHKGETINLEEGGKDELPGNTTYWWMNKALGDTWEALPPVERRRVIEDILTIDKPAALAERLMRVYGFSPEQTLDLLTAGFEPGYASHSLKALRRILPFLEQGAKYHKAFEAAGYLRPDQIKRTFVDRLPSPPEVRNPVVQRALFETRKVVNAVVRKFGKPEIIRVELAKDLKQTKKDREREQKQNKENERANNEAREQAGIAGVSRPSNDDLLKYRLWKEAGQCCPYTGRSIGIAQLFSGDVDIDHILPYSRTLDDSYLNKTICLAAENRLVKRNQTPYEAYGADTGRYEQIVQCSKNMPLGKQRRFQQRELDGIDDFVARQLNDTRYASVAARDFLAILGCNMQVAKGAVTALLRTKWDLNRVLSIDGSGKKNRADHRHHAIDALVIALSSPSILKAVSISAARPVGMGPWDKGFHINPPWHGLKDEVSACIATVIVSHAPTRKISGALHEETAYGRRGDGTYAYRKLLTALSGKSEVEKIRDPAIRRLVLERVGDVSDREMKKILGAPLMQNPEKGIPIRRVRLAVTFSDEAVLPVVGNDGSPYKYFKLGNNHHVAIFEEERTGKRRGVFVRAIEAAQRAHRERSPVVATSADAGWRFVASISANDMVRIDEGGKSRVYRLQKLEATNNRLIFREHTAATLDDNNTLLRISVGKFRGTKIEVDVLGEVNPAIQT

SEQ ID NO: 8340 - protein, 1375 aa, synthetic construct
  REGION 1..1375: note = Synthetic
MEKILGLDLGTNSIGWAIRNTSINGNDQSQIEKFGVRIFSKGVGEGKTGEFSYAAERTKHRSKRRLYQARRYRIWATLEVLIQNGYCPLTIDELNGWRKYSKEAKRQYPHSKVFEQWIRLDFNGDGRPDYQSPYQLRKLSLVKQLSRLEVGRALYHIAQRRGFKSSRKLGDNERTAVYDGSKESGARGVNEILELIEKQGTLGAALAKIEQDGERIRNRYTLRKHYKEEAHKICEAQGIDIRGDFYLSIDKAIFYQRPLRSQKGLVGKCTLEPKKSRCPISHPAFEEFRARAFLNNIKYFDEVNQKWHRLAQNYIEEIIEEKFLRQKPDFTFDEIGRFLEKKGLNSKLNYKDYTAVTGSPVSARFKNIFGNDWLHIIIPWKNKTYSINDIWHALLSFEDEEFVLEFALVNLQLDDTKSKAFVAAWRNLPDGYSMLSLNAIQKILPFLRDGLGYTEAVMLANIPSIIGNTNWTKEKESIIKDINSIIEESRKEKTIINIANNLISQYYALAEEEKFGYKNNEYKLDDIDKRQVEEAIVKTFGKKSWELESINKRAEIIERVISLYQNFFQSTTGKHYKIITLKEKIADYLMQHSYCSKKDCEKLYHPSQIDIYPAVKPNAKGIVLLGNPQIGSFKNPMAMRTMHELRILLNHLISTDQIDESTNVVVEVARQLNDANKRWAIEMFQRNRQFENQEFAKVLVELNKDGYTSISPENPENIDRFRLWYEQLVNGSAVFDEVKKLKSDIEKYRLWKEQNCQCFYTGRMIKLTDLFDENTIDFEHTIPRSKSFDNSLENMTVCYAFYNRDVKRNKIPSELPNYHFDTEHGTAILPRLKIWEDRVIQLTKNVENAKRKSKVAKDKTEKDAAIRQRHLWQFELDYWSRKVDRFKINEITSGFKNSQLVDTQLISKYAFHYLKSFFNRVDVQKGSTTSEFRKIYQIQPSDEVKDRSMHSHHAIDAAVLTLIPSAVKRDRILEEAYRYKENYGKQYYEKPYPSFHYNHVNDIKEKVLVDAVSKTKIFDQQRKIVKKRGRIVYLRDNNGLILKDNDGTPKPMIAQGDSVRGQLHLDSFYGKIKVAKRDESGKPILDGGKYVFEEKNNGFRFVKRKLIQDLTKLDEVVDPNLRRLIEMQLNGRSLSQAVNEGIWMLNHKGERVHRIRHIRCFANDIADPLQIKRQTYISKRIPVNFDNNEHKQYYWAKNGENALYGFYQTDDKTKRGFELLNLMQISQIRRLNTVENVYDFFAPNKEVGKGKNRAIVPLYSVLQPGLKVLFYKEDQSELKGLSITELSKRLYSILVLFDKEIGRIKFQHHLEARNDKQLQEAFPDNIYGKAGKNGFSTFSWDFVCPRLLLSLRNFDFVVEGRDFEMKPDGSIRFKF

SEQ ID NO: 8341 - protein, 1088 aa, synthetic construct
  REGION 1..1088: note = Synthetic
MPKEFDPLKPAKYRLALDIGSKSIGFAIIFLKEDVNKLLKPYAIVRSGVRIFGDGRTPAAPGQLGSSLAAERRVKRSIRRQYARKRKRLQRLLRNLKELGFFPDDSKLCKSFEDLNPYELRHKGLTKELKPHEFGRLLMHMAKNRGFQSNRKVDLLADNIDSQAKAETSAMKSAIATLQSRLNGEFETLGAYLYERFKKGETIKSSKTQKGQKAEYEFSISRRMVKQEFDRLWAAQEQFNPELFNEQAKNTLKDTIFFQRNLLPQKVGKCTFLPEHERASKALPSSQYFRIISELNKISFTDAEGLILPISLEQRNKLLKSLRIKQKLSFDRIRTELNLDSTVLINLEHASKDSIEGDKTGYLLSKKEYFGPAWRDLSLETQDAIVTALLTHENEAELVQKLVDDFNIAHDVAKALANARLESQYMRLSKEAIERLIPELEKGVDSQDGYKVPVKYHEATEAAGFGHHSALQENWADFPTLDLKQLHSDDNDKYIVAELPLPYYGKVITRQVAFGTGDVNDPVEKRFGKIANPTVHICLNQVRVLLDEIIAKYGYPYEVNIELARELKQNHEQRQRSIKQQAANKKENEEIRREIKQAYKVEKARIITDSEISRADIEKWRLWRRSKSKLCVYSGKKICETMILNNEVEVDHILPRSRTGDNSYQNKVLVLNKANRIKSNRTPWEAKELFEAQGWSYEDILNRMRALDKHQLFRFAENSMDIWDKNYRSFEARALNDTRYISRVVKDYLKVVCHKDRIVVSNGAHTALIRREFGLNDLLGKKGEKNRDDHRHHAIDACVIGALDRSMLRKLQIAMEVAEKQNSARNFVGLQEPWFNFSTQVRRSIGQIYVSHKPNHNYEGEIFEASIYGLRLISDKRTEKYVGIKRNPETGKTDKPKKSVVVISDPKTQNRYGLRHKFHSEGLPKKYYGLSSSSVFCLEIYRDEKGNWQAYTIPRYEAYRIVKRRGVNALYDNKRSNFEGRPLVMRLMRDDCIAFEKNGVKEVYRIQKINGLKKNITLTRHFDANVDDRYRRMLKAQKAEKAGEDFDSEDLCDDLVFSSFGASSLYSNKARKVTISPMGVLRDPGFKG

SEQ ID NO: 8342 - protein, 1121 aa, synthetic construct
  REGION 1..1121: note = Synthetic
MLQTETTKKTTANNTLDTNNYTLGIDMGVASIGYAIIDESSKKIIHMGSRCFPSPATNTDNNAATRRLARAQRRNTARKVMRRHKLFTYLQKHSLLPPFTQTQLEMLHAPIPTEFCTVASKRREMVRRYAQLRNQIMTSLDATLFKEWLNFLEHRPHYAKTYLKKLPNIFIYFLRSIALDEQIDRYSLGRIIYFFGQRKGFLSNRKNLAKELVDEKKNKISSAVNSLAGHIQETKCRTLGEYLAKYVDINKETIRKRYTARSMYTHEYNLIISSQNSLVNKIKNEFDDNSVFDTIYKILFYQRPLKSVKKLIGGCELEEVLCGKKNIKRAKKCLLTSQEFRIWQSINNLKIVSTSNDPSERELKPHEKNSIFDICQKKAEVSLVTLAKDLKLKNEKFKNDMYFNKNKKKSEDKNAPTERRIIGNKTLSKIASAYKKIFELSKLEQEKIINAIISFDNSEILKKYFIEKKSIPELEAQKLANVSLEDGYLNYSSKAIKKLLPHMQNGKMLHEAIKLAGYTNSKNNKINDLLPAYVTINKYGNNPAVLRSLSQLRLVVNAIIKKYGKPKIIRVELARDLKLSNQEKSKIFKQNNANKLENKKITTELNEKKINVSASNIEKYKLWQECNYQCPYSGNCIGRDDLFGDNPIFDVEHIIPLSRSCDDSFANKTLCRNDINRNKKQNYTPFEAFSITDPDEYEKILMRVEKFNSPFKYKKLFRFKAQNIDTEFSARMLNDTRYASKLATQYLGLLYGGIVDSEGSQRVRVSSGQVTAILRKNWKLNKLLSQENTKTRLDHRHHAIDALVIALTNESAIKLINKSASRGEFKYENRFSKIEIIWPDLLQQTQKHLNKMLISFYISPKINALLHEETILSKKNENFYYRKNINEIKSYINNTEKYDKFVLDPALTNIIKNKYNENISNKPKNTKNAETENTEKKVIFDQTKIDTLPYLTVKNSSNKTSPFAKEANDKIYVKSFRNKTNYKETSVLEIGTGTQKRYVAKNSNHHISVFSTNTKDGNDFLISTYLDVFNRKKAGQSIILKKHPSDPEAKFLFYLKKSDIFEIEENGVKQYYIIIGFEADNRIKYSHIYDAQKKPTRKSINNLLKMKFKKLKISPLGEILQ

SEQ ID NO: 8343 - protein, 1384 aa, synthetic construct
  REGION 1..1384: note = Synthetic
MGKILGVDLGTNSIGLTLREDDIFSWYGVYTFKKGVGQGKSGEFSYAAERRKHRSSRRLYNARRYRKWETMKTLIEFGFCPLEKEYLERWVHFDTTKDEVGKSIGRIFPRNDNNFNNWIKLDFNGDGIPEFTSPYQLRRLLIAEKLDLSIPENRYKVGRALYHIAQRRGFRSSRKSGANDKIAVYKGSNETKTIGRNEYENLITKHKTLGAAFGYLEEKGIRVRNRYTLRSDYQDEVSKIVEFQKIEDVLFSEKIEKAIFYQRPLRSQKGLVGKCTLEPSKSRCPISHPKFEEYRAWSFINNIKFRNEETSEFEPLSLELKKQLYQEKFFFKSKREFKFLEIRKFIQQNIGCNLVLNYSPKMDNISIPSCYVSARLKAIFGEDWQHFEKKIEQKNKNGENKVITYRIEDIWHILFSFEHEDNFIEFLDNKLCLSENQIKEMIKLFNDFPIGYANLSLKAINNILPFLREGHIYTEAVILAKIPEILGEEFSENKVDIIKAIENEISNNRYEKTITTIANNLIFKYYALDYEDRFGWKDITYKLKDSDFNDVEIATKGHFGEKSWEKLNEDKQQNILAEVVKKYQAFFADDKRKHIEPLHLVNQIKEFLSANFNIEKKVLEKIYHPSQIDIYASKEDQRLLASPKSAAFKNPMAYKTLYKLRDVINYLIETNRIDNETRIVVEIARDLNDANKRWAIETYQRRRETENLEFAAAITELINDNDFSGVADPNSDDDIDKFRLWAEQIENYGEVSKEVVAINKDKSISNKDIQKYRLWKEQNCTCMYTGKIINLTDLFDQNKVDFEHTIPRSKSFDNSLANLTVCYADYNRNVKKNKIPVELPNYESEGLSYSAIKPRLEAWEKRIDSLKDRIETQNKNSKLAIDKEKKDDAIRQRHLLQMECDYWKNKLDRFIRTEVPQGFINSQLTDTQIITKYAFHYLKTVFRKVDVIKGANTADFRKIYGIQTKFEKKDRSQYFHHAIDAAVLTLIPPAKNREEILKRAYEFEEKPENKNKQYHEKPFSAFNHFMLEEIQKNILINNLAEKDQTLTPGKKIIRKRGRVMWIDKEKRIPKIAQGDSIRGELHLQTYYGKIKIAAKDKKGTLLRDEKGKIIYNQIDGIDEVWMVLRILVTDSKFNADNIIDNALRKYVKEQLKEKKVTELVDFNGNIIRHIRCRVKSGKGFMNPQNVTIVKEQTYKSSKNYKSYIYADSGENYIFGLYENIYGRDVISVNKFEAAKFISKLNFVDKSDLFKMKEPVFIKKTEAKLIHIFEIGQKVIFYKSSKNEIKDLYETDKIEISKRLYFIKRLHQASVGNIQLQHHLEARTDDELSKKFPKEMFNSAGKDGFSKYQEDFVAPRLLFKPTNSNFIIEGKDFEMKLDGTIAFKF

SEQ ID NO: 8344 - protein, 1380 aa, synthetic construct
  REGION 1..1380: note = Synthetic
MNKILGVDLGTNSIGLTLRVGDVFSWYEVYTFKKGVGEGKSGEYSFAAERTKHRSSRRLYNARRYRKWKTLKVLIENNYCPLSIENLNKWKHYEKGLGRIFPVNDELFQNWIKLDFDNDGIPDFTSPYQLRRLLITEKLNLSLPQNKYKVGRALYHIAQRRGFKSSRKSGANEKTAVYKGSTETKTIGRNEYENLIIENGSLGAAFAFLEDNGIRVRNRYTLRSDYQIEAKKILEFQNIDNLQFREDIEKAIFFQRPLRSQKGLVGKCTLEPNKARCPISHYKFEEYRAWSFINNIKFKNKETNQFESIPLELRQKLYNEKFFYKSKRDFQFSDVRKFIKENGGKEWELNYSAKMDEISIPSCFVSARLKSVFGENWQDYKKSIKKIDKKGKEYDVNYTIEDIWHIMFSYEDEEVFEEFLVSTLELDEKEVKELVTIFNQFPIGYANLSLKAINNILPFLKQGIIYSESVILAKIPEIIGKELFEHNKEEILEALRQEVENVREEKTIVNIANNLIFKYYALDWDERFAWKDVSYKLDSSDLKEVEKATIEHFGDKTWQKLDEGSRKKILSEVTIKYQDFFASSKREHIKPPHLVNRICAFLKRALGVSEEKLSKIYHPSQIDIYPKKEGQKYLLSPKTAAFKNPMAYKTLYKLRDVINYLIEIGKIDEETRIVVEIARDLNDSNKRWAIEKYQRDREAENREFANAISELINDPEFKGNADPASKKDNEKFRLWIEQTDNLEEVLKEIQVIDKNKNLSVSQKDIQKYRLWKEQNCTCFYTGKMIRLTDLFDKNIIDFEHTIPRSKSFDNSLANLTVCYADYNRNIKKNQMPTELPNYEEESNGYSAIKPHLYLWEKKVEDLFKQIDFWKFKSKVAIDKMAKDEAIRQKHIRIMQYDYWKSKLDRFTRTEIPQGFVNSQLTDTQIITKYAFHYLKTVFTKVDVIKGSNTAEFRKIYEIQPKDEVKDRSKHSHHAIDAAVLTLIPSAKKREEILKKSYGFEEKYFDKQYHEKPFLGFNISMIDEIRNNILINNMADKDQVLTPGKKIVRKRGKVVWIDQKNKIPKVAQGDSVRGELHLQTYYGKIKIAAKDNNGSLLRDESGNVIYNQTDGKDEVWMVLRKPIDKVNFGSDIIVDFHLAEYLNKQILDGVKQLELQDFQGKILRHLRCRVKAARGFMNPDNVTVVKEHVYKSSKDYKNYIYADSGENYMFGLYENEKGEKNIISINKFEASKFVSALGIPENKEEVFKQKEPVLIKTKEAILIHLFKSGQKVIFYNSLEELEDIKKTPEEISKRLYFIKRLHQASVGNMLFQHHLEARTDEELIKDFPKEIFKSAGKDGFSKYQTDFIAPRILFKPTTPNFIIEGKDFEMKLDGTINFNFR

SEQ ID NO: 8345 - protein, 1376 aa, synthetic construct
  REGION 1..1376: note = Synthetic
MEKILGIDLGTNSMGLTLRDDNEFSWYGVYTFKKGVGEGKSGEFSYAAECTKHRSSRRLYNARRYRKWETLKVLIDNDFCPLSEENLNKWKHYEKGLGRFFPVNDIAFQQWIKLDFNNDGVPDFTSPYQLRKLLIIEKLDLSISENRYKVGRALYHVAQRRGFKSSRKSGANEKTAVYKGSNETKTIGRNEYENLIIEHETLGAAFAYLENERIRVRNRYTLRSDYQQEVQKIITFQKIENREFAEQIEKAIFFQRPLRSQKGLVGKCTLETNKPRCPISHPKFEEYRAWSFINNIKYRIDNHSDFEPLPLDLKEKIYHEIFFFKSKREFLFSEIRKFIQTNGGRNWELNYSPKMDGISVPSCCVSARLKSVFGNDWHFFEKIVVKTNKKGENETITYTIDDIWHILFSFADEENFIEFCAKTLELDDNQIKELTTLFNSFPVGYANLSLKAIKNILPFLREGLIYTESVILAKIPEIISEQLFKEHKNIILAEIKNEIAKNRYEKMIITVVNNLIFKYYALDYNERFAWKDFSYKLNESDFKDIEKAVIEHFGEKSWNKKSDNEQQKFLSDVTEKYQTFFADEKREHIKPPHLVNQIKEFLLAKFDVAEKKLNKIYHPSQIDIYPKKEDQQLLKSPKTAAFKNPMAYKTLYKLRDVINYLVETERIDKDTRIVVEIARELNDANKRWAIEAYQRRRETENLVFKAAITELIKDTNFKGFADPESSEDIDKFRLWTEQTDNYEETSKAIAEIDKNKNISDKDIQKYRLWKEQNCTCIYTGKIINLTDLFDQNKVDFEHTIPRSKSFDNSLANLTVCYADFNRNIKKNKMPTELDNYDEIKNRLEAWEKKVDDLEKQIDFWKTKSKHAQDKDEKDNTIRQRHLRQMEYDYWKNKLDRFTRTEVSQGFINSQLTDTQIITKYAFHYLKTVFDKVDVLKGTNTAQFRKIYGIQPKFEKKDRSEHSQHAVDATVLTLIPSAKKREEILKKSYEFEEKPENKNRQYHEKPFSSFNHSMIEEIQKNILINNLADKDQTLTPGEKIVRKRGRVVWLDKENRIPKIAQGDSIRGELHLQTYYGKIKIAAKDEQGTLQRDEDGNILYNQIDGKDEMWMVLRKSIESVNFNTDVIVDVHLAEHLKAQLSKGIKQTELEDFQGNKLRHLRCRVKAARGFMNSENATIVKEHVYKSEKDYKNFIYAASGENFLFALYENEQGKSIVPFNVFEAAKYSKYLDNINYVDLYKSKEPIYIGRGANKKVATLKHIFQVGQKVLFFNEQKEELFDLEQEDISKRLYYVKTLFDANTQRIIFQHHLEARSNEQLLIDFPKEQFGTKGKDGFSKFTADFIAPRLLLTPSNFNFIIEGKDFEMKLDGTIEFKEADV

SEQ ID NO: 8346 - protein, 1384 aa, synthetic construct
  REGION 1..1384: note = Synthetic
MNKILGIDLGTNSIGLTLREDEVFSWYGVYTFRKGVGEGKTGEFSFAAERTKHRSSRRLYNARRYRKWETLEVLIEKGYCPLNMENLDKWKKYKKGIGRVFPVEDKAFQKWIRLDFNGDNTPDFSSPFQLRRLLINEKLDLSIQENRYKIGRALYHIAQRRGFKSSRKQGANEKTAVYKGSNETKTIGRNEYEDLIIEHGSLGAAFAYLEDNGIRVRNRYTLRSDYLSEVQKILECQNIADNDFKEKIEKAIFFQRPLRSQKALVGKCTLEPNKARCPVSHPRFEEYRAWSFINNIKFRTDKDAQLEAIPLELKEKLYHEKFFFKSKREFDFSEIRKFIQAKGGKNWELNYSKKMDKVSVSSCFVSARLKSVFGEDWKNYEKTVIRKNKKGEDEAKKYTIEDIWHILFSFEDEEYFDEFLIDVLELEETQVKELKTLFNNFPVGYANLSLKAINNILPFLREGMIYSQAVILAKIPEILGKEVFEGDREVILKAIKDEIEANRKYKKIITIANNLIFKYYALDYEDRFAWKDTTYKLNESDFKDVESAAKEHFGGKTWLKLDDGYKQKILSEVTAKYQAFFASSKREHLKPPHLVNQIKRFLDDNFNVEEKILNKIYHPSQIDIYPKKEGQQYLLSPKTASFKNPMAYKTLYKLRDVINYLIKTGKIDEDTRIVVEVARDLNDSNKRWAIEQYQRHRETENREFANAISELIKDPEFSGIANPISTTDTDKFRLWAEQLENYEEVVKSINASKDDVQKYRLWKEQNCVCIYTGKLIKLTDLFNKNVIDFEHTIPRSKSFDNSLANLTVCYADYNRGIKKNQMPTELPNYEFESHGYLPIKPRLLDWEKKVDALRKQIETQKRNSKLAIDKDSKDKAIRARHLLQMEYNYWKNKLDRFTRTEIPQGFVNSQLIDTQIITKYAFHYLKTVFSKVEVIKGTNTAQFRKIYEIQPKDEAKDRGKHYHHAIDAAVLTLIPSPRKREEILKTAYEFEEENRGKQYHEKPFSSFSYSMIEEIQKNILINNIADKDQTLTLGIKKVRKRGRIVWLRDKNGKLLLDANGNKIIKIAQGDSIRGELHQQTYYGKIKIAAKDKDGSLKRNEDGNILYNQVDGKDEIWMVIRKPIDSVNFKTDVIIDKHLEQHLKRKLAEGVKQHELKDFQGKTLRHLRCRVKAARGFMNPDNATIVKEQVYKSSKDYKNFIYADSGENYMFGLYENENGRSIVPFNVFESAKYAKHLEELTPENLFKSKEILEPVYIGRGKKSKRAIIKHVFMVGQKVILFENDKEELKDLENDDLSNRLYFVKRLADAKTQRILFQHHLDARDDKQLMGDFPKEEFGTKGKDGFSKFSVDFVAPRLLLTPGNFTFVIEGEDFDMKLDGSIEFKF

SEQ ID NO: 8347 - protein, 1375 aa, synthetic construct
  REGION 1..1375: note = Synthetic
MEQIFGIDLGTNSIGAALREGKQFPWYGVYTFKKGIGEGKAGEYSFAAERTSNRSSRRLYNARRYRIWATLECLITNGYCPLTLEKLDQWRKYSKGEGRKFPVEDDDFQKWIKLDFNHDGKPDCLSPYQLRKEIANSTLDLSIETNRFKIGRSLFHIAQRRGFKSSRKNGSNEKVAIYKGSSETGTIGRNEYEQLLEDHKTLGGAFAHLENLGVRIRNRYTLRSDYEKEVDIILEVQNLEDSQFKTEIKKAIFFQRPLRSQKGLVGKCTLEPKKPRCPISHPLFEEYRAWSFLNNIKYFDSETGKLEPLPLNLKEELFNEKFFLKGKNDFKFIQINKYIQKITNKKLKLNYKDDTTVPACPVSARLRSLFGEDWKDFQHTKSIFKYGKRKEISYTIEDIWHILFSFEDEEILEDFFKKNFDFNEGQLKELKSLWSSFPVGYASLSLKAINCILPFLREGLVYTEAVLLAKIPEVIGKGKFNENEVFIKKRITDAIEENRRQKKVISIVNKLISDYHLSDYKQGYKNPQYDLDQDDFNDVHKSILAHFGEESWNKESEKDYFISNARDLYQKFFKSQDRKHFFSPHLLDYIKEILKDEFHIDLKELKKLYHPSQIDIYSPAKRADDGNLYLPSPKTGSFKNPMAYKTLFELRKVINHLIKEGKINEDTRVVVEVARDLNDANKRWAIETYQRNRENENREIAFAISQLIKDPDFRGNADPDNQTDREKLRLWTEQSSDPNEFWKEILATKDDVKKFRLWKEQGCKCMYTGELIPLTKLFDKNIIHFEHTIPRSKSFDNSLANLTVCYAKYNTDVKKNNLPVELPNYDKDTSEGKAIKPQLVDWEKRVESLYNQIEIAKSKSRGAIDKATKDDAIRKKHMLQMELDYWKNKLDRFTRKDVPTGFKNSQLIDSQLIAKYAFHYLKTVFNRVDVQKGTVTSLFRKIYGIQPKEESKDRGKHYHHAIDAAVLTLIPKAAEREAILQKYFLDSENSQFKDYPIAPFEGFGHHMLDGIKQKILINNVPNKDQAFSPGRKLVRKRGRVVWLRDKNGNLILDLEGKKVPKVATGDSVRGQLHLDTFYGKIKVVQRSENGGPKRDDDGSFLYSQVNGKDEMWLVGRKPITDLKIDKDVIVDPFIKTHIQNQIASGISLSELRDFNGKIIRRIRVRVKAGRGFLDADNITELKEQTYKSKYDYKNIYYTNSGDNYAFGYYKGIHQRKIVPINLFEASKVGKLNGSYKLEDFFEKRIKIGSGKNLEEVDLYHVFQVGQKVLIYYSEIKELKGLENKELSARLYFVKKLADANQSKIQFQHHLEGRDDQKLSIDFPKDVFGTKGKDGFSSFSPDFIAPRLLLTPSNFNFAIEGKEFIFGLDGGIKLKV

SEQ ID NO: 8348 - protein, 1389 aa, synthetic construct
  REGION 1..1389: note = Synthetic
MERVLGIDLGTNSIGLTLREGDVFSWYGVYTFKKGVGKIKGDEFSYAAERTKHRSSRRLYNSRRYRKWATLKVLIENGYCPLDIENLKKWKNYEKEVGRVFPVNDEAFQQWIKLDFDGDGIPDFSSPYQLRRLLINEKLDLSIKESRCKIGRALYHIAQRRGFKSSRKQGANEKTAVYKGSNETKTIGRNEYENLIIEHGSLGAAFASLEDNGIRIRNRYTLRADYLEEVKKILDFQNIANADFKEKVENAIFFQRPLRSQKGLVGKCTLEPNKPRCPVSHPKYEEYRAWSFINNIKYRIDKDARFEPIPLELKEKLYHEKFFFKSKREFDFSEIRKFIQANGGKNWELNYSNKMDKVSVSSCFVSARLRSVLGDDWQHFEKTVVRKNKKGESETKTYNIDDIWHILFSFEDEEYFDEFLSGVLELDENQIEELKKLFNGFPVGYANLSLKAINNILPFLREGMIYSEAAILAKVPEILGKEVFEKDKDVVFKAIKDKIEENRHQKKTITITNNLIFKYYALDFQDRFGWKDVSYRLNESDLKDVETAAIEHFGDKTWPTLDEEYKNQILSEVTEKYQVFFASTKREHLKPPHLVNQIKQFLDDNFNVQEKLLDKIYHPSQIDIYPKREGQQFLLSPKTAAFKNPMAYKALYKLRDVINYLIETGRIDEETRIVVEIARDLNDSNKRWAIEKYQRDREAENREFSDIISELTSNPEFSGVANSESKDDIDKIRLLLEQTDEEQSEEVFELKKILLDPYKKQKEKNEAQKSLIRKYRLWLEQGMQCVYTGKPIKITDLFNKNIIDFEHTIPRSKSFDNSLANLTVCYADYNRNIKNNRMPTELPNYDAESHGYSAIKPRLEAWEKKVEHLFNQIDFWKTKSKNAKDKTEKDNAIRTKHLWQMEYDYWKNKLDRFTRTEVPQGFVNSQLTDTQIITKYAFHYLKTVFNKVDVIKGSNTAQFRKIYGIQPEEEEKDRGKHYHHAVDAAVLTLIPSPRKREEILKKAYEYEEKYRGKQYNEKPFSGFSYSMIEEIQRNILINNIADKDQTLTPGLKKVRKRGRIVWLKDKNGKPLLDENGAKIPKIAKGDSIRGELHLQTYYGKIRIIKRDDNLKPLRNSDGKWEFLEGKDEYRYALRIPLENLTSLDSLVSPELVKIIENQLNGRTLKKAIVEGLYMVDKKGNQVNKIRRVRVWQAVDPMRIKEQTYKSKNEYKNYYYAKNAENTAFGFYKNDNGETVVVPRNLFEISTFDKPNSIKNLTELFEIEIKNKKGIVLSLFHVFIPGQKVLFYENNREELKELDNLSNNLYFVKRLYQASRGNIQFQHHLEARDDKQLTEDFPVKEFGQKGKNGFSKFTTDFVAPRLLLSPGNFDFIIEGKDFEMKLDGTIKFKF

SEQ ID NO: 8349 - protein, 1382 aa, synthetic construct
  REGION 1..1382: note = Synthetic
MKKTLGIDLGTNSIGLAIRNENEFDWFGVYTFKKGVGFGKTGEFSFAAERTKHRLSRRLYNARRYRKWETLKVLIENDYCPLTIDELNNWKHYKKGSGRTFPMNNNLFNNWIKLDFNNDGLVDYSSPYQLRRELIEYTLDTSLETNRHKIGRALYHIAQRRGFKSSRKSGDNEKTSVYKGSSETKTIGRNEYEELIIEHGSLGAAFAELEDKGIRVRNRYTLRSDYQLEVETICKKQKLKESLIDSVTKAIFFQRPLRSQKGLVGKCTLEKNKYRCPISHPRFEAFRAWSFINTIKYKTEDAEDFIPIPIEIKQKLYNEVFFRKSKTNFHFSDIRKFLETNGGRNWHLNYKKKLDKTNVAGCPVSARFKSVFGENWEAKKIKTERTNKKGEIKQVEYSIDDIWHILFSFEDEEVFQEFILNTLKLDEDQFKELTTLWNSFPIGYANLSLNAINNILPFLKEGLIYTESVLLAKIPQLIGKERFLENKEFLLNAIKSEIETNRNIKFKLNIVNILISKYFSEFIGRRAKGVDSQIEEIANKEVQAALKSSIGNKTWSNYSEETKKEYFDFVYSKYIKFLDGKQSKKEKASYSSNKNPEIDYYRMPHLLDQIKDFLIGNFNLTDQAVSKMYHPSQIDIYKKEDGQTYLKSPRTVAFKNPMAYKTLYRLKDVINHLIEIGKIDNETRIVVEIARELNDANKRNALETYQRRRENENKEFAIAITELLKDPDFSGTADPNSKSDKDKFRLWTEQINNKDEVFRDIVATKEDIKKYRLWKEQDCQCIYTGKTINLTDLFNPNTIDFEHTIPRSLSFDNSLANLTVCYADYNRNVKNNGIPTEMPNYSASTQDYSAIEPRLEKWKERIDELEKQIDFWKFKSKTAMDKEGKDKAIRERHLRYFEYDYWRNKVDRFTREDVPQGFVNSQLRDTQIITKYAFHYLKTIFNKVDVQKGSVTSEFRKIYEIQNKDEVKSRSKHHHHAIDAAVLTLIPDSAKREEILKKSYEYEEYRRKQYHDKPFVGFHQSQITSIEETLLINNIPNKDQALSKSKRIVRHRGKVVWLRDKNGKLLKDVDGNKIPKIAQGDSVRGQLHEDSYYGKIRIPEYGDDSKIKRDKNGKILMSDEYWVVKRELITDLKIDKGIIKDEIIDKPLKKHIEEQLKQGIAINKVLDFNGKVIRHIRVRPKAARGFVSPDNLKTLKKHTYESSYKHKKDIFVKTGDNYAFALYVSEDGRKKIISRNLFEIAGFESGTPLKFLFEPYINLTKTKQAKLHHIFQVGQKVIFYENNKNELKELDNLSSRLYRVHTLADAKQSLIRFQHHLEARSDQQLSLDFPKSTFGVRGKNGFSKFSTDFIQPRLLLSPGNLNCIIEDVDFVMSLHGEIELLF

SEQ ID NO: 8350 - protein, 1379 aa, synthetic construct
  REGION 1..1379: note = Synthetic
MEKTLGLDLGTNSIGAALRVGNEFDWFGVKTFKKGVGTGKSGEFSLAAERTGHRSKRRLYNAKRYRKWETLKVLIEARYCPLSIEELHKWKRYEKGVGRVYPIENKEFDQWIKLDFDGDGTPDFSSPYQLRRLLIQEKFDLSDKRNKQMLGRAFYHIAQRRGFKSSRKGGDKETSAIHEGSSETDAVPRDLYKEMLTEYRTLGAALAKLEDDGIRIRNRYTLRKDYEEEIKKIAEVQELDEQIREKILKAIFFQRPLRSQKGLVGKCTLEPMKAKCSISHPQFELYRAWAFINNLEFYDFEGEEWIKLPIEWKRNLLNDCFLKVRTSFKFGDIRKNLNKQAGTKLTLNYDVSQGRIDKQKNLSSVDKVSVSGCPVAGRFKSVLGENWHNWSYETTRTNKLSGESKEETKIYSIDDLWHVLFSFEDEEYFEEYCFEVLDFNEDKRKQLLTLWKSFPVGYASLSLKAINNILPFLEEGLIYTEAVLLAKIPELIGKEKFQENKELLIQEIRGIIKQNRLKKRVLNIANNLISQYYLLEHGNGRFAHKDYGYKLADSDKRDVAKACVQHFGEKRWEKMEDAEKESTEVAVQDKYQEFFTNPKRMHFKLPRLIDHIQEFLADHFELDQKQLKKLYHPSQIDIYPESRPADDGKCYLGSPKTGAFKNPMAMRTMHELRSLINKLIEDGKIDEETRIVVETARSLNYANMRWAIEKHQRDREKENKEFAIAISELIKDSEFQGQANPNSKSDIDKFRLWVEQIEDFEKVLKVVSATKEDVEKYYHWKEQGCRCMYTGEFISITDLFDTNKVDFEHTIPRSISFDNSLANRTVAYASYNRNVKGNKLPTELPNYWEDTKEGKAIKPRLETWENRLKSYKEKIERAKAASKGAQDKDSKDQNVRRKHIAQLEYDYWKNKLDRFTREDVPTGWKNSQLIDTQIVSKYAFHYLKSVFNRVDVQKGSNTAEFRKIYQIQDEDKKDRGKHSHHAVDAAVLTLIPSPSKMKEILYKAYMYYEKNSKQYTEKPFEGFHQSQITEIEDKILINQKSKDQALASGSKKVRKRGKIEYLRDANGEFRLDEEGKRIPKIATGDSIRGQLHLDTFYGKIKVVERNPDGTPRRNEDGELVFEKKNGEHVFWMVERVKVSDSKLNLKNVVDPLLRQHMEKQIKNGRKLNELEDFNGKIIRHVRCKSHVTEPITLKKHTYKSKHPHKQSYYVANGENYGYAFYEGLVNGKLHRDYEIIRLMDLAVTNRGGEATVLPAMSIGKDTKIPLRAILKPGQRVLFYQNTPDELGSLNPADLSKRFYKVVKFEKDGRIVFEHHSNAKDDNALKELAGEHGKSIYNGFSTINFEAPWPKLKLSRGNLDLLIECVDFDQDETGKLTWKG

SEQ ID NO: 8351 - protein, 1065 aa, synthetic construct
  REGION 1..1065: note = Synthetic
LKKQLYQEKFFFKSKREFKFLEIRKFIQQNIGCNLVLNYSPKMDNISIPSCYVSARLKAVFGEDWQHFEKKIEQKNKNGENKVITYRIEDIWHILFSFEHEDNFIEFLDNKLCLSENQIKEMIKLFNDFPIGYANLSLKAINNILPFLREGHIYTEAVILAKIPEILGEEFSENKVDIIKTIENEISNNRYEKTITTIANNLIFKYYALDYEDRFGWKDITYKLKDSDFNDVEIATKGHFGEKSWEKLNEDKQQNILAEVVKKYQAFFADDKRKHIEPLHLVNQIKEFLSANFNIEKKVLEKIYHPSQIDIYASKEDQRLLASPKTAAFKNPMAYKTLYKLRDVINYLIETNRIDNETRIVVEIARDLNDANKRWAIETYQRRRETENLEFAAAITELINDNDFSGVADPNSDDDIDKFRLWAEQIEDYGEVSKEVVTINKDKSISNKDIQKYRLWKEQNCTCMYTGKIINLTDLFDQNKVDFEHTIPRSKSFDNSLANLTVCYADYNRNVKKNKIPVELPNYESEGLSYSAIKPRLEAWEKRIDSLKDRIETQNKNSKLAIDKEKKDDAIRQRHLLQMECDYWKNKLDRFIRTEVPQGFINSQLTDTQIITKYAFHYLKTVFRKVDVIKGANTADFRKIYGIQTKFEKKDRSQYFHHAIDAAVLTLIPPAKNREEILKRAYEFEEKPENKNKQYHEKPFSAFNHFMLEEIQKNILINNLAEKDQTLTPGKKIIRKRGRVMWIDKEKRIPKIAQGDSIRGELHLQTYYGKIKIAAKDKKGTLLRDEKGKIIYNQIDGIDEVWMVLRILVTDSKFNADNIIDNALRKYVKEQLKEKKVTELVDFNGNIIRHIRCRVKSGKGFMNPQNVTIVKEQTYKSSKNYKSYIYADSGENYIFGLYENIYGRDVISVNKFEAAKFISKLNFVDKSDLFKMKEPVFIKKTEAKLIHIFEIGQKVIFYKSSKNEIKDLYETDKIEISKRLYFIKRLHQASVGNIQLQHHLEARTDDELSKKFPKEMFNSAGKDGFSKYQEDFVAPRLLFKPTNSNFIIEGKDFEMKLDGTIAFKF

SEQ ID NO: 8352 - protein, 1396 aa, synthetic construct
  REGION 1..1396: note = Synthetic
MKKTLGIDLGTNSIGLTLRENDIFTWYGVYTFKKGVGEGKTGEFSYATKRTTHRSSRRLYNARRYRKWETLKVLIENDMCPLSIDELNNWKNYKKGVGRVYPVDNIPFQKWISLDFDNDGVSDYTSPYQLRRELITKKYDLENKIERQKLGRALYHIAQRRGFKSSRKQGANEKTAVYKGSNETKTIGRNEYEDLIIKHGSLGAAFAHLEDEGIRVRNRYTLRADYKDEVDKILNFQEISDNYLRDKMLLETSNGSIFYQRPLRSQKGLIGKCTLEPSKARCPISHPKFEEYRAWSFINNIRYRTSENSEFESIPIELKEKLYKDKFFFISKRDFEFSEIRKYIKANGGADWELNYSSKMDKISVPSCFVTARLKSVFGEDWRNYKKTILRKDKKGYEQSITYTIEDIWHILFSFEDDEYFRQFLENIIELNENQIKELNTLYNNFPVGYANLSLKAINNILPFLREGMIYSDAVILAKIPEIIGKDLFNTNKNIILNAVKDEIEKNRFQKRIVAIVNNLIFKYYALDFQDKFGWKDISYKLDDIDLKDIEIATIENFGEKTWVKLDNDYKISILSKVKEAYQDFFSSSKREHIKPPHLVNQIKQFISAKFGTNEKVLDKIYHPSQIAIYPKKEGQQYLLSPKTAAFKNPMAYKSLYKLREVINHLIEIGKIDEETRIVVEVARDLNDSNKRWAINSHQRDREAENRQFAEIISELAKDPEFSGSADANSETDINKFRLWYEQIEDYETLMEGLKEIDNNKALSISEKEIKKYRLWKEQNCACIYTGKIISLTDLFNQNIIDFEHTIPRSKSFDNSLANLTVCYADYNRNIKGNKLPTELPNYENESNGYTAIKPRLKAWERRADNLFNQIDFWKTKSKTAMDKNEKDYAIRQGHLRKMEYDYWKNKLDRFTRTEVPQGFVNSQLIDTQIITKYAFHYLKTVFNKVDVIKGSNTAQFRKIYGIQAKDEIKDRSMHYHHAIDAAVLTLIPSARKREEILKKSYEYEELHRGKQYTEVPFKGFNYSMIEEIKRNILVNNIADKDQTLTPTVKRVRKRGRITWLKDENDRFLLDNKGNKIPKIAQGDSIRGELHQQTYYGKIKIAAKDEKGRLVKDEEGNILYNQVDGNDEIWMVIRRPISDIKFPSTGLIVDTDLEEHLNRQIKNGIKPYELKDFQNNTIRRVRCRVKSGRGYMNPDNVTKVKEQTYRSEKEYKNYIWADSGDNYLFALYENEKGREIVAVNKFEAANVLSTVKEVQTKADLFKHKEPVYIKNSEAILIHIFEVGQKAIFIDDNEDIHDIISDNELLSKRLYFIKRFHQASAGNMVFQHHLEARSDERLMIDFPKEKHKMAGRDGFSKYQTEFVAPRLLFKPTSKNILFETLDFEMTIKGSIKIINNI

SEQ ID NO: 8353 - protein, 1002 aa, synthetic construct
  REGION 1..1002: note = Synthetic
MRILGFDIGINSIGWAFVENDELKDCGVRIFTEAENPSNKESLALPRRNARSSRRRLKRRKARLVAIKRILAKELKLNFKDYVAADGELPKAYEGKLTSIYELRYKALIQKLETKDLARVILYIAKHRGYMNKNEKKSNDAKKGKILSALKNNALKLENYQSVGEYFYKEFFQKYKENTKNFIKIRNTKDNYNNCVLSSDLEKELKLILEKQKEFGYNYSEDFINEILKVAFFQRPLKDFSHLVGACTFFEEEKRACKNSYSAWEFVALTKIINEIKSLEKISGEIVPTQTINEVLNLILDKGSITYKKFRSCINLHESISFKSLKYDKENAENAKLIDFRKLVEFKKALGVHSLSRQELDQISTHITLIKDNVKLKTVLEKYNLSNEQINNLLEIEFNDYINLSFKALGMILPLMREGKRYYEACEITNLKPKTVDEKEDFLPAFCDSIFAHELSNPVVNRAISEYRKVLNALLKKYGKVHKIHLELARDVGLSKKAREKIEDQQKNNKAINDWALKECENIGIKASAKNILKLKLWKEQKEICIYSGNKISIEHLKDEKALEVDHIYPYSRSFDDSFINKVLVFTKENQEKLNKTPFEAFGKNIEKWSKIQTLAQNLPYKKKNKILDENFKDKQQQDFISRNLNDTRYITTLIAKYTKEYLNFLPLSENENANLKSGEKGSKIHVQTISGMLTSVLRHTWGFDKKDRNNHLHHALDAIIVAYSTNSIIKAFSDFRKNQELLKARFYAKELTSDNYKHQVKFFEPFKDFREKILSKIDEIFVSKPPRKRVRRALHEDAFYSENKIIDKCSYNSKEGLQIALSCGRVRKIGTKYVKNDTMIRVDIFKKQNKFYAIPIYAMDFALGILPNKIVITGKDKNNNPKQWQTIDESYEFCFSLYKNDLILLQKKNMQEAEFAYYNSFDIGSSSICVEKHDNKFENLTDNQKLLFSKAEEGKVKTKGLGIQNLKIFEKYIITPLGDKIKADFQPRENISLKTSKKHGL

SEQ ID NO: 8354 - protein, 983 aa, synthetic construct
  REGION 1..983: note = Synthetic
VARILAFDIGISSIGWAFSENDELKDCGVRIFTKAENPKTGESLALPRRLARSARKRLARRKARLNHLKHLIANEFKLNYEDYQSFDESLAKAYKGSLISPYELRFRALNELLSKQDFARVILHIAKRRGYDDIKNSDDKEKGAILKAIKQNEEKLANYQSVGEYLYKEYFQKFKENSKEFTNVRNKKESYERCIAQSFLKDELKLIFKKQREFGFSFSKKFEEEVLSVAFYKRALKDFSHLVGNCSFFTDEKRAPKNSPLAFMFVALTRIINLLNNLKNTEGILYTKDDLNALLNEVLKNGTLTYKQTKKLLGLSDDYEFKGEKGTYFIEFKKYKEFIKALGDHSLSQDDLNEIAKDITLIKDEIKLKKALAKYDLNQNQIDSLSKLEFKDHLNISFKALKLITPLMLEGKKYDEACNELNLKVAINEDKKDFLPAFNETYYKDEVTNPVVLRAIKEYRKVLNALLKKYGKVHKINIELAREVGKNYSQRAKIEKEQNENYKAKKDAELECEKLGLKINSKNILKLRLFKEKEFCAYSGEKIKISDLQDEKMLEIDHIYPYSRSFDDSYMNKVLVFTKQNQEKLNQTPFEAFGNDSAKWQKIEVLAKNLPTKKQKRILDKNYKDKEQKDFKDRNLNDTRYIARLVLNYTKDYLDFLPLSDDENTKLNDTQKGSKVHVEAKSGMLTSALRHTWGFSAKDRNNHLHHAIDAVIIAYANNSIVKAFSDFKKEQESNSAELYAKKNSELDYKNKRKFFEPFSGFRQKVLDKIDEIFVSKPERKKPSGALHEETFRKEEEFYQSYGGKEGVLKALELGKIRKVNGKIVKNGDMFRVDIFKHKKTNKFYAVPIYTMDFALKVLPNKAVARSKKGEIKDWILMDENYEFCFSLYKDSLILIQTKDMQEPEFVYYNAFTSSTVSLIVSKHDNKFETLSKNQKILFKNANEKEVIAKSIGIQNLKVFEKYIVSALGEVTKAEFRQREDFKK

SEQ ID NO: 8355 - protein, 808 aa, synthetic construct
  REGION 1..808: note = Synthetic
ANYQSVGEYLYKEYFQKFKENSKEFTNVRNKKESYERCIAQSFLKDELKLIFKKQREFGFSFSKKFEEEVLSVAFYKRALKDFSHLVGNCSFFTDEKRAPKNSPLAFMFVTLTRIINLLNNLKNTEGILYTKDDLNALLNEVLKNGTLTYKQTKKLLGLSDDYEFKGEKGTYFIEFKKYKEFIKALGDHSLSQDDLNEIAKDITLIKDEIKLKKALAKYDLNQNQIDSLSKLEFKDHLNISFKALKLITPLMLEGKKYDEACNELNLKVAINEDKKDFLPAFNETYYKDEVTNPVVLRAIKEYRKVLNALLKKYGKVHKINIELAREVGKNYSQRAKIEKEQNENYKAKKDAELECEKLGLKINSKNILKLRLFKEQKEFCAYSGEKIKISDLQDEKMLEIDHIYPYSRSFDDSYMNKVLVFTKQNQEKLNQTPFEAFGNDSAKWQKIEVLAKNLPTKKQKRILDKNYKDKEQKDFKDRNLNDTRYIARLVLNYTKDYLDFLPLSDDENTKLNDTQKGSKVHVEAKSGMLTSALDTLGALALRIEITIFITLLMQLLLMQTTLSRLFQILKKSKKATVQNFMQKKLVNIIKTKGSFLSLLVVLGKRFIKLMKFLSQNLREKSQVELYMKKHLEKKKNSINHTAEKKEFKPSLVKSAKMVKLKMAICLEWIFLNTKRQINFMLCQFILWILFKYYQIKLHEVKKVRKTGFWMKIMSFAFLYTKIVFFKLKICKSQNLFIIMLLQALLLVLFQNTIINLKRAKIKKYCLKMQMKKKSQKAEFKIKYLKNTFQHLGKLQRLSLDKEKILKN

SEQ ID NO: 8356 - protein, 823 aa, synthetic construct
  REGION 1..823: note = Synthetic
VGEYLYKEYFQKFKENSKEFTNVRNKKESYERCIAQSFLKDELKLIFKKQREFGFSFSKKFEEEVLSVAFYKRALKDFSHLVGNCSFFTDEKRAPKNSPLAFMFVALTRIINLLNNLKNTEGILYTKDDLNALLNEVLKNGTLTYKQTKKLLGLSDDYEFKGEKGTYFIEFKKYKEFIKALGEHNLSQDDLNEIAKDITLIKDEIKLKKALAKYDLNQNQIDSLSKLEFKDHLNISFKALKLITPLMLEGKKYDEACNELNLKVAINEDKKDFLPAFNETYYKDEVTNPVVLRAIKEYRKVLNALLKKYGKVHKINIELAREVGKNHSQRAKIEKEQNENYKAKKDAELECEKLGLKINSKNILKLRLFKEQKEFCAYSGEKIKISDLQDEKMLEIDHIYPYSRSFDDSYMNKVLVFTKQNQEKLNKTPFEAFGNDSAKWQKIEVLAKNLPTKKQKRILDKNYKDKEQKDFKDRNLNDTRYIARLVLNYTKDYLDFLPLSDDENTKLNDTQKGSKVHVEAKSGMLTSALRHTWGFSTKDRNNHLHHAIDAVIIAYANNSIVKAFSDFKKEQESNSAELYAKKISELDYKNKRKFFEPFSGFRQKVLDKIDEIFVSKPERKKPSGALHEETFRKEEEFYQSYGGKEGVLKALELGKIRKVNGKIVKNGDMFRVDIFKHKKTNKFYAVPIYTMDFALKVLPNKAVARSKKGEIKDWILMDENYEFCFSLYKDSLILIQTKDMQEPEFVYYNAFTSSTVSLIVSKHDNKFETLSKNQKILFKNANEKEVIAKSIGIQNLKVFEKYIVSALGEVTKAEFRQREDFKK

SEQ ID NO: 8357 - protein, 694 aa, synthetic construct
  REGION 1..694: note = Synthetic
VGEYLYKEYFQKFKENSKEFINVRNKKESYERCIAQSFLKDELKLIFKKQREFGFSFSKKFEEEVLSVAFYKRALKDFSHLVGNCSFFTDEKRAPKNSPLAFMFVTLTRIINLLNNLKNTEGILYTKDDLNTLLNEVLKNGTLTYKQTKKLLGLSNDYEFKGEKGAYFIEFQKYKEFIKALGEHSLSQDDLNEIAKDITLIKDEIKLKKALAKYDLNQNQIDNLSKLEFKDHLNISFKALKLITPLMLEGKKYDEACNELNLKVAINQDKKDFLPAFNETYYKDEVTNPVVLRAIKEYRKVLNALLKKYGKVHKINIELAREVGKNYSQRAKIEKKQNENYKAKKDAEFECEKLGLKINSKNILKLRLFKEQKEFCVYSGEKIKISDLQDEKMLEIDHIYPYSRSFDDSYMNKVLVFTRQNQEKLNKTPFEAFGNDRVKWQKIEVLAKHLPTKKQKRILDKNYKDKEQKDFKDRNLNDTRYIARLVLNYTKDYLDFLPLSDDENTKLNDTQKGSKVHVEAKSGMLTSALRRTWGFSTKDRNNHLHHAIDAAIIAYANNSIVKAFSDFKKEQENNTAELYAKKISELDYKNKRKFFEPFSGFRQKVLDKIDEIFVSKPERKKPSGALHEETFRKEEEFYQSYGGKEGVLKALELGKIRKVNVKSLTMAICLEWIFLNTKRQINFMLCQFIPWILL

SEQ ID NO: 8358 - protein, 669 aa, synthetic construct
  REGION 1..669: note = Synthetic
MKVIGFDIGINSIGWAFVENDELKDCGVRIFTKAENPKNKESLALPRRNARSSRKRLKRRKLRLIAIKHILAKELKLNYKDYIANDGDLPKAYEGKLTSIYELRYKALTQKLEAKDLARVILHIAKHRGYMNKNEKKSNDVEKGKILSALKNNALKLENYQSVGEYFYKEFFQKYKENTKNFIKIRNTKDNYNNCILASDLEKELKLILEKQKEFGYNYSEDFINEILKVAFFQRPLKDFSHLVGACTFFEEEKRACKNSYSTWEFVALTKIINEIKSLEKISGEIVSTQIIDEVLNLILDKGSITYKKFRSCINLHESISFKSLKYDKENAENAKLIDFRKLVEFKKALGEHSLSRQELDQISTHITLIKDNVKLKTALEKYNLSNEQINNLLEIEFNDYINLSFKALNMILPLMREGKRYDEACEIANLKPKTTNQKHDFLPAFCNSIFVHELSNPIVNRAISEYRKVLNALLKKYGKVHKIHLELARDVGLSKKAREKIEKEQKENQSINAWALNECENMGLKVNAKNILKLKLWKEQKEICIYSGNKISIEHLKDEKALEVDHIYPYSRSFDDSFMNKVLVFTKENQEKLNKTPFEAFGKNIEKWNKIQTLAQNLPYKKKNKILDENFKDKQQQDFIDRNLNDTRYIATLITKYTKEYLNFFTFK

SEQ ID NO: 8359 - protein, 642 aa, synthetic construct
  REGION 1..642: note = Synthetic
VARILAFDIGISSIGWAFSENDELKDCGVRIFTKAENPKTGESLALPRRLARSARKRLARRKARLNHLKHLIANEFKLNYEDYQSFDESLAKAYKGSLISPYELRFRALNELLSKQDFARVILHIAKRRGYDDIKNSDDKEKGAILKAIKQNEEKLANYQSVGEYLYKEYFQKFKENSKEFTNVRNKKESYERCIAQSFLKDELKLIFKKQREFGFSFSKKFEEEVLSVAFYKRALKDFSHLVGNCSFFTDEKRAPKNSPLAFMFVALTRIINLLNNLKNTEGILYTKDDLNALLNEVLKNGTLTYKQTKKLLGLSDDENTKLNDTQKGSKVHVEAKSGMLTSALRHTWGFSAKDRNNHLHHAIDAVIIAYANNSIVKAFSDFKKEQESNSAELYAKKISELDYKNKRKFFEPFSGFRQKVLDKIDEIFVSKPERKKPSGALHEETFTKEEEFYQSYGGKEGVLKALELGKIRKVNGKIVKNGDMFRVDIFKHKKTNKFYAVPIYTMDFALKVLPNKAVARSKKGEIKDWILMDENYEFCFSLYKDSLILIQTKDMQEPELVYFNAFTSSTVSLIVSKHDNKFETLSKNQKILFKNANEKEVIAKSIGIQNLKVFEKYIVSALGEVTKAEFRQREDFKNELR

SEQ ID NO: 8360 - protein, 598 aa, synthetic construct
  REGION 1..598: note = Synthetic
MKFKSLKYDKDNVESTKLIEFRKLVEFKKALGEHSLSREELDQIATYITLIKDNEKLKITLEKYSLNNEQIKNLLEIDFNDHINLSFKALNLILPLMKEGKRYDEACKLLNLKTKSNNQKFDFLPAFCDSIFAQELTNPIVNRAISEYRKVLNALLRKYGKMHKIHIELARDIGLSKKLRAKIEKEQKENYENNIWALNECEKFGLKANAKNILKLKLWKEQKEFCIYSGKKISIEHLRDEKALEVDHIYPYSRSFDDSFLNKVLVFTKENQEKLNKTPFEAFGANEERWSKIQALAQNLPYKKKNKILDEAFKGKQQQDFISRNLNDTRYISTLIVKYTKEYLDFLPLDEKEDINLKSGEKGSKIHVQTINGMLTSVLRHTWGFAQKDRNNHLHHALDATIVAYSTNAIIKAFSDFKKEQELLKAKLYAKELTSDSYKHQAKFFEPFEGFREQILIQINKLFVSKPPRKRARGALHKETFYPKDEMIKKYNSQEGLEIALNCGKIRKIGTKYVENDTMVRIDIFKKQNKIYAIPIYTMDFALGVLPNKIVIKGKDKKGNPKQWQEIDESYEFCFSLHKDDLVLIQKKRYARTRICLL

SEQ ID NO: 8361 - protein, 563 aa, synthetic construct
  REGION 1..563: note = Synthetic
MKILGFDIGINSIGWAFVEDNQLQDCGVRLFTKAEDPKTKESLALPRRNARSNRRRLGRRRSRLIALKHIISKGLKLNYQDYIANDGELPKAYEGRLISPYELRYKALNEKIEPKDLARVILHIAKHRGYMNKNEKKSSDNEKGKILSALKTNALKLEKYQSVGEYFYKEFFQKYRENTKDFINIRNKEGSYENCVLASDLEKELKLILEKQKEWGYSYNDNFIKEILKVAFFQRPLKDFSYLVGACTFFEDEKRACKNSYSAWEFVALTKIINELKSLEKESGELVSSQIINEILNHILDKGSITYKKFREYIKLHESMKFKSLKYDKDNVESTKLIEFRKLVEFKKALGEHSLSREELDQIATYITLIKDNEKLKITLEKYSLNNEQIKNLLEIDFNDHINLSFKALNLILPLMKEGKRYDEACKLLNLKTKSNNQKFDFLPAFCDSIFAQELTNPIVNRAISEYRKVLNALLKKYGKMHKIHIELARDIGLSKKLRAKIEKEQKENYENNIWALNECEKFGLKANAKNILKLKLWKEQKEFCIYSGKKISIEHLRDEKAL

SEQ ID NO: 8362 - protein, 545 aa, synthetic construct
  REGION 1..545: note = Synthetic
MFVALTRIINLLNNLKNTEGILYTKDDLNTLLNEVLKNGTLTYKQTKKLLGLSDDYEFKGEKGTYFIEFKKYKEFIKALGDHSLSQDDLNEIAKDITLIKDEIKLKKALAKYDLNQNQIDSLSKLEFKDHLNISFKALKLITPLMLEGKKYDEACNELNLKVAINEDKKDFLPAFNETYYKDEVTNPVVLRAIKEYRKVLNALLKKYGKVHKINIELAREVGKNHSQRAKIEKEQNENYKAKKDAELECEKLGLKINSKNILKLRLFKEQKEFCAYSGEKIKISDLQDEKMLEIDHIYPYSRSFDDSYMNKVLVFTKQNQEKLNKTPFEAFGNDSTKWQKIEVLAKNLPEKKQKRILDKNYKDKEQKDFKDRNLNDTRYIARLVLNYTKDYLDFLPLSDDENTKLNDTQKGSKVHVEAKSGMLTSALRHTWGFSTKDRNNHLHHAIDAVIIAYANNSIVKAFSDFKKEQESNSAELYAKKISELDYKNKRKFFEPFSGFRQKVLDKIDEIFVSKPERKKPSGALHEETFRKEEEFYQSYGEKKEF

SEQ ID NO: 8363 - protein, 529 aa, synthetic construct
  REGION 1..529: note = Synthetic
VWASIFIKSIFKNSKKIPKNLQMLEIKKESYERCIAQSFLKDELKLIFKKQREFGFSFSKKFEEEVLSVAFYKRALKDFSHLVGNCSFFTDEKRAPKNSPLAFMFVALTRIINLLNNLKNTEGILYTKDDLNTLLNEVLKNGTLTYKQTKKLLGLSDDYEFKGEKGTYFIEFKKYKEFIKALGDHSLSQDDLNEIAKDITLIKDEIKLKKALAKYDLNQNQIDSLSKLEFKDHLNISFKALKLITPLMLEGKKYDEACNELNLKVAINEDKKDFLPAFNETYYKDEVTNPVVLRAIKEYRKVLNALLKKYGKVHKINIELAREVGKNYSQRAKIEKEQNENYKAKKDAELECEKLGLKINSKNILKLRLFKEQKEFCAYSGEKIKISDLQDEKMLEIDHIYPYSRSFDDSYMNKVLVFTKQNQEKLNQTPFEAFGNDSAKWQKIEVLAKNLPTKKQKRILDKNYKDKEQKDFKDRNLNDTRYIARLVLNYTKDYLDFLPLSDDENTKLNDTHKGSKVHVEAKSGMLTSA

SEQ ID NO: 8364 - protein, 517 aa, synthetic construct
  REGION 1..517: note = Synthetic
VARILAFDIGISSIGWAFSENDELKDCGVRIFTKAENPKTGESLALPRRLARSARKRLARRKARLNHLKHLIANEFKLNYEDYQSFNESLAKAYKGSLISPYELRFRALNELLSKQDFARVILHIAKRRGYDDIKNSDDKEKGAILKVIKQNEEKLANYQSVGEYLYKEYFQKFKENSKEFTNVRNKKESYERCIAQSFLKDELKLIFQKQREFGFSFSKKFEEEVLSVAFYKRALKDFSHLVGNCSFFTDEKRAPKNSPLAFMFVALTRIINLLNNLKNTEGILYTKDDLNALLNEVLKNGTLTYKQTKKLLGLSDDYEFKGEKGTYFIEFKKYKEFIKALELGKIRKVNGKIVKNGDMFRVDIFKHKKTNKFYAVPIYTMDFALKVLPNKAVARSKKGEIKDWILMDENYEFCFSLYKDSLILIQTKDMQEPELVYFNAFTSSTVSLIVSKHDNKFETLSKNQKILFKNANEKEVIAKSIGIQNLKVFEKYIVSALGEVTKAEFRQREDFKNELR

SEQ ID NO: 8365 - protein, 515 aa, synthetic construct
  REGION 1..515: note = Synthetic
LAFDIGISSIGWAFSENDELKDCGVRIFTKAENPKTGESLALPRRLARSARKRLARRKARLNHLKHLIANEFKLNYEDYQSFDESLAKAYKGSLISPYELRFRALNELLSKQDFARVILHIAKRRGYDDIKNSDDKEKGAILKAIKQNEEKLANYQSVGEYLYKEYFQKFKENSKEFTNVRNKKESYERCIAQSFLKDELKLIFKKQREFGFSFSKKFEEEVLSVAFYKRALKDFSHLVGNCSFFTDEKRAPKNSPLAFMFVALTRIINLLNNLKNTEGILYTKDDLNTLLNEVLKNGTLTYKQTKKLLGLSDDYEFKGEKGTYFIEFKKYKEFIKALGEHNLSQDDLNEIAKDITLIKDEIKLKKALAKYDLNQNQIDSLSKLEFKDHLNISFKALKLITPLMLEGKKYDEACNELNLKVAINEDKKDFLPAFNETYYKDEVTNPVVLRAIKEYRKVLNALLKKYGKVHKINIELAREVGKNYSQRAKIEKEQNENYKAKKSTITLFYQIPILL

SEQ ID NO: 8366 - protein, 1000 aa, synthetic construct
  REGION 1..1000: note = Synthetic
MKIIGFDIGINSIGWAFLENDELKDCGVRIFTKAENPKNKESLALSRRNLRSSRKRLKRRKLRLIAIKHILAKEFNLNYKDYIANDGELPKAYEGRLTSIYELRYKALTQKLEVKDLARVILHIAKHRGYMNKNEKKSNHTEKKGEILDILKNNALKLKEYQSVGEYFYKEFFQKYRENTKDFTKIRNTKDNYNNCVLASDLEKELKLILEKQREFGYSYSNDFIKEVIQVAFFQRPLKDFSHLVGTCTFFEEEKRACKNSYSAWEFVALTKIVNELKSLEKISAELISAQTINEILNHILDKGSITYKKFRSYINLHESINFKSLNYDKDNEENAKLVDFKKLVDFKKALGEHSFNRQELDQISTYITLIKDNVKLKTALEKYNLSNEQINNLLEIEFNDHINLSFKALSMILPLMREGKKYDQACEIANLKPKTINQKQDFLPAFCDSIFAYELANPIVNRAISEYRKVLNALLKKYGKVHKIHLELARDVGLSKKVREKIEKEQKENQAINTWALNECENMGLKTNAKNILKLKLWKEQKEICIYSGKKISIEHLKDEKALELDHIYPYSRSFDNSFRNKVLVFTKENQEKLNKTPFEAFGKNVEKWNTIQTLAQNLPYQKKSKILDENFKDKQQDFINRNLNDTRYIASSIAKYTTQYLNFLPLNENENTNLKSGEKGSKIHVQTVNGMLTSVLRHTWGFSQKDRNNYLHHALDAIIVAYSTNSIIKAFSDFKKNQELLKARLYAKELTSDNYKHQAKFFEPFEGFREKILSKIDEVFVSKPPRKRARGALHEETFYSEYQMIKEYNSKEGLNIALDCRKIRKIGTKYVKNVTMVRVDIFKKQNKFYAIPIYTMDFALGILPNKIVVAGKDKNENPKPWKEIDESYEFCFSLYKNDLILLQKKNMQEAEFAYYNSFDIGGCSICVEKHDNKFENLTSNQKLLFSNVKEGNVKVKGLGIQRLKIFEKYIITPLGDKIKADFQPRENISLKSSKKNGL

SEQ ID NO: 8367 - protein, 573 aa, synthetic construct
  REGION 1..573: note = Synthetic
LEKYQSVGEYFYKEFFQKYRENTKDFINIRNKEGSYENCVLASDLEKELKLILEKQKEWGYSYNDNFIKEILKVAFFQRPLKDFSYLVGACTFFEDEKRACKNSYSAWEFVALTKIINELKSLEKESGELVSSQIINEILNHILDKGSITYKKFREYIKLHESMKFKSLKYDKDNAESVKLIEFRKLVEFKKALGEHSLSREELDQIATYITLIKDNEKLKIALEKYSLNNEQIKNLLEIDFNDHINLSFKALNLILPLMKEGKRYNEACKLLNLKTKSNNQKFDFLPAFCDSIFAQELTNPIVNRAISEYRKVLNALLKKYGKMHKIHIELARDIGLSKKLRAKIEKEQKENYENNIWALNECEKFGLKANAKNILKLKLWKEQKEFCIYSGKKISIEHLRDEKALEVDHIYPYSRSFDDSFLNKVLVFTKENQEKLNKTPFEAFGANEERWSKIQALAQNLPYKKKNKILDEAFKGKQQQDFISRNLNDTRYISTLIVKYTKEYLDFLPLDEKEDINLKSGEKGSKIHVQTINGMLTSVLRHTWGFAQKDRNNHLHHALDATIVAYSTNPL

SEQ ID NO: 8368 - protein, 1122 aa, synthetic construct
  REGION 1..1122: note = Synthetic
MKYKYRIGLDIGIDSVGWAALEHDHEENPIKIINLGTRIFSAAENPKDGKTLTQLRREARGARRRLRRRAHRIDRVKRLFLKYGLLKEEELNSLYDKENLMPTPDYPFGFDVYKARYLALEKKIGNQDLARILICIAKRRGFKSNRKSDIIQDKEGKELLKALEKNKAYRIENGYRTVGEMFYKDPRFQEQFYSDKRQSFLSRPLIRNSENDYSKTILLEENVEEVKTIFERQSELGNQLPQEFCEEYINILTSRRAFDEGPGEPSKYRGTFKVGNCTFEKDELRASKGCYTFEYFRALNNINHIKISLRYGKIGEPLTEDQRIKLIEKIKSVKSFTYAQARNLLGLTEEAQFSNLNYGVYDRKKKEYKDPEKAAISNFENSAKIKKVIRDASIEELDAIAMVLAFNKSDEKIKNALIEKTLIRPFSEEQISLLQDIKFEKFGHLSLKAMRKINEQMEKYGYTYDKACEAAGYDFRAQKMGNKTKFLNTKEVYEQVMDIPNPVVRRSVSQTIKVLNAIIREYGSPQAIMIELSREMAKSFEERNEIRRMQEENREYNESIKKAVREIKPNAVGIDFLKWKLFLEQQGICAYSLKKIDPSRVFEEGYTEVDHIIPYSRSSNNSNVNKVLVFKTENQAKKNMTPYEYYKSIGRDFSELEAFAENYIKNKKKKSYLLNKNFTEQDALAMQERALADTRYITKLIKNLIRDNLYFEESKKFRKSPVNPVNGSVTSFLRTRWGLSKIREKGDLHHAQDAVVIACTTRSMIKKVTTFFQKLENPYAKEFIDFETGEILTREEFFDRYSEKFPSPYPNFRKELIIRLFGDPLKECYIDELIKSGYTHEDIRGINRVFVSRMAKYKKKGKIFEDKIYSAKYKNTEGVYVIRTDIKNIKLDKNGEIEGYFKKESDWPTYNALKKRLIEHNGDAKKAFIEPIYKPKKDGTSGNIIRKVKIEHKKSLQELKNHNKSSAANDSQIRVDIFKKDNKFYMVPVYVLDYYKNRLPNKAIKANKPYEEWPEIDENYQFCFSLYPYELVYARKDKGFNMKSVANKLNKDKKTEKITIKEEYLYYVSINRRNGASSVCNHDNSFIGEVCFMGFDELKKCHIDLLGRVRIIDKYEKRKPLR

SEQ ID NO: 8369 - protein, 1218 aa, synthetic construct
  REGION 1..1218: note = Synthetic
MKKILGLDLGSSSIGWAFIEENENSSKIKMLGVRVIPYTGDEKDQFSKGQAISVNKDRTLKRTARKTLHRYKLRRKNLLSFLEKNNMLPDSEKLLKIEPLQLYGIRAKAVTDKIELTDFGRILYHLNQKRGYKSSRSSSNDDDNGKKLSDYLSEMKERKDILEKDHITIGQYFYSRLKENCHFRVKQNVFPRECYINEFNTLWEAQQKYYPEVLTEQNKTVVRDQIIFYQRRLKSQKGLVGECQFEKHHKVTPKSSPLFQIEKIWESIHTISITNKYKEAYTLSQEQRLQIFDYLDQHEKLTQTELFRILKIKRTDGWFANEMIRKSGLQGNLTKTTLLKKLQELNIPHTELTRFELTINENETPDKETGELLKRPIISPDFEKEPLYQIWHLLYSIDDPDLLINTLKKRYAVTSEQAAQLSNIDFKKSGFGNKSARAIRKILPYLINGSDYTQSCQATGYNHSNSLTKAENEQRILQPDLKLYKKNTLRQPVVEKILNQLINVVNAILKDENLGRPDEIRVELARELRQSQEERNKTFSNNIKADKDHKAIRERLEKEYPGLPVSRKVIEKFKLFEQQDGTCMYSGNKMELSKVLRGEGIDIDHIIPQSRLFDDSFQNKVLAYRKENEAKKDLTGYDYMKSKSDTEFRQYTERVSQMFENGNITRSKQTKLLMSVNEIPDDFISRQMNETRFISREATKLLKGIARDVYSTSGMVTDFLRNQWGYNEVLKQLNWSKYEAAGKIKDGKIEGWSKRDDHRHHAIDALVVACTRQSIIQRLNRLNSNQTREEMLDAIKGKVNEGWQAKKSLLEQHVQLLQPFSTQQVKEAVDQILISLKPGKKVATRGLNKADGKRPLTPRGQLHKEQVYGKIQRYSKKIPLTGRFTQVDKISDPRIQTLIRERLSAFNGDPKKAFKSLDKNPIWTDEAKTVPVTEVTIWEEHFVYKYPLGISFKEKDIEFIIDKRIQSLVRQRFEEKAGGKDHPLKNIENEPIWLDKKNGIAVKSVRCFTGLNDLVPLHVAENGFTKPKREVSENSIAVDFVSTRNNHHMAIYKSQEGKLFDNTVSLWEALERKKLKLPVIVENPKKTWDFVIDKGIDNKKILENLPSENSTFLYSMQQNELFVFDTTRDYVERAIQTNNYSLISSNIYRVQKMSKKANGSVDIYFRHHLETTVDDNKTGGELVSKELNKVLILKSINSLSARNPLKIVISSIGKISLV

SEQ ID NO: 8370 - protein, 1215 aa, synthetic construct
  REGION 1..1215: note = Synthetic
MKKILGLDLGSTSIGWAFIEENKTSRAIRKLGVRIIPYSGDEKDQFTKGQAITLNKDRTLKRTARKTMHRYKMRRTDLLQVFSDWGITISPKLMRSLTALELYGLRAKAVSEPVTREELARILFHLNQKRGYKSSRQAAEEEGGKKLSDYLTELKERKELLEQQHITIGQYFYSQLKNDTTFRVRQKVFPRECYIDEFNRIWNEQKKHHPQLLTEENKSRIRDEIIYYQRRLKSQKKLVSECRFELHHKVAPKSSPLYQVEKIWESINTISLTNKFKENYTITPEQKQAIFEHLDNKEKLTLTDLLKILGLSRTSGWHANEQIKKAGLQGNTTKARLLKEFKNLGIERPDLLEFHLEIETNQKVNKETGEVSEYEMISPGFEKQPLYRIWHLLYSVDDPGQVINVLQQQYHFTKEQAEQLSKIDFTKAGFGAKSARAIRKLLPGLMQGLTYAYAAEIVGYNHSDSITKEENLQRQLLEQLPRIPKNSLRQPVVEKILNQLVNLINAILQDPGLGRPDEIRVELARELKQNQEERNKAYQNTIDTDKRHKLIRERLQSEYPGLAVTRKVIEKFKLFEQQDGLCMYSGKTMQLAQVLRGEGVDVDHIIPQSKLFDDSFQNKVLAFRTENEKKDNFTAYDYMKSKGDEAFRQYLERVDKLLETQKITRSKQQKLLMSNDEIPSDFINRQLNETRYIAKEARQLLQQVCLNVHSSTGMVTDFLRHQWGYNEVLKQLGLKKWEEAGLLDSENMPKWSKRDDHRHHALDALVVACTKQSIIQRLNTLNSSNTRTEMLQAIQGKTAEGWQKKKSLSEMYIQTEQPFTTQDVAEALSHILISIKPGKRVAARGKNKATGQRPLTPRGQLHKESVYGRIRRYSKEKIPLNGRFNKADLIANEQEKKLVLERLTQYENDPKKAFKNLEKDPIWLDAEKTKSLTAVTVWEDYFVIKYNLDQNFKEKDVPFIVDDAIRQKVQERFDQYKEQKEHPLKNLENDPIWLNEAKRIPIKTVRCFTGLSDLVPLHSASNGITKPMSRKTDQDAPVDFVSTRNNHHIAIYRTSEGKLEEIAVTLWEALERKKLGLPVIVTQPQTLWDLVWSKGVDNQEVLAQLPQPEWEFVTCLQQNEMFVLGMNEDDVQHCIEINDHKTISANLYRVQKISVGMYYFRHHLETSVDDKKNGGESQSIVLRKLIRIQSLRSFMQNKPIKVFVSPLGKIEISRV

SEQ ID NO: 8371 - protein, 1094 aa, synthetic construct
  REGION 1..1094: note = Synthetic
MNFMKYAIGLDIGIASVGYAVVALDHEENPWGIIRMGSRIFDVAENPKDGASLALPRREARSVRRRLRRHKHRIERIKELLIQAKLLTKEELLHLYEGELTDVYALRVKALDHTVNNWEIARILLHLAQRRGFKSNRKADAADKEAGELLKAVSENQKRMQENSYRTVGEMFLKDELFAQCKRNKGGQYLTTVHRDMVASEANLIISQQRLLGNTLLTEDFQKQYLAILLSQRQFDEGPGEPSPYAGNQIENMIGQCTFEPSEKRAAKACYSFERFNLLQKINHLRLMENGATVPLNDAQRQKVIALAYSKADLKFTHIRKELGLSDKILFNGLIYDKNDIKTVEDKTKFNFLPAYHQIRKALENVGKNHISALETTTLDEIGRILSTYKGDAKRKEAFSALNLSEEEIAALLPIACLAKFGHLSLKALRKILPFLEQGMIYNEACAAAGYNFKAHDNQEKTFLLPAKKDEMDNITSPVARRAIAQTIKVINAIIREQGYSPSFVNIELAREMSKAFDERTQLTKSMKDNQAANERIKEEIRTEHHKTNPTGLDILKLKLWKEQDGISPYSQKSINVARIFEPGYVDIDHIVPYSISFDDSLKNKVLVLSSENRDKGNQLPLQYLQKKFGQKAADSFTVWVQNNIKNYKKRLNLLKAKITDEDLNKFKERNLQDTKTISRFLYNYINDYLLFAPSETGRKKKVTAVNGAITSYLRKRWGINKVRADGDKHHAVDALVIACTTDKMIKDLSNYSTYREMEYTQTDKYSILANPATGEIINKFPYPWEDFRPELMARLAENPEQALQKLQLLFYSTMDLNTIKPIFVSRMPRHKVTGAAHKATIKSARHLDQGIVVSKKDLTSLKLDKNGEIADYYAPESDLLLYNALKLRLQQFNNKGKDAFAEPFYKPKADGTQGPLVKKVKVMEKSTLNVPVQQKTGAADNDSMVRVDVFKVEGDGYYLVPIYVADTLKKDLPNKAIVQRKSYAEWPEMNDKNFIFSLYLNDLIKVTHKKEMKFSKVNADSSLPNEFSCKEAFVYYKGTNITVGSISIILNDNSYSIDSLGVKTLQNLEKYQVDVLGNYTKVSKEKRQSFAKR

SEQ ID NO: 8372 - protein, 1087 aa, synthetic construct
  REGION 1..1087: note = Synthetic
MLRMKYAIGLDIGIASVGYAVLALDHEENPWGIIRLGSRIFDVAENPKDGASLALPRREARSVRRRLRRHHHRLERIKNLLINTELITKDELLHLYDGNLSDVYELRVKALDYSVTNAELTRILLHLAQRRGFKSNRKSDANDKEAGQLLEAVSANTKRMQENHYRTVGEMFYKDDLFSKYKRNKGGTYLTTVHRDMIAAEARTILEKQFALGNDICTQDFIDKYLSILLSQRQFDEGPGEPSPYAGNQIANMIGKCTFEPNEYRAAKASYSFERFNLLQKVNHLRLLLEGKSIALDNEQRKKIIALAHEKADLRYSHIRKALGLDEKVLFNTITYNEDVSVIEKKTKFNFLQAYHQIKKVLAEDMQKLTTEQLDNIGQILSTYKSDNKRTEELSALGLEKKIIDALLGINGLSKFAHLSLKALRKINPYLEEGKIYNEACAAAGYDFKGHANTQKTELLPAYKEEMDDITSPVARRAIAQSIKVINAIIREQKCSPVYINIELAREMSKGFDERTQIYKANKENQAKNERIMERIRTEFHKSNPSGMDLIKLKLWEEQDGRSPYSQKAISINRLFEPGYVDIDHIVPYSISFDDSFKNKVLVFSDENRDKGNRLPIAYLQSKFGAKAAENFMIWAQSNIKDYKKRQKLLKREITEEDINKFKERNLQDTKTISRFLYNYINDYLLFAPSDTGKKKRVTAVNGTITAYLRKRWGINKIRANGDKHHAVDAVVIACTTDKMIKDLSAFSQYHELEYTHTEKESLLVNSLTGEILKRFPYPWEDFRPELMARLSNNPAEALRNLNLLFYHGTDLSNIKPIFVSRMPRHKVTGAAHKATIKSARCLTNGIVICKTSLQNLKLDKEGEIANYYAPESDTILYNALKERLRAYDNKPAKAFAEPFYKPKADGTPGPLVKKVKVYEKSTLNVPVQQNTAVADNDSMVRVDVFHVKGDGYYLVPIYIADTLKKELPNKAIVAYKPYADWPVMDDSNFIFSLYPNDLIKFEHKNGVKFAKVNKDSTLNDFYSTKSDIVYFKGCNINTGAITIINHENTYVVSSLGVKKLPSLEKYQADVLGNYTKVKKEVRKPFR

SEQ ID NO: 8373 - protein, 1084 aa, synthetic construct
  REGION 1..1084: note = Synthetic
MKNTLYGIGLDIGVASVGWAVVGLNGTGEPVGLHRLGVRIFDKAEQPKTGESLAAPRRMARGMRRRLRRKALRRADVYALLERSGLSTREALAQMFEAGGLEDIYALRTRALDEPVGKAEFSRILLHLAQRRGFKSNRRTASDGEDGRLLAAVNENRRRMAQGGWRTVGEMLYRHEAFALHKRNKADDYLSTVGRDMVAEEASILFERQRAMGCSWAAPELQAEYLSILLRQRSFDEGPGGNSPYGGNQVEKMVGRCTFEPDEPRAAKAAYSFEYFSLLQKLNHIRLAENGETRPLTQPQRQQLLSLAHKTPDISLARIRKELALPETVQFNGVRCRANETLEESEKKEKFACLPAYHKMRKALDGVVKGRISSLSISQRDAAATALSLYKNEDTLRAKLTEAGFQAPEIDALAGLTGFSKFGHLSLKACRKLIPHLEQGLNYDQACTAAGYDFKGHGAGERAFTLPAAAPEMEQITSPVVRRAVAQTIKVVNGIIREMDASPAWVRIELARELSKTFGERQEMDRSMRENAAQNERLMQELRDTFHLLSPTGQDLVKYRLWKEQDGVCAYSLRRLDVERLFEPGYVDVDHIVPYSLSFDDRRSNKVLVLSSENRQKGNRLPLQYLQGKRREDFIVWTNSSVRDYRKRQNLLREKLSGDEAEGFRQRNLQDTQHMARFLYNYISDHLAFAQSEALGKKRVFAVSGAVTSHLRKRWGLSKVRADGDLHHALDAAVIACTTDGMIRRISGYYGHIEGEYLQDADGAGSQHARTKERFPAPWPRFRDELIVRLSEQPGEHLLDINPGFYCEYGTEHIRPVFVSRMPRRKVTGPGHKETIKGAAAADEGLLTVRKALTELKLDKDGEIKDYYMPSSDTLLYEAIKAQLRRFGGDGKKAFAEPFYKPKADGTPGPLVRKVKTTEKATLTVPVHGGAASNDTMVRVDVFLVPGDGYYWVPVYVADTLKPELPNRAVVQGKPYSEWKEMREEDFIFSLYPNDLVYVEHKSGLKFTLQNADSTLEKTRTQTSAFAYFVSGSISTASITIRTHDNAYGIPSLGVKTLKTFHKYQVDVLGNVFPVHKETRQKFR

SEQ ID NO: 8374 - protein, 632 aa, synthetic construct
  REGION 1..632: note = Synthetic
MRRRLRRHRHRLERIRHLLVAENVISQAELDTLFEGRLEDIYALRVRALDAAVSMARDFAERSKMKKDMDANRARNEKIMERIRTEYGKETPTGQDLVKFKLWEEQHGECAYSQKHLSIEHLFDPDYAEVDHIVPYSISFDDSYMNKVLVLAEENRNKGNRLPLQYLQGRRREDFIVWVENSIHDPRKKRRLLKETITSEDEKKFRERNLQDTKTMSRFLLNYISDHLEFSAFATGRKKHVTAVNGTITSYMRKRWGITKIRENGDLHHAVDALVVACTTDVMIQQLSRYSALRECAYVQTETGSVAVSMHTGEVLKHFPYPWPEFRRELEARLGDDPRRAVISQRFPVYVNGDIPVRKLFVSRMPRRKVTGAAHKETVKSPKALNDGIVVVKRALTDLKLDPKTGEISNYYMPQSDRLLYEALKEELKKHGGDGSKAFAAPFHKPKSDGTPGPVVNKVKVCEPTTLNVPVLGGAGVADNDSMVRIDVFHVENDGYFFVPIYIADTLKAELPNKACVAHKPFEQWKEMSDENFVFSLYPNDLLRATHKTRLKLAKAQEDSTLPDTYETKQEMLYYISADIAAASITCRNHDNSYRIRGMGIKTLENLEKFTVDVLGEYHKVEKEPRMAFSRK

SEQ ID NO: 8375 - protein, 603 aa, synthetic construct
  REGION 1..603: note = Synthetic
VKVINAIIRKEGGSPTFINIELAREMAKDFTERNKLKKENDENRAKNEKLLERIRTEYGKSDPSGLDLVKLRLYEEQGGVCMYSLRQMSLEKLFSPNYAEVDHIVPYSKSFDDSRKNKVLVLTEENRNKGNRLPLQYLTGQRRDDFIVWVNNNVRDYRKRRLLLKETLTDEDELGFKERNLQDTKTMSRFLLNYISDNLEFAESTCGRKKKVTAVNGAVTAYMRKRWGITKIREDGDLHHAVDAVVIACTTDGMIQRVSKYARLRECRYMPTEEGSLVIDDGTGEVLHQFPYPWRDFRKELEARIGTDPARTINDLRLPFYMSSGMPLPEPIFVSRMPKRKVTGAAHKDTVKSPKELDKGCVVVKRPLTDLKLKDGEIENYYNPQSDRLLYDALKKALIEHGGDANKAFAGEFHKPKSDGTPGPIVSKVKLLEPTTLNVPVHGGAGVADNDSMVRVDVFLTKGKYNLVPIYVADTLKPELPNKAIAANKPYSEWPEMSDDDFVFSLYPNDLVCVTHKKGIKLTVTNKNSTLPPTVEGKSFMLYYISTNISVGSIKGITHDNTYEIGGLGAKTLEKLEKYTVDVLGEYHKVGKEVRQPFNIKRR

SEQ ID NO: 8376 - protein, 592 aa, synthetic construct
  REGION 1..592: note = Synthetic
LLLDLQQGGVQRGGLCGNFWEVGNMGSAAVCRECTKHRIRLVFYGDAVLHPEHIVHFVHFAPLVFIHAMDVGIHSKGYRIVPQNCRQRFVVHAALQRTGGEGVAQGVEGKVPDVGILQQAVVVILEGFLLKVVSKLVGHYKAVVKVLVPCPLLTQYIASFMLNYIRGHLAFAAHPMAGKKRVIAVNGAVTSFLRKRWGIAKVRADGDLHHAVDAAVIACTTDGMIQRVSRFYQREELSHARGERFPEPWPRFRDELMQRLSSCPQENLLTINPVYYTTADIAGIKPVFVSRMPRHKATGPAHKETIKGRLDDTYVTQRRSITDLKLNKDGEIDGYFNPSSDTLLYNALKDRLVAFGGNGKKAFAEPFFKPRADGTPGAQVRKVKLYSKVTSTVPVHGGNGVADNDTMVRVDVYYIPGDGYYWVPIYVADTVKPILPNCAFVRCKNSIIKKEMSEENFLFSLCKNDLVCIESKRPIKLKAANEDSTLEKELTVQRVLAYFEGGDISTGAVSVTTHDNAYIVRGLGFKTLQKVEKYQVDVLGNYTRVKKSASFFPPNGGDACLTAALRVYGALLGSIRLFAMAGAASRQRTEPV

SEQ ID NO: 8377 - protein, 544 aa, synthetic construct
  REGION 1..544: note = Synthetic
MDCDFWKIRGVGSAAVCCDCTQHRVRLVLYRDIILYTEHIVHLVHFVALVFIHAVDIGIHSKGYRIVPQNCRQCFVVHTALQCAGGEGVAQSVEGKVANVGVFQHTVIVVFERLLLNVMAELVGHYKAVVKVLVPCPLLTQYIASFMLNYIRGHLAFAAPPMAGKKRVVAVNGAVTSFLRKRWGIAKVRADGDLHHAVDAAVIACTTDGMIQRVSRFYQREELSHARGERFPEPWPRFRDELMQRLSSCPQENLLTINPVYYTTADIAGIKPVFVSRMPRHKATGPAHKETIKGRLDDTYVTQRRSITDLKLNKDGEIDGYFNPSSDTLLYNALKDRLVAFGGNGKKAFAEPFFKPRADGTPGAQVRKVKLYSKVTSTVPVHGGNGVADNDTMVRVDVYYIPGDGYYWVPIYVADTVKPILPNCAFVRCKNSIIKKEMSEENFLFSLCKNDLVCIESKRPIKLKAANEDSTLEKELTVQRVLAYFEGGDISTGAVSVTTHDNAYIVRGLGFKTLQKVEKYQVDVLGNYTRVKKEKRQLFPAQRR

SEQ ID NO: 8378 - protein, 895 aa, synthetic construct
  REGION 1..895: note = Synthetic
MQMLVKEAVSNMKNTLYGIGLDIGVASVGWAVVGLNGTGEPVGLHRLGVRTFDKAEQPKTGESLAAPRRMARGMRRRLRRKALRRADVYALLERSGLSTREALAHMFEAGGLEDIYALRTRALDEPVGKAEFSRILLHLAQRRGFKSNRRTASDGEDGRLLAAVNENRRRMAQGGWRTVGEMLYRHEAFALHKRNKADDYLSTVGRDMVAEEASILFERQRAMGCSWAAPELQAEYLSILLRQRSFDEGPGGNSPYGGNQVEKMVGRCTFEPDEPRAAKAAYSFEYFSLLQKLNHIRLAENGETRPLTQPQRQQLLSLAHKTPDISLARIRKELALPETVQFNGVRCRANETLEESEKKEKFACLPAYHKMRKALDGVVKGRISSLSISQRDAAATALSLYKNEDTLRAKLTEAGFQAPEIDALAGLTGFSKFGHLSLKACRKLIPHLEQGLTYDQACSAAGYDFKGHGAGERAFTLPAAAPEMEQITSPVVRRAVAQTIKVVNGIIREMDASPAWVRIELARELSKTFGERQEMDRSMRENAAQNERLMQELRDTFHLLSPTGQDLVKYRLWKEQDGVCAYSLRRLDVERLFEPGYVDVDHIVPYSLSFDDRRSNKVLVLSSENRQKGNRLPLQYLQGKRREDFIVWTNSSVRDYRKRQNLLREKLSGDEAEGFRQRNLQDTQHMARFLYNYISDHLAFAQSEVLGKKRVFAVSGAVTSHLRKRWGLSKVRADGDLHHALDAAVIACTTDGMIRRISGYYGHIEGEYLQDADGAGSPHARTKERFPAPWPRFRDELIVRLSEQPGEHLLDINPEFYCEYGTEHIRPVFVSRMPRRKVTGPGHKETIKGAAAADEGLLTVRKALTELKLDKDGEIKDYYMPLLLFKKNEKFFQKE

SEQ ID NO: 8379 - protein, 668 aa, synthetic construct
  REGION 1..668: note = Synthetic
MLIPFLEQGMNYNEACAAAGLNFKGHDAGEKSKLLHPKEEDYEDITSPVVRRAIAQTIKVINAIIRKEGSSPTFINIELAREMAKDFRERNRIKKENDDNRAKNEQLLERIRTEYGKNNPTGLDLVKLRLYEEQSGVCMYSLKQMSLEKLLAPNYAEVDHIVPYSISFDDSRKNKVLVLTEENRNKGNRLPLQYLKGRRREDFIVWVNNNVKDYRKRRLLLKEELTAEDESGFKERNLQDTKTMSRFLLNYISDNLEFAESTRGRKKKVTAVNGAVTAYMRKRWGITKIREDGDCHHAVDAVVIACTTDAMIRQVSRYAQFRECEYMQTESGSVAVDTGTGEVLRTFPYPWPDFRKELEARLANDPAKVINDLHLPFYMSAGRPLPEPVFVSRMPRRKVTGAAHKDTIKSARELDNGYLIVKRPLTDLKLKNGEIENYYNPQSDKCLYDALKNALIEHGGDAKKAFAGEFRKPQSDGTPGPIVKKVKLLEPTTMCVPVHGGKGAADNDSMVRVDVFLSGGKYYLVPIYVADTLKPELPNKAVTRGKKYSEWLEMADKNFIFSLYPNDLICATSKNGITLSVCRKDSTLPPTVENKSFMLYYRGTDISTGSISCITHDNAYKLRGLGVKTLEKLEKYTVDVLGEYHKVGKEVRQPFNIKRRKACPSEML

SEQ ID NO: 8380 - protein, 722 aa, synthetic construct
  REGION 1..722: note = Synthetic
MQKLTTEQLDNIGQILSTYKSDNKRTEELSALGLEKKIIDALLGINGLSKFAHLSLKALRKINPYLEEGKIYNEACAAAGYDFKAHANTQKTELLPAYKEEMDDITSPVARRAIAQSIKVINAIIREQKCSPVYINIELAREMAKGFDERTQIDKANKENQAKNERIMERIRTEFHKSNPTGMDLIKLKLWEEQDGRSPYSQKAISINRLFEPGYVDIDHIVPYSISFDDSFKNKVLVFSDENRDKGNRLPIAYLQSKFGAKAAENFIIWVQSNIKDYKKRQKLLKREITEEDINKFKERNLQDTKTISRFLYNYINDYLLFAPSDTGKKKRVTAVNGTITAYLRKRWGINKIRANGDKHHAVDAVVIACTTDKMIKDLSSFSKYHELEYMHTDTESLLVNSLTGEILKRFPYPWEDFRPELMARLSDNPADALRKLNLIFYHGTDLSTIKPIFVSRMPRHKVTGAAHKATIKSARCLNNGIVICKTSLQNLKLDKEGEIANYYAPESDTILYNALKERLRAYDNKPAKAFAEPFYKPKADGTPGHLVKKVKVYEKSTLNVAVQQNTAVADNDSMVRVDVFHIKGEGYYLVPIYIADTLKKELPNKAIVAYKPYADWPVMDDSNFIFSLYPNDLIKFEHRNGVKFAKVNKKSSLAETYLTKSELVYYKGTNITVGSTSIITNDNSYTVKSLGVKTLSNLEKYQVDVLGNYTKVKKEIRRPFR

SEQ ID NO: 8381 - protein, 767 aa, synthetic construct
  REGION 1..767: note = Synthetic
MKHPYGIGLDIGIASVGWAVVVLNENAEPYGLIRCGSRIFDKAEQPKTGESLAAPRREARSTRRRLRRRSLRKADLYELMAQNGLPGRAKIEEAVQAGHLPDIYALRVQALDGPVTAMDFARILLHLMQRRGFRSNRKADDAQKDGKLLQAIDANTRRMKENHYRTVGEMMYRDPVFAEHKRNKSENYLSTVRRDQIVEEAVQLFAAQRQYGAAWASQEMEAEYLTILTRQRSFDEGPGGNSPYGGNIVEKMVGTCTLEGQAEPRAAKATWSFEYFTLLQKINHIRIIESGAARILTAEERQELLSVCYQTDKLDFARIRKALALSEQARFNMVRYRDGQTTEDCEKKEKIVCLPCYHKMRKVLNTLRKDYIRSVSRDRLDAAATALTMYKNEATLRAKLEEAQFEPLEVDALMTLPSFSGFGHISVKACRKLIPYLEQGLNYSDACKEAGYDFQGNYRGEKSQFLPASTEEMEDITSPVVRRAVAQTIKVVNAIIREQGESPVNIHLELAREMSKNFQQRNDLDKAMKDNNAENERLMKDLHELFPGRNITGQDLVKYRLWKEQDGRCAYSLQPLELEKTITVSGYAEVDHIVPYSISFDDRRANKVLVLASENRQKGNRLPLQYLQGKRRDDFIVYTKASVKNYRKRQNLLKEKLSEEDSKGFMQRNLQDTQYIASFMLNYIRSHLAFADFPAAGKKRVVAVNGAVTAFLRKRWGLGKVRADGDLHHAVDAAVIACTTDGMIQRVSRFYTHIETSDTRGERFPEP

SEQ ID NO: 8382 - protein, 771 aa, synthetic construct
  REGION 1..771: note = Synthetic
MSLARIRKELALPETVQFNGVRCRANETLEESEKKEKFACLPAYHKMRKALDGVVKGRISSLSISQRDAAATALSLYKNEDTLRAKLTEAGFQAPEIDALAGLTGFSKFGHLSLKACRKLIPHLEQGLTYDQACSAAGYDFKGHGAGERAFTLPAAAPEMEQITSPVVRRAVAQTIKVVNGIIREMDASPAWVRIELARELSKTFGERQEMDRSMRENAAQNERLMQELRDTFHLLSPTGQDLVKYRLWKEQDGVCAYSLRRLDVERLFEPGYVDVDHIVPYSLSFDDRRSNKVLVLSSENRQKGNRLPLQYLQGKRREDFIVWTNSSVRDYRKRQNLLREKLSGDEAEGFRQRNLQDTQHMARFLYNYISDHLAFAQSEALGKKRVFAVSGAVTSHLRKRWGLSKVRADGDLHHALDAAVIACTTDGMIRRISGYYGHIEGEYLQDADGAGSQHARTKEHFPAPWPRFRDELIVRLSEQPAEPLLDINPGFYCEYGTEHIRPVFVSRMPRRKVTGPGHKETIKGAAAADEGLLTVRKALTELKLDKDGEIKDYYMPSSDTLLYEALKAQLRRFGGDGKKAFAEPFYKPKADGTPGPLVRKVKTTEKATLTVPVHGGAASNDTMVRVDVFLVPGDGYYWVPVYVADTLKPELPNRAVVQGKPYSEWKEMREEDFIFSLYPNDLVYVEHKSGLKFTVQNADSTLEKTRTQTSAFVYFVGGSISTASITIRTHDNAYGIPSLGVKTLKTFHKYQVDVLGNVFPVHKETRQKFR

SEQ ID NO: 8383 - protein, 541 aa, synthetic construct
  REGION 1..541: note = Synthetic
LINPTGQDIVKLKLYEEQRGECPYSVSTMDITRLFEYGYAEIDHIVPRSISHNDTYANKVLAKATYQQKKGNCLPLEFLQGKERDNFIVWVNNSNLRREKKNRLLKEKITDEERGEFKDRALNDTRTMSRFLLNYLNDFLLFSPFLTGRKRHVTAVNGGTTATLRKRWGLTKIREDGDLHHAVDAAVIACTTQKMINDLSRHYDHNETRFLNARRDPRGEKEERFPQPYPFFREELMARIAPTKTQLDIAIAQLSLLPYTQGEIANLQPIFVSRMPRRKVGGAAHKETIKGITESGEQVKKVSLVSLKLDKDGEIAGYYRPEDDVLLYDALREQLIKHGGKGEKAFIEDFYKPKKDGTPGPLVKSVKITEKSTLNVLLRDPKGCVKASADHDSMVRVDVFHVAGDGFYLVPIYVADTIKPELPNRAIVANKPYEQWKEMDNEDFIFSLYPNDLVFVKQKKPISFNKTHKESSLPETELYEDAFVYYKGTDIAVGSISLINHDNSYSKRLGVKTLLALEKYQVDVLGNYSKVSRETRQSFSR

SEQ ID NO: 8384 - protein, 565 aa, synthetic construct
  REGION 1..565: note = Synthetic
VPDVGILQQAVVVILEGFLLKVVSKLVGHYKAVVKVLVPCPLLTQYIASFMLNYIRGHLAFAAHPMAGKKRVIAVNGAVTSFLRKRWGIAKVRADGDLHHAVDAAVIACTTDGMIQRVSRFYQREELSHARGERFPEPWPRFRDELMQRLSSCPQENLLTINPVYYTTADIAGIKPVFVSRMPRHKATGPAHKETIKGRLDDTYVTQRRSITDLKLNKDGEIDGYFNPSSDTLLYNALKDRLVAFGGNGKKAFAEPFFKPRADGTPGAQVRKVKLYSKVTSTVPVHGGNGVADNDTMVRVDVYYIPGDGYYWVPIYVADTVKPILPNCAFVRCKNSIIKKEMSEENFLFSLCKNDLVCIESKRPIKLKAANEDSTLEKELTVQRVLAYFEGGDISTGAVSVTTHDNAYIVRGLGFKTLQKVEKYQVDVLGNYTRVKKAPAFSRPTEVTHVLPLPCGYMVRCLAVYGFLPWLGLHHDNELNQFNLADDLMEPFRPEADLYVAANVAEDAAMTPGLKGSLVNLLNVDILSGGQHHSVAYAMERLVQSLRSQPLQLPKLLEYKQHSYE

SEQ ID NO: 8385 - protein, 1372 aa, synthetic construct
  REGION 1..1372: note = Synthetic
MKHPYGIGLDIGIASVGWAVVALNENAEPYGLIRCGSRIFDKAEQPKTGESLAAPRREARSTRRRLRRRSLRKADLYELMAQNGLPGRAKIEEAVQAGHLPDIYALRVQALDGPVTAMDFARILLHLMQRRGFRSNRKADDAQKDGKLLQAIDANTRRMEENHYRTVGEMMYRDPVFAEHKRNKSENYLSTVRRDQIVEEAVQLFAAQRQYGAAWASPEMEAEYLTILTRQRSFDEGPGGNSPYGGNIVEKMVGTCTLEGQAEPRAAKATWSFEYFTLLQKINHIRIIESGAARILTAEERQELLSVCYQTDKLDFARIRKALALSEQARFNMVRYRDGQTTEDCEKKEKIVCLPCYHKMRKVLNTLRKDYIRSVSRDRLDAAATALTMYKNEATLRAKLEEAQFEPLEVDALMTLPSFSGFGHISVKACRKLIPYLEQGLNYNDACKEAGYDFQGNYTGDKTMFLPASTEEMEDITSPVVRRAVAQTIKVVNAIIREQGESPVNIHLELAREMSKNFQQRNDLDKAMKDNNAENERLMKDLHELFPGRNITGQDLVKYRLWKEQDGRCAYSLRPLELEKAITVSGYAEVDHIVPYSISFDDRRANKVLVLASENRQKGNRLPLQYLQGKRRDDFIVYTKASVKNYRKRQNLLKEKLSEEDSKGFMQRNLQDTQYIASFMLNYIRSHLAFADFPAAGKKRVVAVNGAVTAFLRKRWGLGKVRADGDLHHAVDAAVIACTTDGMIQRVSRFYTHIETSDTRGERFPEPWPRFRDELMQRLSACPQENLMQINPVYYQNVDIASIRPVFVSRMPRHKMTGAAHKETIKGRLDDAHTVQRRSITDLKLDKEGEIAGYFNPSSDTLLYNALKEQLTAFGGDGKKAFAEPFFKPRADGTPGAQVRKVKVYDKATSMVAVHEGKGVADNDTMVRIDVYFVPGDGYYWVPIYVADTVKPELPNKAVVQGKSYAEWKEMDEENFLFSLCQNDLIRIESKRTMKFKVQNSDSTLEKETQMNCSLAYFEGGNISTGVITVTTHDNAYIVGSLGFKTLQKVQKYQVDVLGNYTLVKKEKRQNFPAQRRWPMSYRCLMIVNPARIRCKNEQLLIETEEVHSVPIEDISAIVLESRQSTITTAALAALAQNGVVTFWCDETHLPCGISLPFAQHSRQLGVLRWQMELTLPTKKRMWQQIVTAKIKNQAECLALCGKTQEAAFLFGRAKAVTSGDKDNLEASAAAYYFPTLFGAGYTRRNEDTRNAALNYAYAILRGYMARCLAVYGFLPCLGLHHDSELNQFNLADDLMEPFRPVADLYVAANVAEDAAMTTALKGQLVNLLNADILSGNQHHSVAYAMERMVQSLRGQTLQLPKLLEYKQHSYE

SEQ ID NO: 8386 - protein, 673 aa, synthetic construct
  REGION 1..673: note = Synthetic
MIEKMVGTCTLEGTAEPRAAKATWSFEYFTLLQKLNHIRIEEGGNSHPLTHAQRQELLTLCYQTDKLDFARIRKVLDLPPQARFNMVRYRADQPADACEKKEKITALPCYHKMRKALNTLRKDYILTVGHDRLDAAATALTLYKSEDLLREKLQQADFEPLEINALLTLPSFSKFGHISVKACRKLIPYLEQGENYNDACRDAGYDFQGSGHGEKSILLPAEAEGFSDITSPVVRRAVAQTIKVVNAIIREQGESPVSIHLELAREMSKSFQERADLENAMKENNADNERLMRDLHELFPGRNISGQDLVKYRLWKEQDGRCAYSLQPLELQSVITVSGYAEVDHIVPYSISFDDRRTNKVLVLASENRQKGNRLPLQYLQGTRRDNFIVYTKNNIKNYRKRQNLVKENLSAEDSSGFMQRNLQDTQYIASFMLNYIRGHLAFAAHPMAGKKRVVAVNGAVTSFLRKRWGIAKVRADGDLHHAVDAAVIACTTDGMIQRVSRFYQRTELSHARGERFPEPWPRFRDELIQRLSSCPQENLLTINPVYYATADIAGIKPVFVSRMPRHKATGPAHKETIKGRLDDTYVTQRRSITDLKLNKDGEIDGYFNPSSDTLLYNALKERLIAFGGNGKKAFAEPFFKPRADARRCAGSQGQALQQGHQHGSGSRRKRRG

SEQ ID NO: 8387 - protein, 928 aa, synthetic construct
  REGION 1..928: note = Synthetic
MQENHYRTVGEIFYKDDLFSKYKRNKSGTYLTTVHRDMIAAEARTILEKQFALGNDICTQDFIDKYLSILLSQRQFDEGPGEPSPYAGNQIANMIGKCTFEPNEYRAAKASYSFERFNLLQKVNHLRLLLEGKSIALDNEQRKKIIALAHDKADLRYSHIRKALGLDEKVLFNTITYNDDVSVIEKKTKFNFLQAYHQIKKVLAEDMQKLTTEQLDNIGQILSTYKSDNKRTEELSALGLEKKIIDALLGINGLSKFAHLSLKALRKINPYLEEGKIYNEACAAAGYDFKAHANTQKTELLPAYKEEMDDITSPVARRAIAQSIKVINAIIREQKCSPVYINIELAREMAKGFDERTQIDKANKENQAKNERIMERIRTEFHKANPTGMDLIKLKLWEEQDGRSPYSQKAISINRLFEPGYVDIDHIVPYSISFDDSFKNKVLVFSDENRDKGNRLPIAYLQSKFGAKAAENFIIWVQSNIKDYKKRQKLLKREITEEDINKFKERNLQDTKTISRFLYNYINDYLLFAPSDTGKKKRVTAVNGTITAYLRKRWGINKIRANGDKHHSVDAVVIACTTDKMIKDLSSFSQYHELEYTHTDKESLIVNSLTGEILKRFPYPWEDFRPELMARLSDNPADALRKLNLIFYHGTDLSTIKPIFVSRMPRHKVTGAAHKATIKSARCLNNGIVICKTSLQNLKLDKEGEIANYYAPESDTILYNALKERLRAYDNKPAKAFAEPFYKPKADGTPGPLVKKVKVYEKSTLNVAVQQNTAVADNDSMVRVDVFHIKGEGYYLVPIYIADTLKKELPNKAIVAYKPYADWPVMDDSNFIFSLYPNDLIKFEHRNGVKFAKVNKESSLAETYLTKSELVYYKGTNITVGSTSIITNDNSYTVKSLGVKTLSNLEKYQVDVLGNYTKVKKEIRRPFR

SEQ ID NO: 8388 - protein, 925 aa, synthetic construct
  REGION 1..925: note = Synthetic
MKFARAKRNKKDSYLNTVDRAMLTAEIELIFAQQRQWGNPWASEELETQYLDIFTSQRSFDQGPGGNSPYGGDLIAKMVGNCTFEPEEKRAAKATYTYEYFTLLQKLNHLRLGSLGSWRRLSDQERFYLVDLAKAKTNLTYASLRKALKLSGSEYFSDLSYGDKPVDEVEKKAKFPAFTSYHILRKALSVRGEHRIDAYTVEQLNEVAYGLTVFKSDAKLREHFAAKQIPTEDWEALLAVPSFSKFGHLSLKACEKILPYLELGLNYNDACTQAGYDFQGHSAGEKSKFLPAVVPEFEDITNPVVRRAVAQSIKVINALIQRYGQSPAYVSIELAREMAKDFQERRVLEKEMDNNQAENERIKERIRTEFGKTNPTGLDIVKFKLWQEQDGRCAYSLKPLEIQRLFDTGYAEVDHIIPYSQSFDDRYTNKVLVLTAENRHKGNRLPMVYLTAQGRQEEFGVWVRQQIKNKRKQEALLKTVITPEEEAAFKERNLSDTKYISRLFYNFLKDHLLLTPNLTGRKKTITAVNGQVTAYMRKRWGLTKLREDGDLHHALDAVVITCITDGMIKRVSDYTKGCQERYVAEGEQVIDRYTGEVAHRFPLPWPEFRQELDMRLSRDPQAWLGELYLPSYAEVQEIEPVFVSRMPKHKVKGAGHMETIRSPRELEEGYVISKKPLTPLKLDKDGEIDGYYKPSSDRLLYEALRKQLQTFGGKGDKAFAEPFYKPTASGEPGPLVRSVKIREKATLTVPVRQGQGAAANGDMIRIDVFWVAGDGYYFVPIYTADTLKAELPNKAVVAHKAYNDWKEMREEDFIFSVYPNDLLKVTAKKPLTWTRCNEKSTLPKTRQEKESFCYYVSASISSGTLTVINHDKTYTIASMGVKTLVKLEKYQVDVLGRRHLVKHEKRQGFNTMKRDPHQQLTNRLD

SEQ ID NO: 8389 - protein, 1087 aa, synthetic construct
  REGION 1..1087: note = Synthetic
MLKMNYAIGLDIGIASVGYAVLALDHDENPWGILRLGSRIFDVAENPKDGASLALPRREARSVRRRLRRHHHRLERIKNLLVSSKLITKDELLHLFDGNLSDIYALRVKALDYSVTNTELARILLHLAQRRGFKSNRKSDASDKESGQLLAAVSANVKRMQENHYRTVGEMFYKDDLFSKYKRNKGGTYLTTVHRDMIADEAKAIIEKQFNLGNSICTPTFIKEYLSILLSQRQFDEGPGEPSPYAGNQIARMIGKCTFEPNEYRAAKACYSFERFNMLQKINHLRLLIEGKSIALDNEQRKKIIALAHEKADLRYSHIRKALGLDEKVLFNTITYNEDVNTIEKKTKLNFLQAYHQIKKVLINDIQNLTIEQLDNIGQLLSTYKSDNKRIEELTALGLDKKIIDALLSINGLSKFAHLSLKALRKINPYLEEGKIYNEACAAAGYDFKAHSNTQKTELLPAYKEEMDDITSPVARRAIAQSIKVINAIIREQKASPIYINIELAREMAKGFDERTQIDKANKENHAKNDRLMDRIRTEFHKANPSGMDLIKLKLWEEQDGRSPYSQKPISINRLFEPGYVDIDHIVPYSISFDDSFKNKVLVFSDENRDKGNRLPIIYLQSKFGPKAAEKFMIWVQNNIKDYKKRQKLLKREITEDDINKFKERNLQDTKTISRFLYNYINDYLLFAPSDTGKKKRVTAVNGTITAYLRKRWGLNKTRANGDKHHAIDAVVIACTTDKMIKDLSAFSQYHELEYTHTAKESLLVNSLTGEIIKRFPYPWEDFRPELMARLSDNPSEALRKLNLIFYHGTDLSNIKPIFVSRMPHHKVTGAAHKATIKSARCLNNGIVICKTSLQNLKLDKDGEIANYYAPESDTLLYNALKERLRAHDNKPAKAFAEPFYKPKSDGTPGPLVKKVKVYEKSTLNVPVQQKTAVADNDSMVRVDVFYVKGDGYYLVPIYIADTLKKQLPNKAIVAYKPYADWPVMNDDNFIFSLYPYDLIKFEHKNSVKFAKLNKDSTLAETYSSNSEVVYYKTTNITTGAIGIITNDNTYIVKSLGVKTLSKLEKYQVDVLGNYTKVKKEVRKPFR

SEQ ID NO: 8390 - protein, 763 aa, synthetic construct
  REGION 1..763: note = Synthetic
MLRMKYAIGLDIGIASVGYAVLALDHEENPWGIIRLGSRIFDVAENPKDGASLALPRREARSVRRRLRRHHHRLERIKNLLINTELITKDELLHLYDGNLSDVYELRVKALDYSVANAELTRILLHLAQRRGFKSNRKSDANDKETGQLLEAVSANAKRMQENHYRTVGEMFYKDDLFSKYKRNKSGTYLTTVHRDMIAAEARTILEKQFALGNDICTQDFIDKYLSILLSQRQFDEGPGEPSPYAGNQIANMIGKCTFEPNEYRAAKASYSFERFNLLQKVNHLRLLLEGKSIALDNEQRKKIIALAHDKADLRYSHIRKALGLDEKVLFNTITYNDDVSVIEKKTKFNFLQAYHQIKKVLAEDMQKLTTEQLDNIGQILSTYKSDNKRTEELSALGLEKKIIDALLGINGLSKFAHLSLKALRKINSYLEEGKIYNEACAAAGYDFKAHANTQKTELLPAYKEEMDDITSPVARRAIAQSIKVINAIIREQKCSPVYINIELAREMAKGFDERTQIDKANKENQAKNERIMERIRTEFHKANPTGMDLIKLKLWEEQDGRSPYSQKAISINRLFEPGYVDIDHIVPYSISFDDSFKNKVLVFSDENRDKGNRLPIAYLQSKFGAKAAENFIIWVQSNIKDYKKRQKLLKREITEEDINKFKERNLQDTKTISRFLYNYINDYLLFAPSDTGKKKRVTAVNGTITAYLRKRWGINKIRANGDKHHSVDAVVIACTTDKMIKDISSFSQYHELEYTHTDKKVS

SEQ ID NO: 8391 - protein, 1101 aa, synthetic construct
  REGION 1..1101: note = Synthetic
LSGSSIVFCLVTRYHRSKKKGCVCMNTAYGIGLDIGIASVGWAVVALNEDAEPYGLIRCGSRVFDKAEQPKTGDSLAASRREARSTRRRLRRRSLRKADLYALMEKSGLPGRAAVEEAVLAGHLPDIYALRAQALDGPVTAMDFARILLHLMQRRGFRSNRKADDAQKDGKLLQAIDANTQRMKDNHYRTVGEMMYRDPAFATHKRNKTENYLSTVRRDQIASEAAQLFAAQRQYGAAWASPETEAEYLTILTRQRSFDEGPGGNSPYGGNMIEKMVGTCTLEGTAEPRAAKATWSFEYFALLQKLNHIRIEEGGNSHPLTHAQRQELLALCYQTDKLDFARIRKVLDLPPQARFNMVRYRADQPADACEKKEKITALPCYHKMRKALNTLRKDYILTVGHDRLDAAATALTLYKSEDLLREKLRQADFEPLEINALLTLPSFSKFGHISVKACRKLIPYLEQGENYNDACRDAGYDFQGSGHGEKSILLPAEAEEFSDITSPVVRRAVAQTIKVVNAIIREQGESPVSIHLELAREMSKSFQERADLENAMKENNADNERLMRDLHERFPGRNISGQDLVKYRLWKEQDGRCAYSLQPLELQSVITVSGYAEVDHIVPYSISFDDRRTNKVLVLASENRQKGNRLPLQYLQGTRRDNFIVYTKNNVKNYRKRQNLLKENLSAEDSSGFMQRNLQDTQYIASFMLNYIRGHLAFSAHPMAGKKRVVAVNGAVTSFLRKRWGIAKVRADGDLHHAVDAAVIACTTDGMIQRVSRFYQRTELSHARGERFPEPWPRFRDELMQRLSSCPQENLLTINPVYYTTADIAGIKPVFVSRMPRHKATGPAHKETIKGRLDDTYVTQRRSITDLKLNKDGEIDGYFNPSSDTLLYNALKERLIAFGGNGKKAFAEPFFKPRADGTPGAQVRKVKLYSKVTSTVPVHGGNGVADNDTMVRVDVYYIPGDGYYWVPIYVADTVKPILPSRAVVAYKSCSEWKEMSEENFLFSLCKNDLVCIESNHPIKLKAANKDSTLEKELTVRRVLAYFEGGNISTGAVSVTTHDNAYIAGSLGFKTLQKVEKYQVDVLGNYTRVKKEKRQLFPAQRR

SEQ ID NO: 8392 - protein, 715 aa, synthetic construct
  REGION 1..715: note = Synthetic
MIVAEARTILEKQFALGNDICTQDFIDKYLSILLSQRQFDEGPGEPSPYAGNQIANMIGKCTFEPNEYRAAKASYSFERFNLLQKVNHLRLLLEGKSIALDNEQRKKIIALAHDKADLRYSHIRKALGLDEKVLFNTITYNDDVNVIEKKTKFNFLQAYHQIKKVLAEDIQKLTTEQLDNIGQILSTYKSDNKRTEELSALGLEKKIIDALLGINGLSKFAHLSLKALRKINPYLEEGKIYNEACAAAGYDFKAHANTQKTELLPAYKEEMDDITSPVARRAIAQSIKVINAIIREQKCSPVYINIELAREMAKGFDERTQIDKANKENQAKNERIMERIRTEFHKSNPSGMDLIKLKLWEEQDGRSPYSQKAISINRLFEPGYVDIDHIVPYSISFDDSFKNKVLVFSDENRDKGNRLPIAYLQSKFGAKAAENFMIWVQSNIKDYKKRQKLLKREITEEDINKFKERNLQDTKTISRFLYNYINDYLLFAPSDTGKKKRVTAVNGTITAYLRKRWGINKIRTNGDKHHAVDAVVIACTTDKMIKDLSSFSQYHELEYTHTDKESLLVNSLTGEILKRFPYPWEDFRPELMARLSDNPADALRKLNLIFYHGTDLNTIKPIFVSRMPRHKVTGAAHKATIKSARCLNNGIVICKTSLQNLKLDKEGEIANYYAPESDTILYNALKERLRAYDNKPAKAFAEPFYKPKADGTPGP

SEQ ID NO: 8393 - protein, 533 aa, synthetic construct
  REGION 1..533: note = Synthetic
MSFFRDAPLQDLVKYRLWKEQDGRCAYSIQPLELDKVITVSGYAEVDHIVPYSISFDDRRTNKVLVLASENRQKGNRLPLQYLQGKRRDDFIVYTKANVKNFRKRQNLLKERLSEEDGKGYIQRNLQDTQYIAAFMLNYIRNHLAFADCSGAGKRRVVAVNGAVTAFLRKRWSLGKVRADGDLHHAVDAAVIACTTQGMIKRVSDFCKRAETTAVRNEHFPEPWPHFRDELTQRLSACPQEDLMKINPVYYATVDISSIQPVFVSRMPRHKVTGAAHKETIKSRLDDTHVVQRRNITELKLDKDGEIAGYFNRSSDTLLYNALKARLLAFGGDGKKAFAEPFYKPRADGTPGARVQKVKICDKVTSTVPVHGGKGVADNNTMVRMDVYFVPGDGYYWVPIYVADTVKLELPNKAVVQGKSYAEWKEMDEENFLFSLCQHDLVRIESKRLMKFKVQNRDSTLEKEMPVNKILAYFEGGDIATGAVTLTTHDDAYIATGLGFKTLQKVQKYQVDVLGNYTPVKKEKRQTFPAQRR

SEQ ID NO: 8394 - protein, 1172 aa, synthetic construct
  REGION 1..1172: note = Synthetic
MLEPCLGRDIEISGFVSRILQPLGFTGGLRFWLSCLICVDILETHCSAKRKGAIVAECIYRIGIDVGDRYVGLVAIEFDENGVPLRFLERLVVHHDGGLYPVTGTTPRSRKAEAGAARRTRRMRKRKRQRLKALDRHLAKHGYPDVQPQITPYDAWHARARLVSTKIDDEDQLKNDLALALRHIARHRGWRNPWKTLASTRKLPVPSETLLANQARAREHFGDEVNDLTTIGQIGALAASRDYLLRPRNITVTKGVNQKKNIKSLKKQSEKLLEGKHPTAPILGWQVRQEDQINEVERIWARQELPPEELSTILTLLFAQAKPQPPEAGRDALQPELFRAPIASLEFQDFRILSAIANLRVRTEGGRRLTKDERFTAFQFMSGWRAKEPLSWADVAEELGLSPHALAAPTTETNQRLAFAPTNRTLAALGTFFKRRKIDAQAREWWQSASYAERSLLAQLIASATPETEEQADASGLSDVLLQWDEDTVEGLMELDLQSGRAAYSTDTLLRLNARMENDGTDLFESIQAEFNIDPSRLPRPDWDDQTGQPTVDRVLTIVRRFVGGCERKYGRPESVTVEHVRTGLMGAKQRSESIAENNRNRQNNDEIREELKDAGIREPSRLDVRRHRQVKRQKDACLYCGTPISPTTCELDHIVPRRGGGSSQGSNLVAVCRECNASKAHRIFAEWAEDSQREGVSVKEATKRVRQWSKVSASMKREVTRRLKQKRTDPPIDERDLASTSYAATEITRRILGHFHDEVPVVAFGGSGTREARRAGRVDHIIRLRGSLDKSRLDTRHHAIDAAVLTLQSPAIYRVLLTRVNLKREHEVTGEAPEWRDYEGADQAEKVLYRRWQKNIATLAELMRQEIEDNRVPVTRPIRLRKSRGAVHKDEIQKPEKYPPMLWGEWNSTAIDRVIDPELHLALRKVFTSTKSKTITVDATTPGLPERYRSNSLIPLFAQDAPAMMSPRGIILIGKARHHARILTWDDPKKGPQLGIQRVFAAELEEMLKDASSNDLFEAPIPFHTMSHRDLQPQVRAAVEQGLTRQIGWITLGDEIEIDPSDFAEDTTKFGKFLREFPEKNWSITGLKKTRTLVLRPLMLSAEGVSPTDSQLAAEVLDRGVEIHPSILLAAPGTNVIRRTSLGRPRWDSGPAHLPESFNVYARMTQQSVRD

SEQ ID NO: 8395 - protein, 1141 aa, synthetic construct
  REGION 1..1141: note = Synthetic
LLSSLTCVDILRSHCRAKRKGAIVAECIYRVGIDVGDRSVGLVAVEFDENGVPLRFLEKLVVRHDGGLDPDTGKTPQSRKATAGVARRTRRMRKRKRQRLKALDRYLAEHGYPDVQPQITPYDAWHARARLVSTKVDDPAQLKNDLALALRHIARHRGWRNPWKTLASTRKLPVPSETLLANQARAREHFGDEVNDSTTVGQIGALAASRDYLLRPRNITVTKGVNQKKNVHDLERSSEEALAAGHPTAPILGWQVRQEDQINEVERIWERQGLPSEELPQILTLLFAQTKPHVPSERVGRDALQPKLYRAPIAALEFQDFRILAAIANLRVRTDGGRRLTKDERFTAFQFMSGWREKEPLSWADVAEELALSPHALAAPTTETNQRLAFAPTNRTLTTLGTFFKGKKIDAGAREWWQSASYTERSLLAQLIADATPDTQEQADASGLADVLLQWDEDTVADLMELDLQSGRAAYSTDTLLRLNARMENDGTDLFESIQAEFNIDPSRLPRPDWDDQTGQPTVDRVLTIVRRFVGGCERKYGKPESVTVEHVRTGLMGAEQRSSIIAENNRNRRDSDRIRAELQADGVSEPSRLDVRRHRQVQRQNCTCLYCGTPITTTTCELDHIVPRRGGGSSQGSNLVAVCRECNASKAHRIFAEWAEETQREGVSVKEASKRVRHWLNASASMKREVTRRLQQKRTDPPIDERDLASTSYAATEITRRILGHFHDEVPVVAFGGSGTREARRAGRVDHIIRLRGSLDKSRLDTRHHAIDAAVLTLQSPAIYRVLLTRVNLKREHEITGEAPEWRDYEGADQAEKVLYRRWQKNIATLAELMRQEIENNRVPVTRPIRLRKSRGAVHDATVMKALERDLWGEWDAKAIDRVVDPELHLALRKLFTSTKNKKINVDATSQELPERYLANQTVQLFDADAPSVMSPRGILRIGAGTHHARLLTWDDPKKGPQLGIQRVFAAEFGEILKDASGNDLFEASIPFHTMSHRDLQPQVRKAVEHGLTRQIGWITQGDELEIDPADFVGEANAFGNFLREFPERSWSIAGLKKSNTIVIRPLLLSQEGVTAAISPHAAKIVENGIELSNSTLFTAPGTGIIRRTGLGRPRWDSGPAHLPESFNVRARMTQHSARD

SEQ ID NO: 8396 - protein, 1051 aa, synthetic construct
  REGION 1..1051: note = Synthetic
MTYRLAIDMGATSLGWCILDLNDKGQVCDVLDMGVRIFPDGRNAKSREPLAVSRRGTRGSSRRHDRYKNRRKRLMAFMIENGLMPRDEAERKALELENPYELRSRAAAEKISLHELGRALFHINQRRGFKSNRKADSKSNESGAIKTGIAELEHAMLASDSKTLGQFLYEKHKNKESVLARPETKGSKNEYDYYPARDMYEQEVDFILNKQKEFHPELTEDICEKLKEIIFYQRPLKPQPVGWCTFESEENRARLASPIVQKFRILQEVNNLEIDGLTETDPKLKPEDRQKIIAELQNKKEVKFNRIRKMLGLGDDITFNLEALESRAGLDGNTTNFILSKPECFGDRWGEFASEQQESIIELLMTEPDPEKVIESLIRDYDVSVEQAQKISNNPLKEGHGRLSMKAIHNIMPHLEQGYRYHDACKLAGYHHSDFRTGEIFDQLPYYGEALQTAVIGGSYAEEDKNNPEKFYGKINNPTVHIALNQLRKLVNALIEIYGKPQEVAIELARELKYGQKRLQEHNKNQNENRARNEKINAELEKLGKTPNYKNRLQYKTWEELATDPTKRCCPFTGKQIGANDIFSGEFEIEHLLPFSRTFNDSPANKVLSHRSANRIKGNKSPYEAFGHTAQWSEILARAENLPFNKRWRFKEEAWDIAKGNNEDMIARQLTDTQYMTRIAKKYLSFVVEEQKGQSRVYGIPGQLTALLRRKWGLNNVFDDSLDKKDRSNHRHHAIDAFVVGCTTRSMLQAISRTNENEREKIEIPEPFPNYREIVKEKAENMVISYKPDHGNARNAIKHGKTVSGLHKATAYGFVKDTDAKKGKALFVTRKPINGFKKRTDIENVIDPVWKQKLLNAVEESKDGSTEFKAALDVFSESNNVRRMRVYDESSLNTMIPVYHPDEKGKDGAKAYKYYSLGGNYCAEIYCPNKGKNAGKWGIEIISNYHAHQKDFIPQWQKDNPTAKLVMRLQINDMVAYEDEGETKISRVKKMDNTGRVCLRDHRVAKEDGDKLSWTAYIGSLQKKNARKISVDITGRVKDPKKLTENQDIAA

SEQ ID NO: 8397 - protein, 1051 aa, synthetic construct
  REGION 1..1051: note = Synthetic
MTYRLAYDLGTTSLGWCALDLDKNGNPCGILDMGVRIFPEGRDAQSKEPLAVARRGSRGAGRRRDRYLGRRRRLMDYMIEIGLMPKNKAERKALELKDPYELRARAAHEKIDIHELGRALFHINQRRGFKSNRKADGKDNEGGAIKKGIAELQHALMASGLKTLGQFLYEKHKNREGVLARPETKGSKNEYDFYPAREMYEREFDFILETQQEFHPELTDDVCRKLKEIIFYQRPLKPQPVGWCTFEGKEKRARLASPAVQRFRILQEVNNLEIDQLEETDPWLTHEDREKVVKALEKKKEMTFTAIRKLLGLSGDVKFNLEAAENRKSLNGNTTNFLLSNKECFGEAWYDFSVEQQEDIVGFLMDEPDLEQVIETLVRDYDVSLEQAEKISYAPLKDGYGRLSLKAINKILPELEKGFKYADACKEAEYHHSDFRTGEVFDKLPYYGQALEAAVIGGSYAESDKGDPEKFYGKINNPTVHIALNQVRKLTNAIIDIYGPPYEVVIELAREMKYGRDRLIEHNKNQKKNRERNEKINAELEKLGITPNYKNRLQFKLWEDLSADPTKRCCPFTGKQIGINDIFSSEFEIEHLLPFSRSYNDSLANKVLCHKNTNRIKGNKSPHEAFGYTPEWGDILARVENMPFNKRWRFKEEAWDIAKGKNEDMIARQLTDTQYMTRIAQKYLSFVVPQQKGECRVYGIPGQLTALMRRKWGLNNIFDDESEKKDRSNHRHHAIDAFVAGCTTRGMLQAVSRANENDRDRVIIPEPFHDFREQLQDKAESMVISYKPDHGNARQAVQKGKTVAGLHLDTAYGLAGVGNSKKGTMIYVTRKALSGFTKRKDIEAVADPVWRQALLNVIAECKDGSAEFKAAIADFSQKRKVSRLRVHVERSPETMIPVYQAYEKGEEGAKPYKYYSLGGNYCAEIYEIKHGKDAGKWGIDIISNFHAHQKDFIPKWQREHPTAKKIMRLQINDMVAYEEDGETKICRVKKMTSGLIYLRDHRIAAEEADKLSWAASPGQFQKKNARKISVDITGRVKDPKAALTQNKEKAA

SEQ ID NO: 8398 - protein, 1051 aa, synthetic construct
  REGION 1..1051: note = Synthetic
MTYRLAYDLGTSSLGWCVLDLDDNGSPCGILDMGVRIFPEGRDAQSKEPLAVARRGSRGSGRRRDRYLGRRRRLMDYMIEGGLMPTNRAKRKELELKDPYELRANAAIKEISLHELGRALFHINQRRGFKSNRKANSKDNEGGAIKKGIAELEHALMASGLKTLGQFLYEKHTKREGVLARPETKGQKNEYDFYPAREMYEREVDFILNKQQEFHPELTDDVCNKVKEIIFYQRPLKPQPVGWCTFESKEKRARLASPSVQYFRILQEVNNLEIDQMLETDPWLTHEDRQKVAQALQTKKEMTFTAIRKLLGLSGDVKFNLEAAENRKGLNGNTTNFFLSKKECFDVTWYDLTAQQQEEIVEFLMKEPDPEQVIETLVHDYDVSLEQAEKISGVQLKDGYGRLSLKAINAIRPHLEEGMIYSDACKAAGYHHSDFRTGEVFDKLPYYGQVLETAVIGGTNADTDRNDPEKFYGKINNPTVHIALNQVRKLTNALIDIYGQPHEVVIELARELKYGQDRLNEHNKEQKKNQERNKDINAELEKLGVTPSYKNRLQFKMWEDLSADPMKRCCPFTGKQIGMNDIFSGEFEIEHLLPFSRSYNDSPANKVLCHISANRIKGNKSPYEAFGHTPEWSSILARVENLPFNKRWRFKEEAWEIAQGKNEDIIARQLTDTQYMTRIAVRYLSFIVPQQKSESRVYGIPGQLTALMRRKWGLNNIFDDESEKKDRTNHRHHAIDAFVAGCTTRGMLQAVSRANENDREKIVIPEPFVNFRDILKDKAEAMVISYKPDHGNARKAALEGKTVAGLHKETAYGLLRDGDPKKSTKVYVTRKALSGFTKRKDIEAVADSAWRQTLLNAIKDCKDGSAEFKSAVAELSDKENVRRLRVHVERSSETMIPIFQPHEKGEEGAIPYKYYSLGGNYCAEIYEIKFGKDAGKWGIEIISNFHAHQKDFTPKWHREYPTAKKIMRLQINDMVAYEEDGETRICRVKKMTSGVVYYRDHRIAKEEADKLSRKLSPKQMQEFNLRKISVDITGRIKDAKAALTKNKGKAA

SEQ ID NO: 8399 - protein, 1595 aa, synthetic construct
  REGION 1..1595: note = Synthetic
MNETVWAFDLGKASIGEAVRQGNKFLHKASLLIPADLGRRGPATMSGTPASRYRMLQTRLAHARREEWLDRVWMAAGLTPLVSRTVEHVDFTVRRVKKNVRGKVRWRNKKVGGRWILKSKADPSLEREFGGADDSECYTSCLLRIKLLNGDTLKDWQLYKALFSAIQKRGYADVPWKVQRKATEDKPKNAQEEAENAIAGKRWTDFSKHPDVAKIGTHFQRACYFDAWHMKLWNPAKPKEISLHPTERQESTQKVVFPGRIIAEEVLALARKATEQEKRLETGFSKVMEDWKKSVKERIARINAHRAHLGKSLVWVPDFSRGANNFAELLVYGPGGAPENPIDGVRHIASHDPDIRRATGLHPGGADDTMGALNQKVARFENRLRASCALIPRLVVCGNLAPEESVRIKEHDHERLLPSQVTLLMKLKNMSVEERNAARNQRGLKSEELRKIFEALNPKRKYHLTKREWRDWCRHFEVLPVTDPDDKDGAKNNQAPAEGTEKKKTDDLAVEKPKPAGRSRFSRPALLILKELLLSGLSPRVFHDDLANARTVLKVKTGPRSGPIIEKTLNVAADTGDAKTDTKNRMCGLLVSDLQFLLRMGKDGKPADSWDDLYIPSQQLDRRAQEAQATMEERASAIRALIGEQNNPIVRHRLDAFWKRLQKLEKAYDIPQRIVLEFVRDDSETSWLGTEAAAEITRAQKEQRERRERARKMLAEMGNPNGDVLKYLLWEAQGGQCLYGKPAGKPQCPYTETGLSFTDLHKYRIDHIVPRAKGGPDSFSNYVLTTDETNAAKGDRTPWQWFREDRNQQDWDAYKSRVWTRVNQLGWKKVRLLLSADAEKLVERYTPLAETAWIARLAQTVAGLHFGWVNGNDREGNKRVITVSGGLTGRVRRQYFLNSLLGRDRELDGKISERLDSLAELRSSGLPWKEQRDKARALRSELDELGAQANKDRADKRHHALDAMVLSFLEGWVNDPKREEEFRLELLGDNPTFPPNLMGEIGKLRSQIIAMEATVAKSGSAEERARLNERIISCRDGLAKMRMERNIRAVRAAFRREIEGDEKGGVKPILPFALHYPKPHLEATFHRGVWLKVESASRAVHATIDDYDKAFEQERVPLLELPNQENFVTEEKEHSVAYAVLRIAEIAPHKDYDAMSVRKAVESFLKTNPSIEEWQAWCTCDVAPAGIKPKKGQPNKREIVLYRIEEKRTKRVSLFGLGVGSSEVPEYDRAHFEMQINRLVCRPERSKDKPETPLQPDGELQAKLRELQPRIEAFYQENPPDPGDRPRKESARAEWQARKDRAKEAWEQFQKDTGLDRHKRVCLRTDSAKTTDRRYELAGLSSLLLVRVKRYDHENAEKQIQFLSDAWTRFQLREFLKQNPSPKQWKEFCGTFVQVRREELKQFLSPQPQTAEEFIRFYQQQAEASARRDGAANKIRSIVKTVQKVIGNPHAFVDVSKDGSGIYATSGNRGYFVWRRRTTDGENAEQFVYGTQPVQAFLRLADVKRQLLRQEGMELLDKRLWQTDMLLHLPNDTLSGKKTVPSGYYLFGSISNGTNATLKPMAGGDVYDGIRIDLLLEKGLSRVHLETETKEKTQV

SEQ ID NO: 8400 - protein, 1721 aa, synthetic construct
  REGION 1..1721: note = Synthetic
MKKILGLDLGTNSIGWAVVEIDHDKRIVRIIALGSRIIPMNAGEISTFESGGKLKSSAANKTESKSIRKNKARFLLRRDRLHCVLNMLNMLPEHYKLDIEFVNEKGKRSGKIIKGREPKMAYYTDENGKPQFYFKEAYAEMEEEFRAVHPELFLYNQHTKKQPRIPYDWTLYYLRKKGLSLELSKEELAWVIMSFLQKRGYEKVMGEDEKEQKEGELSEVINAKVISVELLPNKSAEGLNLYHIQLADEYNNVIFSYNEPALYQITRPNEYKQLEKITKLDSDENIKKEEIVVSEIKNIEIVEVINTHETQKEKTSFEITLDTGWKYEHLSRYYPKIAKTRRDFIITSTFDPKGNLHKRSISMPNEDSKQLEKLKTETSIQEYNSNNRTVGVASYIYETLLRNPNQKIKAGLIETIERDYYKQELKNIIENQKRFHPELCNEQNYFDALRMLYPNNETHRNTLARQDFTNLLSDDIIFYQRDLKPKKSQIADCKYEYVTYHKDGKEIKQPLKCIAKSNPLYQEFRLWQFVKRLRIIQKESENEQGERLVNIDISDSVLTMSVKESLFEFINNRKEITQSAILKKLKLDENNYKWNFEVDHKEPCNETRYDFVLRLKRIKGFDWEKFLNAKSKVHKKGDVIDGPSNEYLLWLFFYSIKKKEERIKGLPHLVEKLLHNASMDLSYKERVIETISTISTYKNEYGTYSEKAIKKLLPFMRLGKYWNQKDVEQASTIKDIKPEVLTKENINGEINDLQGLWVSSACYIVYGKYSEASDAAQWNQPYAIKQFLQKEFKHNSINNPVVEKVVREMLMIVHDIWTTYGETDGTYINEEGTEITSYRKYFDQINIEIGTSLKNNNKRKKQEDDRNKENRRANDRAYEMLKDLKTTYYGIEERSPFQQEKLRILEAGILDSISYDKDDKVYDYVIKTNERKFTKKEIRELIKKDVEKISKSDILRYRLWLEQRYISPYTGRAISLSNLFDRTKYQVDHVFPQERVTLNSMSNKVICEAIVNQAKGAMTGYEFILKNNGMAHYKGQDIPLLSPNEYVSHINSTIKDNNKKEILLSKNIPDKFGNNQLNNTRYIAKLAMGILSNLVREDNENEYKSKNVVVISGGVTAKLKRDWHLDEAWNELIKPRFLYLKNLLESDEFFDKKIIDGHLVQIPRIPNKDVDKKRIDHRHHALDALIVALTTNNHVNYINNISALNINTDRISERKDLKAKYMTTKQRDDGTKTRLFLPPMQYKEGGDVIAYKYAYKDGEPNNVFKTVALTALQNTLVTFKQNNRIMRQRINYIQHPEHKEGLKQTNLNLKQNYSIRQSLHKQTFYGLRNFCPKAIEEAIKRPDRILDNKVRYLIQQYQQQGMSMESTIELLKPQFATVYVQEKCVVTQWSHQLEYLSDIKEKEDDKKTLRTGKSPIIREIECVADITIQKILKNHLAKYDSIKMTIAEASQCYDDIVIEDQRAIVREYMTNGTTKDLLIDVFVKQRSTEGKTVFHNPQIAFSAEGIKEMNYHITELNNGKTHKPIYKVKVTQALGKMFPIVEENSEKAITVKNKQYVISDAGSNNFCGIYKSDSGETAIYVPSLKTTIEATRTNESLFPNIHPNSADFKYKFTLSPLDLVYVPTQDEIVNNHIGNNIDYSRVYVVNDFNDAGVMYFRPYSHANAIVEKEVDLRIDKKGNIIGSFSDKTANCQGLSIRDCCIPIKTDRLGNIIQIGERIITK

SEQ ID NO: 8401 - protein, 1726 aa, synthetic construct
  REGION 1..1726: note = Synthetic
MKKILGLDLGTNSIGWAVVEIDHEKRIVRIIALGSRIIPMNAGEISTFENGGKLKSSAANKTESKSIRKNKARFLLRRDRLHCVLNMLNMLPEHYKLDIEFVDEKGKRSGKIKKGREPKMAYYTDENGKKQFYFKEAYAEMEREFNVVHPELFKTDHLTNRQMRIPYDWTLYYLRKKALTCELNKEELAWVIMSFLQKRGYEKVMGEDEKEQKENELLEVINTKVISTELLPNKSPEGLNLYRIQLADEYGNIVFTYNEAALHQITRLNEYKQLEKITKLDSDENIKKEDIVVSEIKNLEITEIINTHEIKKEKTTFDIILDTGWKYEYYSRYYPRIAHTRRDFIITSFYDSKGNLHKRNISMPDKDSMQLEKLKAETSIQEHNSDNKTIGVASYIYDTLLRNPNQKIKAGLIETIERDYYKEELKAIIENQKRFHPELCNEQNYIDVLRMLYPNNETHRNALKKQDFTALLGDDIIFYQRDLKPKKSLIANCKYEYVTYHNKEGKEIKQPLKCISRSNPLFQEFRLWQFVKRLRIIQKESENAQGEKLINTDITDRILTMPVKESIFNFINNRKEITQSAILKKLNLDENKYKWNFEEDHKEPCNETRYDFVLRLKRIKGFDWERFLDAKSYVHKKRNDTNMLIEGPSNEYLLWHFFYSIKKKEERIKGLPHLIEKLLHNAGMDLSYKEKIITTISTISTYKNKYGTYSEKAIKKLLPFMRLGKYWKQEDVEHIKTTKDIKPEILEKENINGEITDLQGLWVSSACYIVYGRYSEASDAAPWNQPYDIKKYIQKDFKHNSINNPVVEKVVREMLMIVHDIWTTYGESDGTYTNEEGKEEVFYKKYFDQINIEIGTSLKNNNKKKERDTIKNAENRRTNDRVYEMLKDLKTTYHGIEERSPYQQEKLRILEAGILDSISYDKDDKVYDFAIKTDERKFTKKEIRELIKKDVEKISKSDILRYRLWLEQRYISPYTGRAISLSNLFDRTKYQVDHVFPQERVTLNSMSNKVICEAIVNQAKGAMTGYEFILKSNGMAHYKGQDIPLLSPNEYVSHINSTIKDNDKKEILLSKNIPDKFGNNQLNNSRYIAKLAMGILSNIVRADNETEYKSKNVVVVSGGITSKLKRDWQLDEAWNELIKPRFLYLKNLLGSDEFFDNRIIDGHLVRIPQIPDRDIDKKRIDHRHHALDALIVALTTNVHVNYINNVSALNVNTDRINERKDLKAKYMTTKHRDDGTKKRLFLPPMQSKEGGNVISYKYAYKDGEPNDVFKTVALTALQNTLVTFKQNNRIMRQRTNYIQHPEHKERLKQIGLNLKKNYSIRQSLHKKTFYGLRNFCPKAIEEAIKKPDKILDNKVRFLIQLYQQQGMSMECIIELLKPQFETVYVQEKCVITQWSHQLEYLSDIKEKEDDKKTLKTGKSPIIREIECVADITIQKILKNHLAKYDSIKMTIAEASQCYDDIVNEDHKAIVNEYITNGTTKDILIDVFVREKNTEGKTVFHNPQIAFSAEGIKDMNYHITELNNGKNHKPIYKVKVTQALGKMFPVAEIDPDKVITAKNKQYVISDAGSNNFCGIYKSDSGETAIYVPSLKTTIEATRTNESLFPNRHPDAVDFKYAFTLSPLDLVYVPTQDELINKYISDHIDYTRIYVVNDFNDQGKMYFRPYSHASAIVDKEVDLRIDKKGNIIGSFSDKTTQCQGQSIRDCCIPIKTDRLGNIIQIGERIISK

SEQ ID NO: 8402 - protein, 1731 aa, synthetic construct
  REGION 1..1731: note = Synthetic
MKKILGLDLGTNSIGWAVVEIDNIKRIVRIIALGSRIIPMNAGEISTFESGGKLKSSAANKTENKSIRKNKARFLLRRDRLHCVLNLLNMLPEHYKLDIEFVDEKGKRSGKIIKGREPKMAYYTDENGKKQFYFKEAYFEMEGEFKTVHPELFQNNPLKNRKKRIPYDWTLYYLRKKSLSQELSKEELAWVIMSFLQKRGYEKVMGDDEKEQKENELSETINAKVVSVEPLSGKSSEGLNLYRIQLADEFNNIIFTYNESAQYQITQPNEYKQLEKITKLDNDENIKKENIIISEIKNIEITDVINTHVNKKEKTSFEILLETGWKYEYLSRHYPKMVGTRRDFIITSTFDKKGNLYKRNISMPNEDSKQLEKLKTETSIQEYNSKNGSVGVASYIYDALLRNPNQKIRAGLIETIERDYYRKELKAIIEKQKLFHPELRNEQNYLDALRMLYPNNETHRNTLANQEFASLLSDDIIFYQRDLKPKKSLIADCKYEYLTYHKDGKEIKKPLKCISKSNPLYQEFRLWQFIKRLRIIQKELKEDQGKRNEQLINIDVSDKILTIPVKESLFEYINNRKEITQSAILKKLKLDENNYRWNFEEDHKEPCNETRYDFVLRLKRIKGFNWEKFLNARSKVHKSRRGNDTNTIIDGPNNEYLLWNFFYSIKKKDERIKGLPHLIEKLLRNANMDLMYKEKIVETISTISTYKNEYGNYSEKAIKKLLPFMRLGKYWNQSDVEQVKTSEHIKPEVLIKENINGEITDLQGLWVSSACYIVYGRYSEAGDAAQWNQPYAIKEYLQNEFRHNSINNPVVEKVVREMLMIVHDIWTTYGETDGTFINEDGIEVDFYKKYFDQINIEIGTSLKSNNKKKERDSIKNAENKRANDRAYEMLKELKTSIHGIEERSPYQQEKMRILEAGILDSISRDKDDTIYDFAIDTNERKLTKKEIRELIKKDVEKISKSDILRYRLWLEQRYISPYTGKAISLSNLFDRTKYQIDHVFPHERITFNSISNKVICEAIVNQAKGAMTGYEFILEKKGLAHYKGQDIPLLSPEEYASHIKDTIKDNEKREILLSKTIPDRFGNNQLNNSRYIAKLAMGILSNIVREDDEKEYKSKNVVVVSGGVTAKLKKDWQLDETWNELIKPRFLYMKNQLGKDEFIEERYIDGHLVSIPVIPNKEIEKKRIDHRHHALDALIVALTTNNHVNYINNLSALNVNTSERIGERKDLKSKYMTTKHLDDGTKKQFFLPPMQYKNGNEIVTYKYAYKDCEPDNVFKTVALTALQKTLVTFKQNNRIMRQRINYIIHPEHKDGLLQNDLNLKKNYSIRQSLHKQTYYGQREFCPKPIEEAIKKPDRIVEGNVKYLIQKHLNEGKSKEQVIELIKLLHPVVYVNEKCVTTQWSHQLEYLANIKEKEDDKKALKTGKSPVIREIECVADIVIQNILKRHLAKYDSIKMTDVDASKCCDDIVNEDQRAVVEEYIANGKSQNMLIDVYVRERNTEGKTVYHNPQIAFSAEGIKDMNDHIIELNNGKRHKPIYKVKVSQALGKMFPISEREPEQPVTAKNKQYVISDAGSNNFCGIYKSAQGETAIYVPSLKATIEATRNNDSLFPDIHPDSADFKYAFMLSPLDLVYVPTEDEIENNYISDNIDYSRIYVVNDFNDQGKLYFRPYAHANAIVDKEVDLRKDKKGNIIGSFSDKTANCKGISIRDYCIPVKTDRLGNIIQIGRKIISK

SEQ ID NO: 8403 - protein, 1741 aa, synthetic construct
  REGION 1..1741: note = Synthetic
MKKRILGLDLGTNSIGWALVEIDHEQKIVRIIALGSRILPMDAGEISKFESGGKLQSSAAARTVVKSTRKNISRFLLRRDRLHCVLNLLGMLPEHYKLDIEFVNEKGKRSGKFKKGKEPKLAYYSDGKGQSKFYFEQAYKEMEAEFRTAHPELFYEKTRGKKHIQTRIPYDWTLYYLRKKGLTKELSKEELAWVTMSFLQKRGYEKVMGLDEKEQQTEDLSEITNAKVVSVELLNAKSATGLNKYHIVLADEYENVVFEYEEDASFQITQKDEFKQIEKISRFDKNNDEVIKSVDVIISEIKNLEIIDVINTHEKKKEKTAFEIKLSSGWDYEYLSQYAPKIKGDNRDFIISTCFDQKGGFKKRSIKMPSEDDWQLEKLKTETSIENFNLKHNTCGVASYIYDALLRNPKQKIKAGLVTTIERDFYEKELKKILDTQKAFHDELKDVQKYQEALCLLYPNNETHRNTLEKQDFSTLLSDDIIFYQRDLKTKKALIKDCPYEEHIYWDKDTGEKKSAKIKCIAKSNPLYQEFRLWQFIKRLRIIKLETDNERGEKLVNQDVTDSVLTMAVKQELFGYLNNKKEITQETLLKKLFHKKGEYKEYKWNFEEDHKEPCNETRYDFVLRLKRIKDFDCEQFLDARAKTHEPDGKKQNSDALVDGCTNEYLLWHFFYSVKKHNERISGLPRLVEKLLMNANIDLSFKDKVVEMLSSISTYKNEYGTYSEKAIKKLLPFLRLGKYWNQEEVERIKTNKPIKPEVLEKENIQGKIADLQGLWVSSACYIVYGRYSEVGEVKRWSQPNDILNYLRNDFKQNSLNNPVVEKVVREMLLVVHDIWTTFGDVEDCIINEAGEDIKTYKKLFDQINIEIGTSLKKNNKEKDEENKRNKENRLANERAIAMLKELKSVYKTADIKEKSPFQQEKMKILEAGVVDAIKYDKDDKTYNYEIETSEARFTKKEIKDLLKKEVPKISKKDIERYRLWLEQRYLSPYTGKPISLSNLFDRTKYEIEHVFPQERVTLNSYKNKVICETIVNKAKGAMTGYEFILNHKEGKCIYQGHEIALLKPDKYVEHVQTYITDKEKQEILLSKDIPNKFGNNQLNNSRYIAKLAMSLLSNLVREENEKEFKSKNVLVVSGRVTSILKQDWQLDETWNELIKPRFIRMNELLNTNDFGEERLIDGHPVFVPTIPDNEVNKKRIDHRHHALDALIVALTTNNQVNYINNISSLDINSERKKERWDLKAKYMGNKKNSDNSKEQFFLPPMQYKQGDTIITYKYAFKDSEPHDILKCEVLEALQNTLVTFKQKNRILRQRTNWIQHPDCKDGMKEKDINLKKNYSVRQSLHKATFYGVRDIMPKPIEDAFDKPEKIVENRIKMLIKKYTEEGKSKDETIAELKKKDAVVYVREKCATTQWSHTLDYFANIKEKEDGKDKKKVKSGKSTITREIETVADITIQNILKRHLAKYDSVKMSVAEAVEFYDDIVNEEQKSIVAKYIKDGKDSDSLIDVFVHGRSIEDKEIMQNPQIAFSADGIKALNENIEELNNGVRHKPIYKVQMVQALGKMFPVSEPDPKKPVVAKNNQYVISESGSNNYCGIYKSAVGDTKIYVPSLRMTIDSYGNNENLFPEKHPDDISYFYRFTLSPLDLVYMPTEDELENNQISGVINYSRVFVVNDFNDAGVVYFRPYSFANAIAEKEVDYRMDKKGKLIGSFSDKTASFEGRSIRDNCVPIKVDRLGNIIELNGKKL

SEQ ID NO: 8404 - protein, 1062 aa, synthetic construct
  REGION 1..1062: note = Synthetic
MKTKNGQVDYVLGIDLGVVSLGWAAIEIDNDGGQSLLGAGVRCWELSNASLEEVEKGKEEPPGQSRRQARQLRRQMFRRAQRLRRTYRVLQEMGLFLTGPRSSTARKAYLETLDQKAQEWLRTNVPGANNDGLLAHTFIYRLRAAALDHPLPPELLGRVFFHLAQRRGFLSNRRTLEKNKDEELGVVKQGISQLQDEIQKSGARTLGEFFSRLNPHEQRIRNRYTSRKMFQDEFEQIWNAQRSHHPNSLTDSKKARLYKAIFFQRPLKLQHGLVGRCPLEVLPRKRPNGQVEYIYPFRRAPMASLEAQRIRYMQRINDLEFTDPQGQRRVLSPEERQKLYDLAERNEDLSFTLIKKTLGIPTGKKGEGWECNLERGGEKKLPGNRTSAQIRKVIGDATWEDLGRERQKALVDTLIAFLRADTLEEHLHRVWGFNREVASQLAGLPLEQGYHSFSRRAIRRLLPLLEQGERLNAAIQKVYGGTQRKINQHAELPPVRQVLPTVRNPLLIRALTELRKVVNAIIRKYGIPRCIRVEVARELKRSRKEREEISKRMREQQKRREEAAQRVLQELGRTAAPRDIEKYLLAEECNWICPYTGKQITTQALLGDHPEFDVEHIWPLHRSLDDSFMNKTLCYHQENRSVKAGRTPYEAYATDPVRWQEIITRVRNFRGPFARQKLVRFQAEEIPPDFALRQLSDTRWISKAAADYLGHLYGGRIDPTGQQRVFTVAGGLTGLFRRAWNLNAILGGSPEKNRYDHRHHAIDAIVVALTEPSMIQRFAHEASRLLKAWPRVAVRLDPPWSTFLSDVQRHVEGIVVSFRVSRRLSGALHDQTYYAPPTEQGKTKVRKPLREMSSHEVERIVDPTVRDLVKEKLKQLGTSDPKKAFATDANLPIIRGKNNTALPVKSARIWVSSSVIAVGDGPRQRYVVPGNNHHIEIYALLDGQGQEVRWKGKIVSLYEAYERKKRGEPVVCRDHGPNTRFKFSLAKSEYIEWINDDGQKQLLRVVGISDDNLELRLPHDARPITLIREQRERIRATYRQLFQRRARKVMVTPLGEVLPAND

SEQ ID NO: 8405 - protein, 1061 aa, synthetic construct
  REGION 1..1061: note = Synthetic
MSAECQVRANEKNYVLGIDLGVLSLGWAVVEYAGDKPVGILKTGARIWEYSDASTLTVQKGQETPPGQERRQARQQRRQIFRRAQRLRRTCSVLQAMGLLDPGRRNSRARKQLWETVDQQAKEWLKSNIPGLADDPQLDHKFVYHLRAAALDHPLPKILLARVFFHLAQRRGFQSNRRVVSRSEEEGEVKKAISLLEHEISESGCRTLGGYFATLDPYTTRIRGRWTSRKMYQDEFERIWSAQIAINPGILDLSQKSRLFKAIFYQRPLKSQKRLVGRCSLEVIVRRGPDGPREVRPRQAALASLEAQRIRYMQRINDLEFTDPEGERRTPTQLEREQLYQLAETVEEISFSQIRKALGIPTGKKGAEWECNLERGGETKIPGNKTAARLRKILGNKTWDGFSESDQKKLVDTILAYLSPEALQSHLENVWKFDSDTARQLSNIELEQGYHSFSRRAIRKLLPLMHQGKRLNEAIKAVYGHTGRLRSVQERLPPVWKVMPELRNPLLVRALTELRKVINNLIRKFGKPQYIRIELGRELKLGKKRRQELAKEMRKREAERERAAKVIEETLHRKARPNEILKYLLADECDWECPYTGKKISVLTLLGDQPQFDVEHIWPFDRTLDDSFGNKTLCYHEENRQVKGNKTPFEAYSDSPDRWREILERVKRFKGPFAKEKLRRFLAADIPQDFPMRHLSDTRWITTAAADYLGYLYGGRIDSEGRQRVFTVTGPLTALIRRGWNLDGILGGPEKNRFDYRQHAIDAIVIALIDQAIVQQISLLSSRLWGTDRPTAVQLPEPWPSFYHDAKNAILNIVVSHRISRRLSGALHEQTHYAPPDNNGRTKIRKPLAALSAKEVENIVDDTIRKYVQHALANAEKKSPKEFFGNPENLPVLKGKNNHVAVVKSVRVWVSAKPVAVGNGDRVRYVKPGNNHHIEIYAIVDEHGNPVKYDGRCVTLLEAVQRKRRGEPVVCRNHGPNTRFLFSLSKNECIEWTNENGEKELLRVVGIADNDIEFRLLYDARPSNLVREAKDRIRGGYSKLFERRARKVLVTPLGEVLPAHD

SEQ ID NO: 8406 - protein, 1078 aa, synthetic construct
  REGION 1..1078: note = Synthetic
MKRRVAISQGLLQHFYMGIRFSFDLGTNSIGWAVWRTGVDPRGIFGVDAPLEILRAGVRIFKDGRNPKSKASLASERRAARLARRTRDRFKLRREDLLKALAKHGLFPEAGEERLALAKLDPYELRARAVNEALATFEIGRALFHLHQRRGFKSQRKGVAQDEELGKIAAGTERLKIALAALGCSTLGEFLWQRRGERKSTRIRLDGAGNQALYEFYPTREIVQDEFQAIWSTQAAYHPAALTEVAKAEIEAILFRQRPIKPPPVGKCSFTDELRAPKALPSVAAREIYERLNHLRIGYDDGIRRPLSVAERDLLATELLRSAKLTFPRARKLLGLKAGVAFSLEEAGEKHIPGFKFAECVHMETAFGGRWDSLSWGEKDAIVSIVLAEEEDLDAAERLVAECSVPAPEARAIAAMIRVLPDGYSKLGLTANAAILEALATEVTADGSVVTFAEAVLRAGRAIGYDWHHSDQVRRSGRPAPEVSRQLPNYAVILPDQVMPALPGEEFGRFTNPTVHIGLNQLRKVVNELLIEFGHPSQIVVELARDLKQTEKQKKATAASNRANAKLNDKRRDLLQSLGVRVNGDSMLRLRLLDEQTGADGKARCPFSGQEITQAALFTGEIEVEHLLPMSRTLDDTAANKVVCVREKNREKRGRSPFEAFGDRAEWPEIWSRAKALPANKSWRFKPDAMERYEKSDGFLGRHLGETRHLSRIAQQYLQAICVRFDGATGERVYGDVFVTPGEMTALLRARWRLNELLGDTGSKNRDDHRHHAIDAIVIGTMTRGWLSHLACEAGRYEGGERADLVKAVAEPFPGFRDVVKAAVDRVVVSYKPEHGIEGALFKETAYGLVSEKHSDHRAGNVVYRKPLASISAKEVAKIRGQELRAGALGAIDGVDPENKKLIAAHLNRFGEEQGVRRARLLGVENAVVPKADAQGHEFTALKRDGIHHMDIVMLRDGSWKMYPAPITDVNRRGFRPSWEVQKVGGKLAMRLHKGDMIELDGDEGRVIKVVIKFSESGQIVVADHNAGGNLKTRDADKRDPFRYQSASAEKLRGLNAIALNVSPSGVMRPRRIDAGEI

SEQ ID NO: 8407 - protein, 1322 aa, synthetic construct
  REGION 1..1322: note = Synthetic
MKNSQHDETIAKLPIDEHDEGDKVLGLDIGIASVGWCYLDMEKSNERIVGIGSRTFAAPQDGKSEKSDAQHRGEARRTRRTLRRRKNRMKHIRLLLEKYKIASKEFLRAHYLHKPKRVSEDIVPPCKLKEIRSGAETYKYNEYENPWNLRVRALIEKLSYDEIAIILLHLAKHRGFKSMRKTELKDIEDTKNTENTENTENTENSENIEANNGNDSNNKNDSNDENESNNQNNSSGKGKKDEQKILNAIQGMHDHRETLRKQRQEKNPEAHPPTPAELVRALRNDNFALNIRNRLGSYVGVFKREWIVEEAKLIIKSQRKLKNDKLTEAFEKAYLEKLEFFNGVQDVYHMVGYCQHESMQRRGPRQGFSIELFNVYMMLNNIKLDGKNLTDEQKFIIFEKLTEQKNITFKGLRKLFKLDKDVHINFKEDKNEKLNSFEGYHDIEKAFTKGKNSTQCAEIWEKLNPMPELLEFLKQEGNDIKSWDDFTRTSRELYNKVSAETDKLSPMLSIALKIHTLDLIAEAVTYCKSDDNIEKYLKGESPTWKEAHKGDQTPPFFKFLEKLGVTLTDDAKDKIIEQICTIEMSGTANLSTKAARKLTPYLIEENITYDKAVTEVYGMSERNVGTLNIIPPLDEYERTEITNPVVLRAIYRCREVVNAIIRQYGMPTKINIELARELAHGKKKRAQIEYVQNKNKKDKEKIAEEFQNKFDGELNKEAFLKYRLFVEQGGKCIYSGQKLHLENLLDETEIDHIIPYSRSFDNTFNNKVLCLPSVNQDKRDRTPFEYFGRDKEKEEWKEFETRVKVLLNDKKKNKAKLSRLLKQNFDEEKEEGFMQRNLTDTQYMSRFLKNYFEKHLSFGDARKDSVNVIAVKGRVTANLRRIWGLQQGRYEQDEKKQENKTKQKDNTKRETGDTHHAIDAAVIAAATTRNIQRVSKYYRDKEEHKLKTGKKGKKLSYVPKPWKNFTKDVLDHKKKLTVSRWFKPKYKAATNEETIYNEEEGDDGVLLVCYKFLKDIKGKDKKGKSNLKKTVVAKKYEKVAKKDKKVYSAIEKHFENNDYKFPHGCFAWKSVEGNVIDVTDEWAKLSKTDQEQKIKNERVNVIRKLKITKRSDSHMPLRERGYAAYGDMLRIDVFGKLNKNKYEYYAVPLYAHNVTEERLFSKACTKGKEEDWLEMDDSFEFLFSLCRDEMIEVVRKDGDKNFLFRGYYKKFTRSTAAINIVGHDRYTIHAAEFTEDFKDRLPEKDEFVLRTTWLNKYDKKGENERLLDKAGLMTSIGIRTAKLFRKVRISVLGDRVERVKWEERQPLRRGQIVPSYQRPEDV

SEQ ID NO: 8408 - protein, 1136 aa, synthetic construct
  REGION 1..1136: note = Synthetic
VMGVIFLYENIVKPFPSRYDKAIMKRLKGRQTMGYILSLDIGIASCGYSVLETDALGVPYKIKTLNSIIFTRAENPKTGASLAEPRRKYRGARRRKRRTSFRKHRTRQLFITSGLLSKQDIARYLNQQEPHDDIWELRVKGLDEPLTNLQLFQVLYYFVTHRGFKSNRKAELKDKDIGPVLNSINAFKEEMQSHDYRTIGELYANDPRFRDRKHNKDYTNGFLGTIQRSWLVDEIKMLLTNQQSFGNTQLTSEFIELYLNIFTSQRNFDDGPASGPYSGDLIDKMVGPDTFNRSRKRAPRATYTFQYFSFLSKLNSLRIAPSISAPFETLTVDQRALITKRLWGPDVKSADLKFKQIRMVLSLPETARFNLVNYGNTPEKALEIEDKTTFISIKPLREIEKALTGTTLPVSHDQLDAIARILTVYKSDSNRKTAFHNQTVLSDEVIEQLLPLNFSKFGHLSVETMQEIIPYLEQGMVYSDAATAAGYDFRNNQIDMEYIRDNVTNPVVRRAVSVANKLVKAVVRRYGKPDSIHIELARDLSQNFQERRQDEVRQQKNARDNEKIAKRLEELGIPVNGVNITKMKLYDEQHGIDLYDLSTNASMAVTDIFSDDRYEIDHIIPYSVSFDDSYTNKVLVSAKANREKRDRIPMEVFGNDSERRRQFENRVNTNITNLRKKRNLLKETFSDEDKAKWKSRNINDTRYLNRILMNYLSQNVEFTDVLSDAKHVIALNGAVTAKIRSRWGITKVRAAGDLHHAVDAVVIGCVTDALIQAVTRYAKYQERRDNKAAAEQDLAENNPEELDAKQFRKVFNDYPLPWPEFREELMGRVSSDPSQIMAGRQWSHYTAEEISELKQPFVVRVPNHRIVGPATLDTVYGQPNPDDGLITQRVRITDLKPQKNKDGEDIIKAGANVYELAADGGNKLVYESILDALQVAGGDGKKAFPTGRLLVRSPIQDIPVERVRVTSKATLVVPVGPKSVAANGSMVRIDVYKTPKKYVFVPIYVRDTVKAELPDRAVAPVKPYSQWYQLQPKDQFLFSLFANDLIRFKHPRGVSTKEILTDGSQEKGKRTDVVGYFTGADIATASIAIEGPDRSFSARGIGFASLKNVEKLTVNYFGELHSVHETQPMQFRGQRG

SEQ ID NO: 8409 - protein, 1104 aa, synthetic construct
  REGION 1..1104: note = Synthetic
MGYILGLDIGIASCGYAILETDALGIPFKIKMLNSVIFTRAENPKNGASLAEPRRRYRGARRRKRRTSFRKHRTRQLFIREGLLTQQDITAYLNQEISHDDIWQLRVAALDQRITSRQLFQVLYYFVTHRGFKSNRKAELTDKDNGPVLKSISAFETEMTENGYRTIGELYAHDRRFQDRKHNKGYTDGFIGTVKRAWLVDEIKRILAAQQSLGNDKITDKFVHQYLDIFESQRNYDVGPANGPYAGDLIAKMVGPDTFDRSRKRSPRATYTFQYFNFLTKLNSLRVADSIGGTYAPLTDDQRQTVTERLWAKGVKSADLTFKQIRALLSLPDGARFNLVTYSGDAKKALEIEGKTKFVSVKPLRDIQKALDDEQLANDHELLDAIALVLTLYKSDDKRRTKFHEQTTLPDDKIEQLLPLNFAKFGHLSTHTMQAIIPYLEQGMVYSDAATAAGYDFRDNQIDMEYIRENVTNPVVRRAVSVANKLVKAVVRRFGKPDSIHIELARDLSKNFQERKQEEQYQKKNAAANEKIAQQLKELGIPVNGMNITKMRLFNEQNGIDIYDLTPNASMAVTDIFSDDLYEIDHIIPYSISFDDSYSNKVLVSAKANREKRDRIPMEFFGNDPKTRAQFVNRVNTNIHNAKKKRNLLKETLTDEDKSQWKSRNINDTRYLNRILMNYLSQNVEFTDVLSKAKHVIALNGAVTAKIRSRWGITKVRVAGDLHHAVDAVVIACVTDGLIQAVTRYAKYQERKGNKLASLDDLQDDNPDGLDAKRFRKLFNDYPLPWPEFREELHGRVSDAPDKLMAGHPWAHYTPEEIAGLQKPFVVRVPNHRIVGPATLDTVYGQPDPDSNIITQRVRITDLKLKKSKNGDDTIAAGTNAYALAEDGGNKVVYETILRALQAANGDGKKAFPEGRVMVKMPNETIPVERVRVTGKATSTVPVGPKSVAANGSMVRIDVYKTPKKYVFVPVYVKDTVNENLPKKAATQRKSLADWYEIQPQDQFEFSLFANDLIHIVNKKGIKTTEINADGMSTNGIREEIVGYFTGADIATASIAFDGPDRSFSARSVGFATLDKVEKVSTNYFGELAVVHETQPLGFTNKGD

SEQ ID NO: 8410 - protein, 1467 aa, synthetic construct
  REGION 1..1467: note = Synthetic
MNNKKILGLDIGTNSIGWALIDLDSEKKEGNIINLGSRIIPMGAEVQNFEQGNPQTKNAERRTARSIRRMGKRYKARRNKLLYILQQTGLLPEQFQFSYPFDNPLTIQKINLLPIKEKTPQLSAIELVQLKVKALSESINLKDLGRLIFNYNQLRGYSGGGNDEEEIKEEVSEDNTEESGVLRYEKLIKLVKILREPIKQQGKKKGKDFFEVEIELDGEAEKAETMLNTLKKGEEPELQIIIRRDKKGNTTSINLSMPVKTNWRKSMEELEEELDKLAEKKGSEAYLCEYFLKKLADKNYKIRNKVILRTRYQSEFDAIWDAQLKLNPEFRTIVENKELLQQIASFIFPGNNTEHKQAAYRNIAIEKGLKYLIKEQIIYYQRELKDQSELIGFCKYEKAERVAPKSHPVFQEFKVWEQINKLSINTRVQKGLKKNKQPKYEYTDIPLSSAYKQWLFDELQKKKEISGKGFYAKLEKEGTIIKNESFLNGVHKEAKFKGNETLLFLKNQLKEWFEKLKLDNSANLIAFWEILYNTKGNEYDLNSERCRQVKAFIDKQAGKVENVEKLTIRLAKIKFARNYSSISLKAISSLLPLLRAGVHFNPTLPESINTSIVKLLNEKQDDPFQKSVQEVLENYQHIFLTEGGIQPSYAAILVYGKHTAESYTGHDIKSYKDIQPIPRGELRNPLAEQLINETLKMVADIWKQHKEKPQEVRIELARELKNSADERKKIYDANNNNRKINERVKQRLRELSKETSLGNIERFRLWSMQASEPFPFPEKVNEPTAAEIEKMRLWEEQKCISPYTGQPIPLSQLFDKGLYDIDHIIPKSRYFDDSLTNKVVCERSVNIDKGNRTAWEYFEIGSVTEKILSKEQFTSHVNQSFFGKKRRNLLAVKIPQDPVARQLKDTQYIATRVREEISKIAGSDNVKTTTGGVTDYLRHNWGLTDKFKKLTKERFERAQSLIADEEKRKELKWSKRIDHRHHALDALVVACTEPAHIHRLNNLNKELQDWLVKNKQKVMKDFEGTDEELMEAFLNIANEKRDAILEEIKGFRNFEHPWKTFSLDAEKWLENIIVSHKPKEKLLIQKAEKGGGAGEIDILKIRGKLHDATLYGISQGKESYRIKLTKLAGKQFATEKTMEKIIDPLIKDAIKKHLENYKGNKAEAFSAEGIAELNKGRNIPIYGFKIYYKDQSEKINLKKLGGKKTTSDFVNDVLARMIDTKMKEKIISHIDKMGGHKEAFTEAGIKILNKALEEEFAISNPSKKYKLLTAIKLIPSKDSTVQNDEELSLLPLERKSSYNKNLLVSTGSNYAFAILEKNGERQFDEISFFDATRLVNEKFKKGEKDIFQIMKKYFENKNTDASLLFLLKQNDMVYLPIENENISLNAGEVDPERFWNNKRERSKNIYTVIKFSGKQIYFLKHDIATPMINKVEFGSQNCYEKINGVSIKEFCIKLKIDRLGNISPADK

SEQ ID NO: 8411 - protein, 813 aa, synthetic construct
  REGION 1..813: note = Synthetic
LQRGKRICLSACKCIVSRGLWKLERKGYKKILPYLKEGNQYDVACEYAGYRHSKSSLTREEIDNKVLKNRLEILPKNSLRNPVVEKILNQMVNVVNAVIDTYGKPDEIRVELARELKKGAKEREELAKSIAQNTREHEAIRQLLQTEFGMMHVTRNDIIRYKLYEELKDNGYKTLYSDQYIPREKVFSKEIDIEHIIPQARLFDDSLSNKTLEYRAVNIEKGNKTAYDFVKEKYGNDGLRRYLNHCEALFKDKKTKLKKLKMEDQDIPDGFIDRDLRNTQYIAKKALSMLSEISRRVVATTGSITDELRKDWQLVDIMKELNLPKYEALGFVETFKDKDGRIIKKIKDWSKRNDHRHHAMDALTVAFTKDVFIQYFNNKNAFWMSGSKEHANITAIKNKYFEKGKALAPIPLELFRTEAKHHLENILVSIKAKNKVVTNNINRTKKKNGENLKLQQTPRGQLHLESIYGSYRQCIIRDEKVNASFDASKIANVSKSAYRNALLKRLEAYDNDPKKAFTGKNSLDKNPVYLDENKMEKVPDRVKIVEFETVYTIRKPIDPKLSIDKVVDARIRTLLKKRLEEYGGDAQRAFSNIEENPIWLNKEKGISVKRVAIRGISNAQALHDKKDKDGNPILDKEGKGIPTDFVNTSNNHHVAIYRKPVVDKMGQVILDENGSPRYELGEDVISFFEAVARVNLRQPVVDKDYKRSEGWQFLFSMKQNEYFVFPNEKTGFNPKEIDLLNPENYALISPNLFRVQKIGLNDYTFRHHLETSIQNNSNELKFITWIRCGKNGINGVIKVRVNHIGQIVSMGEY

SEQ ID NO: 8412 - protein, 724 aa, synthetic construct
  REGION 1..724: note = Synthetic
MVNVVNAIIADPNLGKPDEIRIELARELKKSLKEREEATAQINKATVEHDEIRLLLIREFGIKNPTRNDIVRYKLYDELKFNGYKDLYTNEYISREELFSKKYDIEHIIPQSRVFDDSFSNKTIVEKRINQAKDNATAYDYIDTKGAERLSEYRLRVEAYLKEYPERKAKYKKLLMKGDAIGEGFIDRDLRDSQYIAKKAKTMLHEVCRTIVSTTGSVTQRLREDWDLVNVMQEINLEKYRKQLLTEMVEKKDGNFKERIVDWTKRNDHRHHAMDALTIAFTKHNHIQYLNNLNARKNDDKLGHAIAGIEKKETYFHIDDSGNKKRRFKSPLTNFREEAKKHLENVLVSCKAKNKVVTKNKNKIKSGKEREPQKTLTPRGQLHKETVYGRIQQYIVKEEKVSGKFDEATIAKVTKPKYREALLKRLQENNNDPVKAFTGKNALSKNPIYLDAKNTVLLPEVLKLSWLEEDYAIRKDISPDLKIEKVIDKGIQGILYKRLKEFGGKEKEAFSNLDKNPIWLNEAAKIAIKRVTISGVKNAESLHFKKDHHGREVLDKSGRPIPVDFVSTGNNHHVAIYRDENGNLQDEVVSLYKVITERINQGLPVVDKTYNQHLGWQFLFTMKQNEYFIFPSTDFDPLEIDLLDPVNNKLISPQLFRVQKFSKVMYGNSAVRDYVFRHHLETVIEDKKELKDITYKSIKSLPYLENIIKVRINHIGQIIKVGEY

SEQ ID NO: 8413 - protein, 524 aa, synthetic construct
  REGION 1..524: note = Synthetic
MQEKLNTRKLLRFFKQKMELSSQRAMILFVINCIKSLKIMGTRICIPINISNEKIFLQKKYDIEHIIPQSCLFDDSFSNKTLVPRQINLDKGNKTVYDYIFDAFGQDKLNEFLIRSKALFDLNDEGISKAKYKKLTMKGSEIGEGFIQRDLRDSQYIAKKAKEILFQITKSVLSTSGSVTDRLRDDWDLVNVMKELNLEKYRLAGLTEMQTTKDGNPKEVIKDWTKRNDHRHHAMDALTVAFTKRIFIQYLNNLNACRNDEYDSISNAKDKKAIDTNSLRISSKDALGIEEKETHKINDGKGNYKRVFNEPIPNFRQLAKQHLEAVLVSHKAKNKVVTRNMNKIKGTDKVQIALTPRGQMHKETVYGKIKQYAFKEEKVSAKFGEATIAMVSNPQYRSLLLQRLAENGKDAKKAFTGKNALSKNPILLKDGTELPEKVKLMWLEDDYTIRKDIGPDLKIDKVIDEGVKRILQTRLDQFKGDSKKAFSDLEQNPIWLNEEKGIAIKRVTISGVKNAEALHVKRII

SEQ ID NO: 8414 - protein, 511 aa, synthetic construct
  REGION 1..511: note = Synthetic
LEVSRNVTATIGSVTDKLRQDWELVDVMKELNWEKYDKLGLTHIEEGKNGERLSKIKDWTKRNDHRHHAMDAITVAFTKPAYIQYLNNLNAKTQGENKANSIIGIENKHLYRDKNNKLRFISPMKNFREEAKKQLESILISYKAKNKVVTKNKNTTKKSGGTNQKIQLTPRGRLHKETVYGKLQQYATKEEKVNASFTEDYIQKVAKKEYREALLKRLEENDNDPKKAFTGKNALNKTPIYISLKDNIIVPEKVKTVWLETDYTIRKDITPDLKIDKVIDVGIKRILQNRLNEFNGDPKKAFVNLGESPIWLNKEKGIAIKRVTISGVSNAQALHTKKDHLGNEILDKNGNPIPVDFISTGNNHHVAIYRDEKGNLQEEVVSFYDAVIRRNLGLSVINKNHEKGWEFLFSMKQNEFFIFPSDGFNPHEIDLLNPNNYHLISPNIFRVQKISTKNYMFNHHLETKAVDGEMLKSKKELSKTSYHFIQTPTNLNGIIKVRINHLGKIVHLGEY

SEQ ID NO: 8415 - protein, 1373 aa, synthetic construct
  REGION 1..1373: note = Synthetic
MKKILGLDLGVSSIGWALVNEAEKPEESSSIIKLGVRVNPLTTDEQADFEKGKSITTNADRTLKRGMRRNLQRYKLRRENLIEVLKEQGFIDDDTILAENGNFTTFETLRLRAKAADEQISLEELARVLLNINKKRGYKSNRKCKSAEEEGQVVDSIDVARDLYENNLTPGQYVYLNIFSIGKKSVPSFYRSDLETEFERIWQKQSGYHPELTPELKESLTGKNKSQTWAIIAKRFGLVGKKRDVKGIELKKDNYRLRYDALMERLDPEDLAIALQEVNDDIRNAGGYLGSISDRSKCLVFNNMTVGQYMTSELEKNPNYSLKNQVFYRSDYMDEFDRIWRVQSAYHPELTDELKHTIRDIVIFYQRPLRSQKGLVSFCEFEPQRKVCPKSSPIYQEFRTWQELNNLTIGGLPLSLDEKKVLAKELQVRESLSGSDIYSLLNKPKNQRLNFKQIDGNRTQSVLFKSYFKIIEESGNGEYDLKKLSCDKTQEVVSDVFSALGAKVDFLVASSLEDSKFFALWHLLYSYEGDNSKSGQESLVVKISELTGLPSEYSKIIAGISFEPDYGNLSAKAIKKILPFMKDGDEYSVACEKAGYRHSGKSLTKEEIESKVYKDHLESLPKNSLRNPVVEKILNQMVNVVNAIIDEYGKPDEIRIELARELKKSASERDEMTKANNVADKQNGEIKAELKRDFGISSPTRNDIIRYRLWQELGSNGYKTLYSNTYIPKEKLFSKEFDIEHIIPQSRLFDDSFSNKTLESKSINIEKDNSTARDYVLSKYGEAGLSSYKANLDRMFNAKEISRTKYNHLLMRESDIPSDFINRDLRDSQYIAKKAKEMLEDVVKYVVSTTGSVTKRLREDWQLVDVMKELNWDKYDKLGLTSYHDGKDGQKIRKIEDWTKRNDHRHHAMDALTIAFTKRSYIQYLNNLNARLEKVSDDSSFFKLEDYELDDLDRGDVARVVRAIQDKELHRDADKKLRFNPPMPLDEFRSEAKRQLEDVLVSIKAKNKVVTKNVNYTKSKRGDRKSQNTLTPRGALHEDTVCGRISRYATNEENVGSGFNAEKISTVANAIYRQALLNRLSEYGGDPKKAFCGANSLEKKPLYLNEMHTDYVPQRVKTVHLETLYTKRKPIDESLKVDKVIDKGIRDILKARLAEYGDSAKAAFSNLDENPIWLNREKGIAIKRVTIDASVSVVEPLHYKKDHKGNVIYDSRGERIPTDYVKYGNNHHIAIYEDTSGHLQEQVVTFLEATSRASMGQPVVDKDYRKSEGWKFLFSMKQNEYFVFPNPQTGFDPSEIDLMDPKNYAAVSENMFRVQKMSSKYYVFRHHLETNVNDESSKTRDVVWKRIRTVDELKGVVKVRVNHIGQIVQVGEY

SEQ ID NO: 8416 - protein, 652 aa, synthetic construct
  REGION 1..652: note = Synthetic
MQWNDIIKYKLYEELKSNGFKTLYSDTYISKDKLFSKDFDIEHIIPKARLFDDSLSNKTIEARDVNIAKSNKTAFDFILERYGEQGVKAYKTKLLRLLEDGAISNKKYNNLLKTEADIPSGFIDRDLRNTQYIAKKAYEILSELVKIVTPTTGSVTNRLREDWQLVDVMKELNFEKYQKLGLADVVEDRDGRKVKRIKDWTKRNDHRHHAMDALTIAFTKPSYIQYLNNLNARSDKSSSIYGIEVKELHREEGKLRFNAPLPINEFRAEAKRHLKSLLVSIKAKKKVMTQNVNKIKTKHGIIKKEQLTPRGELHNATYYGTKKRPLIRMVKVGAALDEATINRVCSPAIRAALLKRLNAYNGDAKKAFTGRNSIDKNPIYLDVEQTKIVPALVKTIEWGMYHPIRKRITPDLKIDKVIDKGIREKLKARLAEFNGDAQKAFSNLDENPIYMDEAKQITLKRVSIEGVLSAIPLHTLKDKAGKPIIGSDGNPVFGDYVQTSNNHHIAFYIDDKGNLQDNPVSFFEAAERKSQGVPVIDKRYNCDKGWHFVFTMKQNEYFVFPNEATGFIPSEVDLLDEANYCIISPNLYRVQKLSKASGRDYWFRHHLETMLNDDLRLKNSTFKRIQSLKGLEGIVKVRINSIGKIAAVGEYD

SEQ ID NO: 8417 - protein, 1401 aa, synthetic construct
  REGION 1..1401: note = Synthetic
MCVSLNCNHMKKILGLDLGTGSIGWALVNEAENESEKSFIIRLGVRVNPLTVDEKGNFEKGKPITTNAGRTLKRSMRRNLQRYKMRRNNLIELLRSNGWIAGDTLLSEDGKDTTYETLALRAKAATEEISLAELARVLLLINKKRGYRSSRKTQGNEEGQLVDGMEIAKELDRRKITPGQFVFERMVAGNFSVPDFYRSDLQAEFDRVWEFQRTFYPDILTDALKEELRGKNEKQTWAICQEPFHIVGIKREFKGKDLQIDNYRLRDLAVKQKLGLEELAIVLQKINSQLKNSSGYLGAISDHSKGLYFKGQTIGQNLYARISAHPHDGLKNIVFYRQDYIDEFDRIWETQSRFHPELTPELRDKIRNSTIFYQRPLRSQKSLIDICEFENRKIEVVIDGVKKTKTVGLKVCPKSSPLFQQFKIWQVINNLKVNGERMEEEERKKLFGLLQFCDKMKDKEVLKRLYKHPKDLELNYKEVPGNTTMSLLFKAYSRILEASGHEDIDRSRLEYDEIIGVYEEVFSALGCKVNIFTFDAGLEGKAFEEQPLFRLWHLLYSFEGDTSVTGDRSLVEKISSLTGLPDEYSKIIAGVAFDSDYGNLSTKALRRILPFMADGLEYSCACAMAGYRHSKKSLTREELESKIYLDHLEELPKNSLRNPVVEKILNQMVNVVNGVIDEYGKPDEVRIELARELKKNAKERADLEAAISKSSKENEAIRKILTEEFGILHPTRNDVIRYRLYMELKDNDFRTLYSNTYIPQESLFSGDFDIEHIIPQARLYDDSFSNKTIESRQINIEKGKKTADDFIKDKYGDVYLADYEARVDRLYRNGVFGKSKRDKLLMTEDKIPSGFIERDLRDTQYIAKTAKNMLEDLVPAVVSTTGSITDRLREDWQLVDVMKELNWDKYERLGMTRLEMKEDGRQVRKIDDWTKRNDQRHHAMDALTIAFTKRAYVQYLNNLNARTPDKDEAGRHFDLRTLDINDLPQEERCAAVNYIARNELRKDGHGKLRFIPPMPLDEFRAEAKRQLEQILVSYKAKNKVVTRNVNRTKCKAGEKTRVQLTPRGQLHNETVYGRRIQYVEKLEKVGSSFGLQKIAAVADQRYRTALTSRLEQYGGDPKKAFTGKNALDKNPIWLDEMHATAVPVKVKTRNPEEIYTIRKKVGPDLVVDKVIDDHIRELLQARLAEYGGDPKKAFADVDSNPIWVNEAAGIAVKSVTIKGVNNAVALHSKKDKDGKVFKDADGHVMAADYVSTSNNHHIAIYRDQDGNLQENVISFFEAVARKNNGVEVIDRNYRKDEGWEFLFTMKQNEYFVFPNPETGFEPSEINLLDPDNYVQISPNLFRVQKLSTGNYVFRHHLETNVMEEKVLRNTTWKRIQTINYLKGIVKVRINNIGKIVAVGEY

SEQ ID NO: 8418 - protein, 602 aa, synthetic construct
  REGION 1..602: note = Synthetic
LFDDSFSNKTLEARSANIEKGSTTAYDYVLAKYGEHGSNGAIAYKERIDHLYKDGKISKTKHDKLLMTTDDIPDGFINRDLRDTQYIARKAREILESAVRVVVPTTGSVTDRLREDWQLVDVMKELNWDKYDQLGLTEIVKDNDGRQIRRIKDWTKRNDHRHHAMDALTIAFTRHSYIQYLNNLNARSDKGGSIYAIEKKELYRDKNNKLRFIPPMPLGEFRVEARRHLENVLISIKAKNKVVTRNVNITCGSDGKTHRTVQLTPRDQLHNETVYGHRRQCIVKEEKVGSAFNKEKINTVSNPQFREALLRRYAEFGDAKKAFTGKNSLDKNPIYLNDDHTKQVPQKVKTVTFEEVFTIRKPIDKDLNIDKVVDARIREILQQRLSEYGDDAKKAFANLDENPIWLNRERGIAIKRVTIYGVSNAIALHDRRDMQGNKILKSNGTPTPADYVSTSNNHHVAIFLDEKGNLQEHVVSFFEATERSRQHQPIVDREYNKHLGWQFLFTMKRNEYFVFPNEKTGFNPNEIDLLDPNNAAEISKNLFRVQKLTSKDYFFRLHLETNVDTPKELSGITYARLSLKGIVGIVKVRINHLGQIVAVGEY

SEQ ID NO: 8419 - protein, 690 aa, synthetic construct
  REGION 1..690: note = Synthetic
MARELKKSAKEREQMTADITRATAQQEEYRRILQDEFGMPHVSRNDIIRYRLWLELKDNGYKTLYSQTYIPREKLFSKEFDVEHIIPQARLFDDSFSNKTLEARQANLEKSDATAFDYVQSKYGEEGAKEYKERIDYLYADGVISKTKHDKLLMKEADIPEGFINRDLRDSQYIARKAREILESMVRVVVPTTGAVTDRLRDDWQLVDIMKELNWDKYDKLGLTETFKDHDGRQIKRIKDWTKRNDHRHHAMDALTIAFTQHSFIQYLNNLNARSNKSGSIYAIEQTCLYRDAHGKLRFMPPMPLDVFRAEARRQLQGILVSTKAKNKVVTRNINSIKRRGEKKQTVQLTPRCQLHNETVYGSVRCCVVKEEKISSSFTEEKIATVASPRYREALLKRLGENGGNAKKAFTGRNSLEKNPLYLNDDHTLSVPAKVKTVTYETIFTQRKPIDKDLKVDKVIDEHVKEILEARLKEFGGDAKKAFSNLDDNPIWLNRERGIQIKRVTIRGVSNAVALHDKHDVQGKPICDSEGRRMPSDYVSTSSNHHVAIFRDANGNLQEHIVSYFEATARAIQHLPIVDRDYKKAEGWQFLFTMKRNEYFVFPNEKTGFDPKEIDLLDPKNYAEISANLFRVQKLATKDFFFRHHLETSVKEEKLLFDITWKRCRSPKELQGIVKVRINNIGQIVAVGEY

SEQ ID NO: 8420 - protein, 646 aa, synthetic construct
  REGION 1..646: note = Synthetic
VSRNDIVRYKLYCELKNNGYKTLYSDTYIPQEKLFSKEVDIEHILPQARLFDDSFSNKTLEYRAVNIEKSNQTAWDYVATKYGEEGVAEYKKRVDDLLAAGAIGKSKHDKLLMKQEGIPEDFINRDLRDTQYIARKAREILEDMVPMVVSTSGAVTDRLREDWQLVDVMQELNWDKYAMKGLTEEWTDKDGRRISRIKEWTKRNDHRHHAMDALTIAFTKHSFIQYLNNLNARSDKSGSIYAIEQKELYRDNHGKLRFIMPFEGFRSEAKRQLENILVSIKAKNKVVTRNVNNARRGSGRQAKVQLTPRGQLHNETIYGSIHRYVTKLEKVGGNFDGEQIAKVANLRYREALQARLEAFGGDAKKAFTGKNALDKNPLYLKDTRTEVPLKVKTVSTETLYTIRKAVAPDLNVDKVIDAKVRNVLEERLQEYGGDPKKAFVNLDENPIYLNKAKGITIKRVAITGVNNAIALHDKKDVGGHIMLDASGRKQPVDFVNTGNNHHVAIYRDAEGILQEVVVSFYEAVARVSLGLPIIDREYHKEDGWQFLFTMKQNEYFVFPNPETGFDPQEVDLTDETNYALISPNLFRVQKLASKYYVFRHHLETAVKDVASLRDITWKRIQATNYLNNIIKVRVNHIGRIVSVGEY

SEQ ID NO: 8421 - protein, 1403 aa, synthetic construct
  REGION 1..1403: note = Synthetic
MTHRRILGLDLGTSSIGWALVDEAEVGEKSSVVKLGVRIIQYDTFTNGEGQEIKGSPADYFTAGKTVSPNAARTKSRSMRRNLQRYKLRRKVLIDTLKEYHIINDATLINESGPGSTYSTLSLRAKAATEEISLEDLAKVLVNINKKRGYKSSRKAKGTEEGSLIDGMAIARKLYEDGLTPGQYVYDVLCSGKFIIPDFYRSNLEDEFDRVWKKQREYYPELLSEELRNSLQGKNKSQTWAICQKPFNIVGVKRSLKGRDLVKDNYRLRKEAVASRISLEELAIVLQEINGQIKNSSGYLGGISDRSKILHFNNLTVGQWQMRQIDANRHFSLKNQTFFRQDYLDEFERIWSVQSSYHPELTSELKKILRDIVIFYQRPLRSQKGLVGLCEFENRVIKTMVDGREKTRKIGLKVCPKSSPLFQEFKMWQVINNLKVNGKELEQEQKERLADELSIRGRMTDKDVLKLLFKNPKDLRLNFKSVEGNDTQAALYSAYSRILVATGHQEYDFSKMPATESKEIVSSIFSALGWKTDYLTFDSTLQDPDYERQPLFRLWHLLYSYEGDKSVSGNDSLIKAVSELTGMEEDYARILSGLIFAPDYGNLSSKAMRKILPFMKDGNEYSVACAYAGYRHSAKSLTREELDAREYADHIELLPKNSLRNPMVEKILNQMANVVNEVIATYGKPDEIRIELARELKKSAEERKEMTEAIAKSTAEYEGYSKTLKEEFGIENPSRSDLIRYRLYMELKDNGFRTLYSNTYIPREKLFSKEFDIEHIIPQAKLFDDSFSNKTLEARQANIEKSNKTAYDYVSEKYGEEYLAEYQARIELLCKNGAISGTKKKKLLMTEADIPQGFIERDLRDTQYISRKAKEMLEEIVPFVVSTTGSITDRLREDWQLVDVMRELNWEKYDKLGMTYYVQDSDGRQIPKIRDWSKRNDHRHHAMDALTIAFTRRSYIQYLNNLNARIPKSTFQNTNTALEDYGISDIPRNQCTAVVMSVELNQMYRDNKGRLRFIPPMPLDEFRRVAKAKLEEILVSMKAKGKVVTRNTNVTKKRGGTNRKVQLTPRGQLHNETVYGRIVLPVYKDEKVGAGFGYEKIATVVSGRYRNALRARLDAFGGDPKKAFSGKNALDKNPVYNDQIHSEEVPLKVTTVTYQEQFTKREAVGPDLKVDKVIDKHIREILLARLYEYGMDPKKAFVNLDENPIWLNQEKGIAIKRVTVTGKNNVTPLHCKRDNTGALMLNDSGEYIPTDYISTGNNHHVAIYRDADGNLQEQVVSFLEAVTRVNLGVPVIDRNYKRDEGWTFLFSMKQNEFFVFPDPKTGFDPADYDLTDVANYPLISRHLFRVQKLATKNYCFRHHLETTVAENKALIGITYKPQLGLNGIKGIVKVRIDHLGNIVHVGE

SEQ ID NO: 8422 - protein, 667 aa, synthetic construct
  REGION 1..667: note = Synthetic
LSDIGCIKSWNPTLTILCIAIYIPAERLFSKDFDIEHIIPQALLFDDSFANKTIESRQCNIEKSNRTAMDYVKSKYDSSGVQAYIDRVKGLTGVSKTKITRLLMESKDIPEDFINRELRDSQYIARKAREILESMVKFVVPTTGSVTARLREDWQLVNVMRELNWDKYEKLGLTSFREDRDGRAIPVIEDWTKRNDHRHHAMDALTIAFTRRQFIQYLNHLNAKIDTVDKTDIDLRDYNLEDISFDGLRDGDKFGIVKALQKKYLYKDDKQKYRFVPPMPLDEFRIEAKRQIEDVLVSFKAKNKVCTKNVNTTKVRGGQQRKIQLTPRGPLHKDTIYGKRLQYVTKEEKVGGFFDEAKIASVCKKSYREALMRRLMECGGDPKKAFTGKNSLEKNPVWVDEFHSGEVPLRVRTVSMASVYTVRKSVDQSLNIEKVLDKHIREILLSRLEEYGGNASKAFSNLDENPIWLNKENGIAVKRVTIDESVNPIPLRSKRDKDGQIIYGEGQNPQESDFVATGVNHHAAIYRTPSGKLQGVVVSFYEAVSRKNLGLEVIDRNFKKDEGWEFLFTLKQNEYFVFPNPATGFSPEDYDLTDPANNAVISPNLYRVQKLTSGDYYFRHHLETTVEDNEKLRDIAWKRIRRPSDFIGAVKVRIDNLGRILAVGEYD

SEQ ID NO: 8423 - protein, 637 aa, synthetic construct
  REGION 1..637: note = Synthetic
VGIKHFILIRIFHEHIIPQARLFDDSFSNKTLEARSVNIEKGNKTAYDFVKEKFGESGADNSLEHYLNNIEDLFKSGKISKTKYNKLKMAEQDIPDGFIERDLRNTQYIAKKALSMLNEISHRVVATSGSVTDKLREDWQLIDVMKELNWEKYKALGLVEYFEDRDGRQIGRIKDWTKRNDHRHHAMDALTVAFTKDVFIQYFNNKNASLDPNANEHAIKNKYFQNGRAIAPMPLREFRAEAKKHLENTLISIKAKNKVITGNINKTRKKGGVNKNMQQTPRGQLHLETIYGSGKQYLTKEEKVNASFDMRKIGTVSKLAYRDALLKRLYENDNDPKKAFAGKNSLDKQPIWLDKEQMRKVPEKVKIVTLEAIYTIRKEISPDLKVDKVIDVGVRKILIDRLNEYGNDAKKAFSNLDENPIWLNKEKGISIKRVTISGISNAQSLHVKKDKDGKPILDENGRNIPVDFVNTGNNHHVAVYYRPVIDKRGQLVVDEAGNPKYELEEVVVSFFEAVTRANLGQPIIDKDYKTTEGWQFLFSMKQNEYFVFPNEKTGFNPKEIDLLDVENYGLISPNLFRVQKFSLKNYVFRHHLETTIKDTSSILRGITWIDFRSSKGLDTIVKVRVNHIGQIVSVGEY

SEQ ID NO: 8424 - protein, 887 aa, synthetic construct
  REGION 1..887: note = Synthetic
MSYDKTQKIVSDVFSALGAKVDFLVANSLEDSKFFALWHLLYSYEGDNSKSGQESLVVKISDLTGLPSEYSKIIAGISFEPDYGNLSAKAIKKILPFMKDGDEYSVACEKAGYRHSGKSLTKEEIESKVCKDHLESLPKNSLRNPVVEKILNQMVNVVNAIIDEYGKPDEIRIELARELKKSASERDEMTKANNAADKQNGEIKAELKRDFGISSPTRNDIIRYRLLKSNGYKTLYSNTYIPKEKLFSKEFDIEHIIPQSRLFDDSFSNKTLESKSINIEKDNSTARDYVLSKYGEARLSSYKANLDKMLNAKEISRTKYNHLLMKESDIPSDFINRDLRDSQYIAKKAKEMLEDVVKYVVSTTGSVTKRLREDWQLVDVMKELNWDKYDKLGLTSYGDGKDGQKVKKIEGWTKRNDHRHHAMDALTIAFTKRSYIQYLNNLNAHLEKVSDDLSFFKLEDYELDDLDRGDVARVVRAIQDKELHRDADKKLRFNPPMPLDEFRSEAKRQLEDVLVSIKAKNKVVTKNVNYTKSKRGDRKSQNTLTPRGALHEDTVCGRISRYATNEENVGSGFNAEKISTVANAIYRQALLKRLSEYGGDPKKAFCGANSLEKKPLYLNEMHTDYVPQRVKTVHLETLYTKRKPIDESLKVDKVIDKGIRDILKARLAEYGDSAKAAFSNLDENPIWLNREKGIAIKRVTIDASVSVVEPLHYKKDHKGNVIYDSRGERIPTDYVKYGNNHHIAIYEDTSGHLQEQVVTFYEATSRASMGQPVVDKDYRKSEGWKFLFSMKQNEYFVFPNPQTGFDPSEIDLMDPKNYAAVSENMFRVQKMSSKDYSFRHHLETSVEDKNLKTKDVVWKRVTAIDKLKGVVKVRVNHIGQIVQVGEY

SEQ ID NO: 8425 - protein, 661 aa, synthetic construct
  REGION 9..61: note = misc_feature - Xaa can be any naturally occurring amino acid
  REGION 1..661: note = Synthetic
LTTHFQTKXXXXXXXXXXXXXXXXXXXXXXXXXXXXXXXXXXXXXXXXXXXXXXXXXXXXXSNKTIELKDVNIKKGNQTAIDFVLQEYGEQELGQYHARLDNMLKNGKISPVKYKKLKMKGSEIPQDFIQRDIRDTQYIAKKAKAMLETIVRSVVSTTGSITDRLRQDWQLIDVMKELNWQKYDKLGLTEVFENEEGHQIRRIKDWTKRNDHRHHAMDALTVAFTKRSHIQYLNNLNARSDKSSSIYGIEAKELDRNEKGKLLFKPPIPVKEFRAEAKSNLESILVSIKAKNKVMTNNVNKIRKHGGHESVVQLTPRGQLHNETIYGSRLEYVTKTEKVNAGFDMEKIQSVANKKYREALMKRLEQFENDPKLAFTGKNSITKNPVWIDDMRTISVPEKVKLATLENMYTIRKEISKDLKIEKVVDKKIRKILQERLDKYQGDANKAFSNLNFDPIWLNEEKGISIKRVTISGVSNAVALRARKDHLGNKIMDEQGLSLPVDFVSTSNNHHVAIFKDGNGNLQEHVVSFFEVVERVRQDLPVIDKHFNEDEGWQFLFSMKQNEYFVFPNEQTGFNPIDKDLLDENNYPAISQNLFRVQKISTKNYMFNHHLETKAVDGEMLKNKKQLVDITFKSIRTPANLEGIVKIRINHIGKIISVGEY

SEQ ID NO: 8426 - protein, 727 aa, synthetic construct
  REGION 1..727: note = Synthetic
MVNVINAIIEAYGRPDEIRVELARELKKNAKEREKLTKSIAETTKTHEAHKKLLQEEFGLKNVGRSDILRYKLYKELESRGYKTLYSNTYIPREKLFSKEFDIEHIIPQARLFDDSFSNKTLEARNVNIEKGNRTAYDFVKEKFGESGTDNSLDCYLNNIEVLFVSGKISKTKYTKLKMTEQDIPGGFIERDLRNTQYIAKKALSMLNEISRCVVATSGSITDKLREDWQLVDVMKELNWEKYKALGLVEYFEDKDGKQIGRIKDWSKRNDHRHHAMDALTVAFTKEVFIQYFNNKNASLNPNTNEYAIKNKYFQNGRAIAPIPLNEFRAEAKKHLENTLISIKAKNKVITNNINKRKKRGGVNTKKQQTPRGQLHLETIYGCCRQYLTKEEKVNASFDVSKIATVSSSVYRDALLKRLQEHHNDPKKAFAGRNSLDKKPVWLDKEQIRKVPEKVKTVTFETIYTIRKEISPDLRVDKIIDSGVRKMLTGRLKEYGNDAKKAFSNLDEKPIWLNKEKGIPIKRVTISGISNAQSLHVKKDKDGKPVLDGNGRNIPVDFVNTGNNHHVAVYRRPVIDKNGQMVIDENGNLKYELEEVVVTFFDAVTRVNLGQPIIDKDYKASEGWQFLFSMKQNEYFVFPNKKTGFNPKEIDLLDADNYGLISPNLFRVQKFTHKNYVFRHHLETTIKDTSSILRGITWIDFRSSKGLDSIVKVRVNHIGQIVSVGEY

SEQ ID NO: 8427 - protein, 726 aa, synthetic construct
  REGION 1..726: note = Synthetic
MAMLEIKDLEVYYGVIQAIKGISFDVNEGEVIALIGANGAGKTTTLQTITGMLSAKKGSILFEGTDITKVPGHKIVSMGMAHVPEGRRVFAELSVYENLKLGAYTRKDKQEIAESLERVYKSFPRLKERKNQLAGTLSGGEQQMLAMGRALMSKPRIILMDEPSMGLSPIFVEEIFNIIKEISASGTTVLLVEQNAKKALSMLNEICRRVVATTGAITDELREDWQLVDVMKELNLPKYEALGLVERFEDKDGRIIKRIKDWTKRNDHRHHAMDALTVAFTKDVFIQYFNNKNAAWESDCKEHANIIGIKTRYFESGRAVPPMPLGQFRVEAKSHLENLLVSIKAKNKVVTTNVNCIRKKGGISEKHQQTPRGQLHLETIYGSHKQYVTKMEKVNASFDAAKIATVSRQNYRNALLRRLEAFGNDPKKAFTGKNTLEKNPVYLDRAQTMRMPDRVQTVEFEAVYTIRKPIDSNLNVEKVVDAKVRAILEQRLEEYGGDAKKAFVNLDENPIWLNQEKGISIKRVSIRGINNAQSLHVKKDKNGNPILDENGKQIPVDFVNTGNNHHVAIYRKPVLDKKGQVMFDEDGNLMYELDEVVVSFFEAVTRANLGLPIINKDYRRSEGWQFLFSMKQNEYFVFPNEKTGFNPKEIDLLDPDNYAVISPNLFRVQKFSTKNYCFRHHLETDVQERKALLGITYKWQLGLKAIKDIVKVRINHIGQIVSVGEY

SEQ ID NO: 8428 - protein, 784 aa, synthetic construct
  REGION 1..784: note = Synthetic
LRKSSPPFHSNRTTLASHHLHRSSGLPYEYAGYRHSKQSLTKEEIENKVLKDRLDQIPKNSLRNPVVEKIFNQMVNVINTVGDRYGKPDEIHIELARELKSSQEERARATESIASNNKENDRIRMILENEFHLAYVSRNDIVKYKLYEELKNNGYKTLYSNQYIPADKLFSREIDIEHIIPQAVLFNDSLSNKTLEFRDINLEKGKDTAFDYVKNKYGESGLEDYKLRVNHLFESGGISRTKRDNLLRDSKNIPEGFVERDLKDTQYIAKKAREILLEYVRVVVSTSGSITDKLREDWGLVNVMKELNMPKFEAAGFVETITTSDGKDIRKIKDWTKRNDHRHHAMDAITIAFTKLAHIQYLNNLNAKGDKSSSIYAILQKETYLSGSKRLIIPPLPLDQMRREVRRQLESILVSIKAKNKVMTENINRIRIKDGVKNVKCLTPRGLLHKEQVYGQRKRYETYDVAVNGKMTEDVIATVASSETKAALALRLAQFKGDPKKAFTGANSLDKNPVWLDANHSRKVPAKVKCVRFVNVYSIRKNIDPSLSVEKVMDGRVRRILKDRLAEFGNDPKKAFVNLDENPIWFNKEKGIILKSVTIAENFDLDPIRIKRDNLGRVICDAEGNHIPSDYVNFRNNHHAAIFEDADGNIQEHIVSFYEAVRRRSAGLPVVDKEYNADKGWKFLFTMKSNEMFVFPNERTGFDPRAVDLMDPENYSVIGPNLFRVQAVSTRDYWFRHHLETSLGADKKLKDITWKRITNIAIFKQLVKVRINHIGEIVSVGEYD

SEQ ID NO: 8429 - protein, 686 aa, synthetic construct
  REGION 1..686: note = Synthetic
VREEPASIAKATKENAEIEKILRQEFGLSYVSRNDIVRYKLYEELKENGYKTLYSNTYIPKEELFSKAFDIEHIIPQARLFDDSFSNKTLEARQVNIEKKDRTAWDFVNDCYGSEGAALYRCRVDELFNKGIISKDKHKYLLMPGDKIPEDFINRDLRNTQYIVRKALELFEDFVPGVLATSGAITSRLREDWGLVNVMKEMNLPKYERQGVVETCSDREGHVFKRIQDWTKRNDHRHHAMDALTIAFTKRAYIQYLNHLNARKDVTSQAYAIQQKEMECDGDHRWRFKCPFGDRSRFRREAMRQLDQILVSIKSKNKVLTPSLNRSKKRGGYNRKIEWTPRGPLHKETVYGRIRRYVTKNVRVGSSFTQAEIEKVANTCFRRALLARLAEFGGDPKKAFTGKNSLEKNPLYCDEAHTQTVPLLVKLVELEEVGTIRKEITPDLKVEKVVDRRIRTLLEERLALYGQDAKKAFSNLGENPIWLNQEKGISVKRVTIIDKSDVVSIHEKRDVDGRLMHDEHGRTIPCDYVQTQNNHHVAIFCDAEGNLQEHIETFFDVVERVRQQRIEGRTVEVIDKNYKRDEGWRFLFSMKINEYFVFPDEKTGFDPRSVDLMDPANYALVSPHLFRVQNLSSKYYVFRHHLETTVEDTKALKDVTWKRVRTLGKLKNIVKVRVNHIGQIVAVGEY

SEQ ID NO: 8430 - protein, 510 aa, synthetic construct
  REGION 1..510: note = Synthetic
LAACECDAGAELGLTGVREDKDGRRIPFIQDWTKRNDHRHHAMDALTIAFTRRQFIQYLNHLNSKIDVVSWDKKDLDLRDYDLEDIKFGNLSAGDRYGIVKALQDKFLYKDGDDKYRFVPPIPLDEFRRQAKEQLSDILISFKAKNKVCTRNVNVTKNKGGANRKTQLTPRGPLHNETIYGSSLEYVTKENEKIGSSFDAERITTVCKKKFREALARRLEEFGEDPKKAFTGKNSPEKNPIWVDEHHSEQVPAKVRTVTMGQRFTGRKPIDATLKIEKVIDKRIREILQARLDEFDGKAAKAFSNLDENPIWLNKEKGIAIKRVTVSGPANPVPVRFKRDKDGKPIIDDAGKTIGADFVTPGNNHHIAIFRDSSGKLQEHPVSFLEATIAKSHGLDVIDRNYNKDEGWEFLFTLKQNEYFVFPNSETGFNPLDYDLTDPRNYAEISPNLYRVQKIATGDYYFRLHLETTVEDNKALKGITWKRVGPSGLEGAVKVRIDNLGRIVAVGEYD

SEQ ID NO: 8431 - protein, 600 aa, synthetic construct
  REGION 1..600: note = Synthetic
LFDDSFSNKTLETSGVNKDKGDMTAYDFVAMKHDEKYLADYEARVNELFKQKKISKAKRDKLLMREADIPKDFLNRDLNDTQYIAKTAREMLEDIVPEVLTTTGKITSRLREDWGLVDVMKEINWDKFDKLKMTVTEHDRDGRPIKRIMDWTKRNDHRHHAMDALTIAFTKRAIIQYLNNVNARSDKGSSIYGIEKKYMKRNERGRLVFVPPMPSGKLREEARRQLDMILVSVKAKNKVVTKNINKTKKNGGVNKKEQLTPRGKLHNETVYGKISRYQTEMKRVGGSFTEDVVLSVADKRIREALYERLAEHDFNPKEAFTGSNSLTKKPLWLDKEHSRCVPEKVKTVILEPICTIRKPVDKDLNIDKVVDVRVKEILKQRLKEYGGVAAKAFSNLEENPIWLNREKGIAIKRVKILDSKNNVAIHGKHDIAGRPMLDEDGKPVGNDYVNTSNNHHVAIFTDSEGNLQEHVVSFYEATAMAILGYPVVDRQYNKGLGWKFLFSMNQNEYFVFPNEAEGFDPNEIDLTDESNAAIISRNLFRVQKFSKGDYFFRHHLETNVETNLKLKNVTWKRITRLNDLIGVVKVRVDHIGRIVYVGEY

SEQ ID NO: 8432 - protein, 560 aa, synthetic construct
  REGION 1..560: note = Synthetic
MEQKDIPDGFIDRDLRNTQYIAKKALAMLNEICRRVVATTGSITDQLREDWQLVDVMKELNLPKYEALGFVETYEDKDGRKIKRIKDWTKRNDHRHHAMDALTVAFTKDAFIQYFNNKNAAQDSGNRNHTNIIGIKTRYFDKGRALPPIPLEQFRIEAKQHLEKLLVSIKAKNKVVTVNVNRTKKRKGENTKIQQTPRGQLHLETVYGSHKQYVTKIEKVNASFDAAKIATVSKRAYRNALLKRLETFGNDPKKAFTGKNALEKNPLYADKYQTIRVPEKVQTVEFETIYTIRKPVDPALNVDKVVDVKVRAILERRLKEYGGDPKKAFVNFWENPIWLNKEKGISIKRVSIRGINNAQSIHVKKDKNGNPIWDENGKQIPVDFVNTGNNHHVAIYRKPVLDKKGQVTFDEDGNLMYELDEVVVPFFEAVTRANLGLPIIDKDYRKSEGWQFLFSMKQNEYFVFPNEKTGFNPKEVDLLNPDNYAMISPNLFRVQTMSKVMYGNNVVRDYKFRHHLETTVKDMKELKDIAYKQYKTLSFGNSVVKIRINHIGQIVSVGEY

SEQ ID NO: 8433 - protein, 1051 aa, synthetic construct
  REGION 1..1051: note = Synthetic
MTHSFSFVKKGVAMKDEDLILGLDLGANSLGWSLIRGQKSLVAWGVRIFKAGLEDMQVDGTGKPPNQERRQARLRRRQVERRARRLAHVARLLQRSKLLPPGDIEAPQQRHSLFSNLDSHLMSDKERLRDLGALDENGLREKLQAGPCYLLRAAALDKPLKPYELGRAVYHLAQRRGFLSSRKALRKDKKEEGKVKKGTTELQKNIQQAGCRTLGEYLYKVAPAERLRERYTSRAMYEEEFETIWKAQAPYHQGILTEELKEKLHHAIFHQRPLKRPQVGTCQLEPGRPRAPWALLSAQRYRFLQRLNDLRIMDDGGQQRKLTPEERQTLIKELERKRELGFERIKKLLSLPQDYSFNLQRGGEERLLGNSTAASLRKIFTPRRWDALSHEDKDRVVEDLLSIEKEETLKRRAVRHWGLTEEAAEELCQLELEKGYCSFSRKALRKLLPLLEQGTSLQEAIKELYPGHKRAQEGRDLLPPVREALSGVRNPVVERSLTELRRVVNALIKRYGKPDIIRIELARELNPAKRRKDIWRRMRQQEKRREEAANKIVQEAGIQNPSRRDIEKYLLAEECNWRCPYTGRGISLSALLGPQPQFDVEHIIPYDRCLDNSFLNKTLCHVEENRRKHDRTPWEAYAHNPERYQEILQRVKTFRGPAAREKLMRFQLHGEELEEFIENFKARQLNDTRYAARLAIQYLGLLYGSPEGIDPEGRRRVQAVPAGQIVAQLRDAWGLSRLLSSSGSKTRDDHRHHAVDALVVALTTPREVKALSEAAKRAKGRGRLLSYMPEPWRGFHDQLAKALQHLVVSHRVCKKLRGALHNETFYSNRVDKEGKFTVKRKPLWELSGSDIERILDKAVRQAVEEKLRSLGIDTKKDKFKKVKALQDNPPVLKNGKPVRRVRFRVNLEVVPIGSGPHVRHVVPGNNHHMEIVLDQRTGKWEGHVVSLLEATKRKKQGLEVVKRDHGEGKKFLFSIAPGEVLEMDTPEGGRGLYRVRTVPQNKQLYFVPIYDARPVKKIGKKGLTAHPDTLREKNCQKVVITPLGEVRYAND

SEQ ID NO: 8434 - protein, 1158 aa, synthetic construct
  REGION 1..1158: note = Synthetic
MKNILGLDLGSSSIGWAVIHEDDTHGELVTMGSRIVQLSPDELSSFTQGNGVSVNAQRTQARGQRRGYDRYQLRRALLVEKLRELDMLPDVSLTGLPKLELWGLRARAVTERIGLRELGRVLFHLNQKRGYKSTKSDFSGDKKTTDYVKTINNRYDDLQAAGLTVGEHLYRELSANPFYRCKEQVYPRRAYVEEFDRIMACQQAYYPSLLTDEQIRCLRDEIIFYQRPLKSCKHLVSVCEFEKRRYVNAAGKEVEAGPKVAPRTSPLFQLCRMWESINHIVVRNRQNEILEISLEQKNQILAFMNTHEKLRITNLLQLLGLPKSGGYRFGDQFKAGIQGNKTRIDIATALGDYPDKERLLQFNVREISSSMVDEETGEILPIIDPSFEQEPLYRLWHVLYSIDDRDQLQAVLRRQFGIDDEEVLARLSALDFVKAGFGNKSSKAMRRILPFLRLGLNYADACAAAGYNHSNSMTKAENEARELLDRIPAIRKNELRQPVVEKILNQMVNVVNALMAKYGRFDEIRVELARELKQSKEQREKSYKSMLSTQRENERIAARIAEYGVVTRSRIQKYKLWEETDHCCIYCGQPVDVHDFLQGFGVEIEHIIPKSLYFDNGFANKVCACRRCNSEKGNSTAYDYMSHKGASLFQAYVDRVNDLKSRNKISENKMKNLLTKVENIPDDFIARQLKESQYIARKSRELLSMVCCQVTATSGSVTDFLRHTWGWDTVLHDLNLPRYREAGRTEIKEVQHKDKEQIVGWTKRLDHRHHAIDALTIACTKQGYIQRLNNLSALGKKAEGEEAASGSENGSQNLERYIQAQPHFSVAQVREAADRILISFKAGKKSVTPGKRYIYKNGKRVVAQRGLLVPRGALSEESVYGVVRLWEKDDRGNRVQVQRAVLKYPVTSIDSKSLDKVFNKGIREILSNRLEQYGNDPKKAFATPVYSDAEGRRPIRTVRCLARPAVDTLVPLRYDRDGKPIAWVNPGNNHHVAIYRDEAGKYREQVVTLWNVVDRRRAGLPAIITDPRAVWDSVLQRTDLPEPLLKSLPDVKWQFVLSLQQNEMFVLGMSDEDFRYAMDHHDYALLNKYLYRVQKVSKGDYFFRFHVETMVDDKYDGKTNMALSIRMGKLKRVSVKSLLSLNPYKVHLSVLGEIDEVL

SEQ ID NO: 8435 - protein, 1152 aa, synthetic construct
  REGION 1..1152: note = Synthetic
MKMILGLDLGTTSIGWAVVSEDDQTFRLDSLGSRIIPLTTDDANEFLSGNAISKNAKRTQRRTQRKGYSRYQQRRALLQQFLQQHAMLPDESLKGLNKLSLWGLRTRAVSEQLSLPELGRVLYHLNQKRGYKATKADYDADGDKKQGEYVKAVMGRHRMITERGITIGQLFFEKLSEDPSYRIKEQVFPRRAYEEEFDRIVACQRQFYPTLFTEENIDTLRNRIIYYQRGLKSCKHLVSLCDFEKRAYLNAAGKTVFNGPKVAPKSSPLAQVCKIWESVNNLTLKNRRGETLEIAPEERRALFEHLNTHDKLTLTDLYRILGIRKTDGWWAGKAIGKGLQGNTTRNALRKALAGQYDELLRFNLTTVETNQVDAETGEIIQMVSESYLDEPLYRLWHAVYSIPDQEDLSKTLQKQFGITDPEVVENLFAIDFVKAGYANKSAKAMRRILPYLELGLKYAEACEAAGFRHSESLTVQERETKTLLPKLRQIEKNELRQPVVEKILNQMVNVVNALMDRYGHFDEIRVELARELKQSRDERNETTKRIDKNERENRAVAEQIATDYQLTPTRNRIRKYKLWEESGHVCIYCNSVINASEFLQGVDSEKEHIIPRSLFFDDSFSNLACSCRKCNAAKGNRTAYDFMQQKSEAEFADYLDRVEKLYKEKKISKTKYERLLTPESKIPTDFIDRQLRESQYIARKAREILSGVCRQVTATSGSVTGFLRRTWGWDRVLHDLNFDRYRAAGLTEIKDREHNGRHWQEEEICNWNKRLDHRHHAIDALVIACTKQGYIQRLNTLSQWKDVSFAPTEAQGEVYRTKRSKLEKYIVAQPHFSVQEVQQAVRSVLVSFKAGKKAASTGKRYSYRHGKRVLMQQHILIPRGALHEESVYGVVNRYAKNRRGETVIKQKSVLRYPLASIERNQINSIVDSGMRKLVQQRFDRHPGSDKEVWKDLQNDPLLFNGVPVKSVRRMARPDVSSLIHLHRGGYVLPGSNHHIAIYRDREGKLYEHCVTFWQAIERKRYGLPVVITHPEEVWNRLPEGVPDTLMEQLPLPEYSFVVSLQQNEMFVIGMAPELFEEAMRNQDYALLGQYLYRVQKLSSNDYWFRLHVETGTESEKSDSLAKKFYRFKSLKAFFAANPTKVRISLLGEISKV

SEQ ID NO: 8436 - protein, 1141 aa, synthetic construct
  REGION 1..1141: note = Synthetic
MKNILGLDLGSGSIGWSVIQEGENNRTILGMGSRIIPLSPDDTTQFTQGKSITKNADRTAFRTQRKGYDRYQLRRHYLTQYLHKLGMLPDERLIKLPQTELWEIRAKAVNEKIELPELGRVLYHLNQKRGYKSGKSDFQDKKSSKYLSEVSERYKELQERDITIGQKFYAELKADPTYRCKDRVYPRIAYIEEFDRIMECQRTHHDILTDEHIAHLRNHIIYYQRPLKSCKHLVGECSLAQMTYRLPDGSIKSRPIKVAPKSSPLFQVCKIWESINHINLQRDRERFEITPAHRQALFTHMNSKEKLKINDLYKILGIKKHDGWWGGKAIGNGLQGNTTVIALQNALTGYSRADELLRFELKTCEIEIADPETGEIATQLIIDPAFEQEPLYRLWHTLYSISDTDVLDRILERKFGIKDPKMREKLTQIDFTKSGYGNLSSIAMRRILPYLRQGYVYSEACFMAGYNHSNSITREENLARELAEHLRPITKGELRQPIVEKILNQMVNLVNALIDRYGRFDEIRVELARELQQSREERDKTYKKQLDNQKRNEEIRHHIEEMDLTPTRSRIQKYRMYEESHHLCIYCGQPVGLAAFLQGYDTEVEHIIPRSLYFDDSYNNKVCACRACNQAKNNRTAYDYMSSLPEETFHRYLDRIKNMHDNKEISDTKYKYLLTKGDEIPQDFLNRQMRESQYISRKAIAMLQEVCHHVYATSGSVTAYLRHVWGWDNVLHDLNRERYRAGGLTEMREIDNRTVECIKDWNKRLDHRHHAIDALAIACTRQGYIQRINTLSKQAEEGDLVSLERYIRQQPHFSYAEVCAAAEKILVSFKAGKRVATKGKRYIYRGGKRILAQEDITVPRGTLSEQSVYGQIAQYRKDKKGKISFSYESVLKYPIESIDTKTLPDVVDAGIRRILQQRLDEHGGNAKKAFATPVYTASGHLIRTMRCFTRLKAIVPVKYDASGKAVGFVKPGNNHHVAIYIDRDGKPQEHIVTFWHAVERKKYGLPVIIERPGEAWDAATDAMPDSFLEQLPDATWQFRLSMQQNEMFILGMPDELYADALENRDYALLGKFLYRVQKISTKYYCFRHHIETSVDDKYNGKKNEKLSTQMGKYKLISSISALYSQHPHKVKISLTGEICEI

SEQ ID NO: 8437 - protein, 1139 aa, synthetic construct
  REGION 1..1139: note = Synthetic
MKNILGLDLGSGSIGWAVIKEDENNRVIMGLGSRIIPLSVDDATQFTQGKSITKNADRTAIRTQRKGYDRRQLRRQALTQYLHMLGMTPDETLIKLPRQELWALRAKAVTENISLPELGRVLYHLNQKRGYKSGKADFQDKKSSAYLSAVSDRYKELQECGLTIGQKFHAELKADPTYRCKDRVYPRQAYIEEFDRIMACQRHYHDTLTDEHIDNLRNRIIYYQRPLKSCKHLVGKCTLAQMVYTLPDGSTKSRPVKVAPKSSPLFQICKIWESINHLTLQRGRETLEITPAQRQAIFSHMNNNEKLKLTDLQKILGITKRDGWWAGESMKAGLQGNTTVVALQKILKTHPDAEALLRFDLHIRTVEMADPDTGEIASQLVVDPAFEQEPLYQLWHTLYSVSDIDTLDRILEKKFHIDDAAIRGELIKLDFTKAGYGNLSSLAMRRILPYLRQGYVYSDACFMAGYNHSRSLTREENLARELSTHLAPLSKGELRQPIVEKILNQMVNVVNALVDRYGPFDEIRVELARELQQSREIREKTYKNNLNRQKENEKAAQRIIEEGVTPTRTGIQKYRLYEESHHRCIYCGKDISLKAFLSGYDTEVEHIIPRSLYFDDSFNNKVCACRACNQAKNNRTAYDYMSSLPDEKFQDYLSRIKEMLEKQEISKDKYKYLLMPEKEIPQDFLNRQMRESQYISRKALAMLHEICHHAYATSGSVTAFLRRVWGWDTVLHDLNIERYRAGNLTEMRTINNRPTECIKDWTKRLDHRHHAIDALAVACTRQGYIQRINTLANHKDEELSLERYIQQQPHFSHAEVSAAVAKILVSFKAGKRVATPGKRYIYRGGRRILVQEGIVVPRGALSEQSIYGEISQYTKNKKGKVSFREEYVLKYPVEGIDAKTVGSVVDAGIRRLLQQRLDEYGGNAKKAFATPVYTTNGFPIRTVRCFTGLKAVAPVRYNASGEAIGFVKPGNNHHVAIYADRDGNLHEHVVTFWHAVERKIHRLPVVIEHPDAVWDSLPDGLSEEFMQQLPDATWQLQLSMQQNEMFILGMPDDLYADAMENRDHALLSRYLYRVQKLAMKNYAFRLHIETSVDDKYDGVKNEMLSRQMGKLKLIQSIGALYAQNPHKVHISSTGEIDEA

SEQ ID NO: 8438 - protein, 1160 aa, synthetic construct
  REGION 1..1160: note = Synthetic
MKNILGLDLGSSSIGWAVVREDEDNRELVSMGSRIVQLSAEELSSFTQGNGESVNAQRTQTRGQRRGYDRYQLRRSALIEKLRALGMLPDASLRGLPKLQLWGLRSRAVTEQIALPELGRVLLHLNQKRGYKSTKSDFSGDKKTTDYVKTILNRYDQLTAEGLTIGQHLFKALSADPFYRCKEQVYPRKAYVEEFDRVMACQRQFYPQVLTDENIRSIRDEIIYYQRPLKSCKHLVSLCEFEKRAYVNAAGEKVFSGPRVAPRTSPLFQLCRLWESINHIEIRDRRNEVLVISLEQKKRILEFMNTHEKLKIGDLMKLLGLPKSGGFRFGDQFKAGIPGNKTRIDIAKALGDYPDQEHLLQFNVRETTSTLVDEETGEILPIIDTSFEQEPLYRLWHVLYSIDDREQLQAVLRRQFGIDDEEVLARLSKLDFVKAGFGNKSSKAMRRILPFLQLGLNYADACAAAGYNHSRSETKAESEARQLLDRLPAIRKNELRQPVVEKILNQMVNVVNALMARYGRFDEIRVELARELKQSKEEREKSYKSILRTQRENERIAARIAEYGTATRSRIQKYKMWEETEHRCIYCGQPVDVSDFLRGFGVEVEHIIPRSLYFDNSFMNKVCSCRRCNSEKGNRTAYDYMASKDAESFQNYLGRVNDLLDRGKILKPKWRNLLTPGKDIPKDFIDRQLRESQYIARKARELLSMVCRQVTATSGTVTDFLRHTWGWDTVLHDLNLTRYQSVGLTEIKEVQHNGSVMKQEQIVGWTKRLDHRHHAIDALTIACTKQGYIQRLNSMNAQSKVEGEEGEEDVRSQNLERYIQSQPHFTVAQVREAADKILISFKSGKKSVTPGKRYIRKKGKRVVAQRGLLVPRGALSEESVYGVIHRWEKDKQGSPVQVPYAVLKYPVASIDPKSLDKVVDEGIRQILSDRLAQYGDDPKKAFATPVYSDAEGRVAIRTVRCLARPAVDTLVPLRYDEEGNPIAWANPGNNHHVAIYRDESGKYQEQVVTFWSAVDRRRAGLPAIITQPRAVWDSVLQRTDLSEAFLKTLPDVKWQFVLSLQQNEMFILGMSEEDYRYAMDHRDYALLNKYLYRVQNISSMYYCFRYHIETTVDDKYNGKRNDALSIRMGKLKRIVSFTSFFSQNPHKVHLSVLGEIDEAL

SEQ ID NO: 8439 - protein, 1159 aa, synthetic construct
  REGION 1..1159: note = Synthetic
MKYNLGLDLGSGSIGWAIISKDEATKEIKIVDLGCRIVPIEGPDITKFNQGQAYTKNAERTIKRTIRKGYFRFKMRRDRLTQLLRKLNMLPDEDLIKLPQLKLWELRSKSVKEKISLQELGRVLYHLNQKRGYKASKSDLSNSDKKIGEYVKSIKNRYDLLHERNETIGEYFYSKLKENEYFRCKDNIFPRAAYLEEFDAIMNCQRKFYPEILTQEVFGTFRNEIIYYQRNLKSCKHLVSICEFEKKEYINKYNGEIVISGPKVAPKSSPIYQVCKLWESINNIILKNKTNASYNISLEYKKDIFDFLQTHESLKVNDLYKILGIKKNEGWWGGKAIGKGIKGNTTLLQISNALCNKYPELLRYDLTIDSTSCYDRETGEVYDVISPSCEEEPLNQLWHTLYSISEKDELENVLRKKFGIKEDYILNNLFALDFVKAGYGNKSTKCIRRILPYLQLGSNYSDACAKAGFRHSESLTSEENLSRILSDRLEYIQKNSLRQPIVEKILNQLVNVVNALMEKYGQFDEIRVELARELKQSREERKLTFKEMNKNQKQNDEFAKLIQEDEKLTPTRTRIQKYKLYRESGYKCMYCGAQLSLHDFLQGFDAEVEHIIPKTLLFDDSFSNKVCSCRKCNQEKNDRTAYDFMKSKGDVIFDDYIRRVNELFKIGKITKPKFERLMTPKDKIPTDFINRQLRESQYISRKAMELLRGVCRNVYATSGSVTDFLRHTWGWDNVLHSLNFDRYKAGGLTEVVEVNHNGCKYQEERIIAWSKRLDHRHHAIDALVIACTTQGYIQRINNLSTLKDNEFKSLEYQSDDQKQRHSSLEKYILSMPHFTTAEVSSAVSRILISLKPGKKVVTKGKRYIFKGGKRKLVQENILIPRGALCNETIYGRIKRYKKNKSNVNFEDKYVTKYQLAEIDRKKIDSVIDSKVKKIIENRLKEYGYDVHKAYAEPLYYDDVHKQPIKSVRCITGLSAVVPLRYNDNGEPISFVKPDNNHHIAFYIDEDGNYQEHVVTFWEAVERRKYGMPSIIDNPQRLWDEIQQSDIIYPDPFLISLPDQKWSFKMSLQQNEMFVLGLSEDEFKDAIKTNDLSTLSSHLYKVQNISNKTYRFNLHTQTQFDLYQAGKPDKRYYNFSSIKSLFGMNPHKVRINVLGEIKDS

SEQ ID NO: 8440 - protein, 993 aa, synthetic construct
  REGION 1..993: note = Synthetic
MRLTIGELFFRRLTENAFFRCKEQVYPRQAYVEEFDCIMNCQRKFYPDILTDETIRCIRDEIIYYQRPLKSCKYLVSRCEFEKRFYLNAAGKKTEAGPKVSPRTSPLFQVCRLWESINNIVVKDRRNEIVFISAEQRAALFDFLNTHEKLKGSDLLKLLGLSKTYGYRLGEQFKTGIQGNKTRVEIERALGNYPDKKRLLQFNLQEESSSMVNTETGEIIPMISLSFEQEPLYRLWHVLYSIDDREQLQSVLRQKFGIDDDEVLERLSAIDLVKAGFGNKSSKAIRRILPFLQLGMNYAEACEAAGYNHSNNYTKAENEARALLDRLPAIKKNELRQPVVEKILNQMVNVVNALMEKYGRFDEIRVELARELKQSKEERSNTYKSINKNQRENEQIAKRIVEYGVPTRSRIQKYKMWEESKHCCIYCGQPVDVGDFLRGFDVEVEHIIPKSLYFDDSFANKVCSCRSCNKEKNNRTAYDYMKSKGEKALSDYVERVNTMYTNNQISKTKWQNLLTPVDKISIDFIDRQLRESQYIARKAKEILTSICYNVTATSGSVTSFLRHVWGWDTVLHDLNFDRYKKVGLTEVIEVNHRGSVIRREQIKDWSKRFDHRHHAIDALTIACTKQAYIQRLNNLRAEEGPDFNKMSLERYIQSQPHFSVAQVREAVDRILVSFRAGKRAVTPGKRYIRKNRKRISVQSVLIPRGALSEESVYGVIHVWEKDEQGHVIQKQRAVMKYPITSINREMLDKEKVVDKRIHRILSGRLAQYNDNPKEAFAKPVYIDKECRIPIRTVRCFAKPAINTLVPLKKDDKGNPVAWVNPGNNHHVAIYRDEDGKYKERTVTFWEAVDRCRVGIPAIVTQPDTIWDNILQRNDISENVLESLPDVKWQFVLSLQQNEMFILGMNEEDYRYAMDQQDYALLNKYLYRVQKLSKSDYSFRYHTETSVEDKYDGKPNLKLSMQMGKLKRVSIKSLLGLNPHKVHISVLGEIKEIS

SEQ ID NO: 8441 - protein, 1196 aa, synthetic construct
  REGION 1..1196: note = Synthetic
MTKDGLVDENLRTGEQKSATVAEKPEQEDSAEETAEKETDEKPIVEEERCMEAEDREDAPRHHSTAKQSADYYKAHQEDGKPKDASAESDAEPPTKKGRLSFEDEKGGIVRGMGMGVKKVAKKGVDTATGFAHQKVHQVEKDNSGVEAAHKSEEAAERLHHFVKGRKKPKDKSARAEKRGGEDQKSSRLKFSESEGGTAENAAEPQLKKKQPQPPPTAAGGEAKTVGAKFYQKKQYKDAYAAAKRGQKAGTAASKQAAAATNTITEKAKAAVQEIVVQHKTLWVGIGVGILLVMVMLGAFSSCGAAIQGTGSTFVGTTYPSKDADMKGAEEDYLELEKELDKQIRQMESTHPGYDEYRYQLDEIGHDPYVLISILSAMHEGVFTYDEITDELAALFEKQYTLATEVITETRYRTETREGTRSFTDPETGEIATQLIIDPAFEQEPLYRLWHTLYSISDTDVLDRILERKFGIEDPEMREKLTQIDFTKSGYGNLSSIAMRRILPYLRQGYVYSEACFMAGYNHSNSITREENLARELAEHLRPITKGELRQPIVEKILNQMVNLVNALIDRYGRFDEIRVELARELQQNREERDKTYKKQLDNQKRNEEIRHHIEEMYLTPTRSRIQKYRMYEESHHLCIYCGQPVGLAAFLQGYDTEVEHIIPRSLYFDDSYNNKVCACRACNQAKNNRTAYDYMSSLPEETFHRYLDRIKNMHDNKEISDTKYKYLLTKGDEIPQDFLNRQMRESQYISRKAIAMLQEVCHHVYATSGSVTAYLRHVWGWDNVLHDLNRERYRAGGLTEMREIDNRTVECIKDWNKRLDHRHHAIDALAIACTRQGYIQRINTLSKQAEEGDLVSLERYIRQQPHFSYAEVCAAAEKILVSFKAGKRVATKGKRYIYRGGKRILAQEDITVPRGALSEQSVYGQIAQYRKDKKGKVSFSYESVLKYPIESIDTKTLPDVVDAGIRRILQQRLDEHGGNAKKAFATPVYTASGHLIRTVRCFTRLKAVVPVKYDASGKAVGFVKPGNNHHVAIYIDRDGKPQEHIVTFWHAVERKKYGLPVIIERPGEAWDAATDAMPDSFLEQLPDATWQFRLSMQQNEMFILGMPDELYADALENRDYALLGKYLYRVQKISTKYYCFRHHIETSVDDKYNGKKNEKLSTQMGKYKLISSISALYSQHPHKVKISLTGEICEI

SEQ ID NO: 8442 - protein, 1195 aa, synthetic construct
  REGION 1..1195: note = Synthetic
LNRIPNIFYFCPYSINITFLMKKILGLDLGSASIGWAVVRENSEELLTEDASGSTAPNDAIVALGSRIIPLTTDESTGFSKGSALTKNADRTQKRTQRKGYDRYQLRRGLLLQELSRLGMYSGQTLRLSTLGLWELRAKAVTEQVSLPELGRVLCHINQKRGYRTVKSDFEDKKQGKYVEAVVGRYRELHAQGLTVGQYLYKELSSDSAFRCKDRVYPRAAYVEEYDAIMDCQKRFYPEVLTGEVIAHLRDYIIFHQRPLKSCKHLVTRCELERREALIGGRIRNCGPRVAPRSSPLFQVCKLWEMINNLRIENKEGDIFVLTLEKKQALFAFMNTHAKFTAAKLTSVLGLKSRDWKIANAIGTGLQGNTTYCALSAALEKCPDRGKLLAFELHAVDGDKVHADTGEIVQVIDTSFEKQPLYRLWHALYSISDIDTLREVLGQNFRIADPETLDRLCRIDFVKSGYGNKSSRALRKILPYLQQGMQYYQAKCMAGYDDAPWNKEQNQARELAERLLPVPKGELRQPVVEKVLNQLVNLVNALMAEYGPFDEIRVELARELQQSREERESASRSMAENNKRNEQVAQKIQQEYGLTPTRSRIQKYRLWTESDHQCMYCGQLVNVAEFLRGVDVEVEHIIPRSMLFDDSYSNKVCACRKCNKDKNNRTAFDFMKTKPEGEFAAYLERVNSLAEAYKPNRGLDVGISETKKRKLLMRKQDIPTDFIARQMRETQYISKKAKEMLQTVCRNVYSTSGSITDYIRHVWGWDDVLHEINFEGYRAAGLVQTCEREVDGRKQQVERIVDWSKRLDHRHHALDALVIACTKQGYIQRINNLASLGEITFRSDAGKAPSGASRERHTRLERYIRMQPHFSRAEVIRAVKGIAVSFKADKRTVTPGKRYVYRRGKRICVQRGILVPRGPLSEESVYGRIHDEGKEKYVLRYEVDTIDLKKLDSVVDQGIREILRQRLEQFGGNPKKAYATPVYDHQGRAIRSVRCFTNLKVAVPLRYDQQGQPIAFVKTGNNHHAAIYEDEKGRWHEHLVTFWHAVDRKRYGLPILITDPGDVWDRVTDRMPEDFQRQLPPSATWRFVFSMQRNEMFVLGMEEEAYRKALSEQDTATLCQYLYRVQSISTGDYIFRKHTETQSDDKYPDENGKKETSLPRSKARGAAQRIKSFGALQALNPHKVHVSITGKISEV

SEQ ID NO: 8443 - protein, 1177 aa, synthetic construct
  REGION 1..1177: note = Synthetic
MYTTTDKDAPKGSRKILGLDLGVGSIGWALIEEQDGQLGQILGMGSRIVPIDSTDVDKFSKGQAITINADRTARRTARKGLNRYQQRRAALTERLREKGMLPDFEAERQIALWELRSHAATPGCRLSLQQIGRVLYHLNQKRGYKHSKADEGGEKKQTEYVEKVNSRYAALKEEGLTVGQHMYQQLVASAVMRPSGPYYTFRVKGEVYPRAAYLEEFDRIMEVQKVFYPDVLTDEWIAEVRNRVIFYQRPLKSCKHLVSLCEFEAKEFTIKATGKVITIGPKCAPRTSPLAQLCAAWEAVNNIELTNQEMECYPITAAQRQAMVEHLCTHDKLTTKDVQKILGLPAKSEWKGTKQLEKGIKGNSTLLQLRKALEGLGKDQTNELLSFDIPVKSIDMVDTATGELTQRAQIDPSAEDSTLYRLWHSIYSIHDEAELRHTLQKNFDIHDDTVLEALCKIDFVKPGYSNKSHKFIRKILPYLMQGMKYSEACEAVEVNHSNSQTAAERDSRMLLSQIPLIKKGELRQPLVEKILNQMINVLNALRAEYGEIDEVHVELARELKQSQSERENTDKRNRENERKNQEIAKQITEDYGLTPTRARILKYKLWEESEHRCFYCGKPISAADFLNGSEGEIEHIIPQSVLFDDSFSNKVLACRACNQAKGNQTAREFMEKQSAGEYEDYLQRVEKMYNGGKKDSQISATKYKHLLWRKADIPSDFIERQLRQSQYISRKAMEILQQSIRLVSATSGSITDFLRHTWGYDEILHTLNFPRYKEAEMTAIVRTKSGREEERIKDWSKRIDHRHHAVDALTIALTKPYYIQKLNRLNASHDEMMAVVRQKDYHWDAEYSLLEKWLVAQPHFSTREVLEKVDGILVSFRAGKKVTTPGKRYVYKNGKRVLAQKGLLVPRGALTEETIYGKLGDRYVVKYPLTHPSFKVENIVDPTIKRIVEERLASFNGNAKNAFAAPLYSEEGMEIKSVRCYTGLKDSSVVAVSRDEKGLPIGYAKLGNNHHIALYRDKEGNLQELSVTFWQAVERKRYGLPVVVEQPHELWSKLLDRDDIPQGVLESLPHDDWEFVLSMQQNEMFILGMDDLEFETAMQEKDYRMLNKYLYRVQSISHNDYFFRYHTETKVDDKYGDKKDIGKSQTMGKLKRIRSLNALFAQHPHKVRINILGEITI

SEQ ID NO: 8444 - protein, 648 aa, synthetic construct
  REGION 1..648: note = Synthetic
MVNVVNALMEKYGRFDEIRVELARELKQSKEERSNTYKSINKNQRENEQIAKRIVEYGVPTRSRIQKYKMWEESKHCCIYCGQPVDVGDFLRGFDVEVEHIIPKSLYFDDSFANKVCSCRSCNKEKNNRTAYDYMKSKGEKALSDYVERVNTMYTNNQISKTKLQNLLTPVDKISTDFIDRQLRESQYIARKAKEILTSVCYNVTATSGSVTSFLRHVWGWDTVLHDLNFDRYKKVGLTEVIEVNHRGSVIRREQIKDWSKRFDHRHHAIDALTIACTKQAYVQRLNNLRAEEGPDFNKMSLERYIQSQPHFSVAQVREAVDRILVSFRAGKRAVTPGKRYIIRKNRKRISVQSVLIPRGALSEESVYGVIYVWEKDELGHVIQKQRAVMKYPITSINREMLDKEKVVDKRIHRILSGRLAQYNDNPKEAFAKPVYIDKECRIPIRTVRCFAKPAINTLVPLKKDDKGNPVAWVNPGNNHHVAIYRDEDGKYKERTVTFWEAVDRCRVGIPAIVTQPDTIWDNILQRNDISENVLESLPDVKWQFVLSLQQNEMFILGMNEEDYRYAMDQQDYALLNKYLYRVQKLSKGDYNFRYHTETSVEDKYDGKLNLELSRQMGKLKRVSIKSLLGLNPHKVHISVLGEIKEIS

SEQ ID NO: 8445 - protein, 783 aa, synthetic construct
  REGION 1..783: note = Synthetic
MVNTETGEIIPMISLSFEQEPLYRLWHVLYSIDDREQLQSVLRQKFGIDDDEVLERLSAIDLVKAGFGNKSSKAIRRILPFLQLGMNYAEACEAAGYTHSNNYTKAENEAHALLDRLPAIKKNELRQPVVEKILNQMVNVVNALMEKYGRFDEIRVELARELKQSKEERSNTYKSINKNQRENEQIAKRIVEYGVPTRSRIQKYKMWEESKHCCIYCGQPVDVGDFLRGFDVEVEHIIPKSLYFDDSFANKVCSCRSCNKEKNNRTAYDYMKSKGEKVLSDYVERVNTMYTNNQISKTKWQNLLTPVDKISIDFIDRQLRESQYIARKAKEILTSVCYNVTATSGSVTSFLRHVWGWDTVLHDLNFDRYKKVGLTEVIEVNHRGSVIRREQIKDWSKRFDHRHHAIDALTIACTKQAYVQRLNNLRAEEGPDFNKMSLERYIQSQPHFSVAQVREAVDRILVSFRAGKRAVTPGKRYIRKNRKRISVQSVLIPRGALSEESVYGVIHVWEKDELGHVIQKQRAVMKYPITSINREMLDKEKVVDKRIHRILSGRLAQYNDNPKEAFAKPVYIDKECRIPIRTVRCFAKPAINTLVPLKKDDKGNPVAWVNPGNNHHVAIYRDEDGKYKERTVTFWEAVDRCRVGIPAIVTQPDTIWDNILQRNDISENVLESLPDVKWQFVLSLQQNEMFILGMNEEDYRYAMDQQDYALLNKYLYRVQKLSKGDYNFRYHTETSVEDKYDGKLNLELSRQMGKLKRVSIKSLLGLNPHKVHISVLGEIKEIS

SEQ ID NO: 8446 - protein, 1042 aa, synthetic construct
  REGION 1..1042: note = Synthetic
MQTKTENKITISLDIGHSSIGWSVIDPTNLKIKGCGSLLFQADDCLASKRRLFRSGRRNIAATRNRIGRIALLLKHIGAFKGNEAELVCNSSPWIDASRVLLGIETLDWPRLWNVIRWYAHNRGYDGNKAWSKSMPEEEAEEEAKRVKAASGIMQEYSTSTMAQTVCAMLHLDPDGEKRSTTGKKYKTGDYAFDRTIVENEVRNILQSHIGKLEGLDEKLIIALLDDAKVLNCPEYKLPLRFKGGLLFGGFVPRFDNRLISICPVTGEKTPSKKRREFYEYRWAMIIAGIRIFGEMGESSILKIEERKALDLEIRKVGFFTKATLKKFISDNFGHIDTNIDTYFLTPEMEKALVFNPAKKAINTACLNEAFEALPLKVQKSINSRLNKSKRTAPCEWLEQSDNTQKVKELMEVAYEKVMKRKKGKNKPAFEKWLKQDLDVEKNIPSGRAPYSKRILSKATKEVMEGKDPRETQGCLDTVALLSKEKLSIPVEKQTNNHLVRHRLIMTERLYKEIIREFAGGDLSTVDSVVVETARDLREFSGKSNKEKQKILGGKLKQHRDAVKTLEDFRTETGKSFSISAGLIRKTRIALDMDFKCPFTGDTYGLYQILDESIDMEHIIPRSLRPSDSLDGLVLTFKEVNRWKLNRTALQFIVDEGGNKVPGLPQKSIMQVKKFEAFVKKLKETGSSNDDIRRKKNRKRFLTLKNFNERESDFTAGDLTVTSQINRLATFRIRSIHQDEVKQPKYIALPGSATGLARKSWKLLGCLAQANSRVLNEDDSLKTKSEIRGITHLHHALDASVAAITATILPNDGDIWRMLNKRRLTDSEAKQLGQLDVISISAKKEPRLKDLPKDLKENLAQCLSEKRVRFHIPARIGSFSPDENEYGIVNVDQKNQVADLKRGGKLYPGIKLSLLTGIVPSGASKLKERNAVLQNKGNYGLWLGDPPEVIPNLRSWEKIKELKTRSSESKIARLGDFIEVEKGTYKGIWRIISIKNTAVGLRLTLSPIDSIPSNDFAHFGGKVASVSALLKNKLRIIPRSLI

SEQ ID NO: 8447 - protein, 1112 aa, synthetic construct
  REGION 1..1112: note = Synthetic
MLKDPKNYVIGIDVGSNSVGLCSVEINKDQVPLGILSATSIIHDSGVSKEHRKSADTLLKIGGIARRTRRRFREERRRLKALDQWLINHAYPLPSSADYKNPAQPWFFREELLSEYIPDEHRRKEMIAVVLRHMARHRGWRNPYTKVESLFESQPDSEFLVDFRRRVSEYLNEEVGDDLSLTRVVMLLATRTSNSGEEVFDVGIRLRGNASKNSNVDVVPLGKTAQSDHAAELREIAQVQHIDEAEWKDWIRLVFRSQSPKGSSVSRVGHDSLPGQERLRRASRASLIFQEYRIASALGNLYVREGGIKRPLTLDEYASAFEFLNDGFVTQKLESVSWSDVAEVIGVPRNRLGGLADLDVDNESFARRPPTNVTHQAMMKSKIKALREWWKSASRELRGEMISYLVDNEMSDAIIEWYGTLNDSDQLALDELVLQVGRAAYSEDSLKRLTACMLSEGCSLTDALTTEFGVSPGWRPPAAPVKEPVGNPAVDRVLTIVNDYVREATKRWGAPQRINIEHVRSAFMSEASSRSLTREMDTRAQRRLQMANEIAQRMGIRSKLRGSDVRRFSALQRQNGQCAYCGDVITFNTAEMDHIIPRKDSTSDSTVSNLVAVCGRCNRSKTNIPFAVWAENCGIAGVSVDEAVARVKFWVKDPKMFPGKQFSRLQSDVIRRFKQRVDDPPFDTRSMESVAWMARELRFRLDYAYPDTKVRVFRGSITAEARKASGFENRITMIGGKGKQRLDRRHHAVDALVIAMMRPKVAEVLALRSQMKRAQQDATVRDDEGRQLVDTWKSFTGKEFADRQIFDQWVKNMGTLAEITQRALDNDQISVQRQLRIRLGGGRAHDDTIHELEKHQLFEEIPESLIDRAATPALWCALTRHPDYVAGKGLPENQSRTINLQGTRVHSHDEVEFFASGAPQIKVRGGSAEIGGTIHHARIYRYPAARGNKMKIGMVRVFACDLLKHHNEDLFSVPLAPQSISVRSCEPALRSALEHGIAEFMTELVVGDELLIPHVDEIGVLSEFSAIYPGTTHWVVDGFPEATRLRLRPAMMAGEGLASDASKSEKKILQEKGWIVTLSTLFSNKIRVVRRNALGYPVGLSPYRLGTIEVRP

SEQ ID NO: 8448 - protein, 1512 aa, synthetic construct
  REGION 1..1512: note = Synthetic
MAKILGLDLGTNSIGWSIRETDSNSRMEYYQVYFRELLEKIKETQSILDNEIIDYGVVVFQKGVGEGKSGEFSLAAERRKNRSKRRLYNAKRYRKWELLKVLIENWMCPLTMEELRLWSIGNWQEVGGRKKNTGRIYPLGNEAFQKWLAFDPEYFGEKEISENGKVIRKNPYDLRFELISSEETNDFAKKQKVGRALYHLAQRRGFKSSRKSGKSTYAENAELEKLKQRNPDFQITMLAKEKLENGKRFRASGVIQRRYFEDEFYAICQKQNISDELTAKFYKAIYFVRPLRSQKGLVGNCTFEKGKARIPVSHPKFEEFRALQFINNIKWREVGTQTYEAIPISLKKNIFEELFFRKLTSGKNKGKTITETYFKFDEIVEKYSENEKYEFNYKNKPNISTCPTIAVLMNVFDAEWENKFIADENSYGINWEGLSISYTVKYGIKEGENRKLEVDEIWHLLFDYIQTKDNAEELEVFCKNVFGFDPDKARAFAEIDIQQGYGSLSYKAISKILPFLQSGFVYPEAVLFANLKKVLGDTFEVNKVQAKRIIDDAIKETSAIKEKRNIVNGLIQQFFAEHNTNRAKGIDNTIKEMAAQDTLNKLKKYFGESDWNKKTETEQRLWEDEILNLYLKFLEGKQIKEEKASVQLGKNPEIDYYKLPRVDESIKQCLKASFNLPDDRLRHLYHPSDIEMYPRSKSEIEVRINGVEQFVKQLESPQPPSRGWKNPMVMRTLHELRHLLNCLLRIGKIDYETKVVVEMARELNTKNYRKAYTDWINDRDNENKSFKASILEVYQITEPSIDDYNKFRSAVEQIVNTELIENKTTIFQNKYQEFIDTYLNTIKIPENNKDELMSNEYYDYLMYLILNRGEFRKMLNFKIPNSNKWQTQLIATSSSFEKKWKELSEMLTKYRLWKQQKFQCIYTGQQISFTQLFTENYQIEHTIPRSISFDSELKNLTVCDSAYNNFVKGNLFPTECPNYETAKVCKTVKGDITCFPIKDRVEESIFPKVKELHTRIKNLDTINKGLNDEEKKNANIRLRYYLKFELEYWERKLLTFTIKKGDWKDSWKNSQLVDTQIISKYAKAYLKSIFEKVDVQKGSIVNDFKKIYQIKGDGQKDRSWHSHHAVDAATLTLIPGSASREAILKEYYIALENKKKYHAKPYKGFQTSHLLDIEKIIVVNHISHDKTITESFRNIRKRGFKTGWVAQGDSIRGRLHEETYLGAIKPNEVKDEGKAIKDPISGKYLTKQLNGKDVIWVVQRKKIEDVDIDVIVDEALKAHIKWQLGNGVKINEVKDFAGNTIRHIRFKKFSPSYDKAIQVKPHLFSSKYGHKNFYLANNEINYLCLLYIGKDKNGKEIRAFRFVNLFEFSKMKDKRINLLFHNEDYNVFVKVNRSNEYKLNIKCILKVDQKVILYKSSIEEIDKQNLDNYRCRIFKIYKFNNSGSDYIFLQNIIEARNDDGLIKAGFTKDGDTEFKPKQYQPRLKLTADNFNCLFEGVDFEIKPDGTIKWIKS

SEQ ID NO: 8449 - protein, 1437 aa, synthetic construct
  REGION 1..1437: note = Synthetic
MKILGLDLGTNSIGWAIRETDRVCRKEYSNLFKNNLLDLENEIVDYGVIVFKKGVGNGKSGEFSLAAERRKNRSKRRLYNAKRYRKWELLKVLIDNNLCPLTIDELKLWSVGEWVVENGKKRNKGRKYPMSADFLRWLAMDFDKIGTEFTDGEKLKPEFENPYTLRCFLLERKRDDNQKTKYQIGRALYHLAQRRGFKSSRKSGMSTYAENKEIEQKKNLDSSYSISKYAIEKIQSGRFRASGVIQRKYYEEEFLCICKTQGLEEELTKKLFNAVYYVRPLRSQKGLVGKCTLEKNKTRIPISHPVFEEFRALAYINTIQWRVTGSNKPFEPIPIELKKKILEQLFFRKKRNGEIDTRGYFRFDEIIKEFSENFKYEFNYAKYKDNNPELSENKKISDLLKANPNITACPVIAGLMNVFWESWKNKFITDDNKFGIDWSGLKLDYTVKYGRKKGEKRQLDYESIWHLLFDYILTKDDIDKLRIFCNDVLGWNKERIDLFVDIGLSQGYGSLSKNAIKKIIPYLQQGFIYSEAVLFANLEKVLGQEKFVSNKEDILKTIAETIKGVDIYKEKLHIVNSLIQKYFGEVEFKNAKGLDETIIKSAEHEVINKLKEYFGEKNWNIKSETEKKEYYEFVLDKYLTFLDGKQKPEEKASTRLRRNPEIDYYLLPRLDECVKNILSEKFSASDEGLKHLYHPSDIDVYPKAKNKRLGDPVPPSKGWKNPMAMRTMHELKKLINYLLEIGKIDEQTKIVVEMARELNDANLRWAIKTYQKQREEENKEFAKIILGLAQEKYPNLNENDVDNINKVRLWWEQLPNGEEIYRQVKELKDYVLKYRLWKEQKCQCIYTGKWINITDLFDGTKVQFEHTFPLSDSFDNSLANLTVCDAHYNMNVKQDRIPTQLENYNKDAIGYSAIKPRLKKWFIKRDTLKERIENNKVETKKAIRIGNIERKNYLIRERHLLQFEFDYWDKKLKTFTLKEIPNWWKNSQLIDTQIITKYSSAYLKSLFTKVDVVRARRNSEDIQDGTVNIFKKIYGIKGDEQKDRGRHSHHAIDAAVLTLIPSSTKREEIIKQYFKENKSKNKFHMLPYQNFDTNHILQIEKNIIVNHIVKDKTLVRTKKKVRKRGLVQYTSEGKPMIMQGNSIRGQLHKETFYGAVLVPERNENGYIIKENDKVKLKENEVWIVYRKPIQNIDINEDIIVDELLKKHIQNQINKGVKITAVKDFRGKLIRHLRCRAKAGRGYLTKKKTIELKKNSSNPKKLHKQFVLTQNEENYLYLLYENNVDSKKICREARIVSLFEMQQLLRDGISIKKIWKENELNQLLGLPLRAIIKVGYKVIFYEKNKEELKELKSNELQNRVFIVYKFNEIGSPYIYLQNHIDARIDDEFQKLSHGKDGYTEFDVSKYQYRLKLKARKLNCVFERIDFEIKPDGELIWKF

SEQ ID NO: 8450 - protein, 1423 aa, synthetic construct
  REGION 1..1423: note = Synthetic
MAKFLGLDLGTNSIGWAIRVNDGFEREVYFERFFTDRFESLKQIQNKKEIDKDNEIVDNGVIIFKKGVGDGKSGEFSLAAERRNNRSKRRLYNAKRYRKWELLKVLIENEMCPLTKDELRLWSVGYWEKYEDKWKNKGRIYPVNNEDFQNWLALDPTIFGDKGTSINGKPVRKNPYDLRCELIKQEETNEYIKKLKIGRALYHLVQRRGFKSSRKSGKSTFATNEDIEQLKKENSNFQISFLAKERLDNGERFRASGVIQRKYFEDEFFAICNKQNLSSALIESLHKAIYFVRPLRSQKGLVGNCTLEKGRPRIPISHPKFEEFRALQFINNIKWREKDSKEFVEIPITLKKRIFEDLFFRKLVGGKNKGKISGESYFNFEDIIKNYSENGTYEFNYKNLPNVSTCPTIAALMNVFNEEWDNKFIQDENNYGINWDGLVLNYTVKYGNKTGAKRDLKVDEIWHLLFDYIQTKDKIEDLEKFCKDVLEFDEDKTKAFCSIDIPQGYGSLSYKAINKILPFLQGGYIYSEALLFANLKKVLGSEFENKKEDAKTIIAKTIKKTGLIKERYNIVNGLIQSYFAEAETNHAKGADEKIIETAKKETIDRLKKYYGENEWNKKPESEKELIQKEVFILYIRFLNGEQTKEEKASAKDNHIPEIDYYKLPRLDESIKQNLRSSFNIAESNLKALYHPSDIEMYPVSRTELKDTNTKILESPQPPSKGWKNPMAMRTLHELRHLINYLLKIGKIDKETKIVIEMARELNDANKRWAIQTYQRYREDENKEFAKAIVGVVKQKYPNLNENDIENINKVRLWWEQVENNEEVYKQIKSLKEDIEKYRLWKEQDCICIYTGKPINITNLFDGTQTQIMHTFPVSASFDSSLANLTVGDAYYNNEIQSNKIPTQLPNYSKDVIIKGRTYTAIEPRIEKWKEKVIHFKNLIEENKKRTKKTQDPGTKKNLIQNRHLLQFDYDYWKKKVETFTLTEIPLQWKNSQLIDTQIISKYARAYLKTVFEKVDVQKGTNTDKFKKIYQIKGDEQKDRSKHSHHAQDAAILTLIPNSAKREAILESYYKAEEEKRKFHTKPYESFNSSHILDIEKNVIINHISHDKTLTETIKNIRKRGERTGKKAQGNSIRGQLHKETFFGAIKVLERNEQGFPIKENGKYKILKNKIEEDEIWIVSKKPIKDIKIDKDIIVDDLLKKHIQKQLDNGISLESVTDFNNKPIRHIRIRVKAGVGFLSKDKAMPIKTQTYSSRHTHKNEYLVQNEENYLFLLYEGLNDKNKTIRHYRILNLFDIAQLKIKDINTIKNEPEFQTIKKGKFELSLKVILKAGDKVIFYNESRDEITPENTKNRLYKLYKFNEMGSAFLYFQNHIEARTEKDIEKTESTFNPSRYQARLMLVLDKINCLFENKDFKICPDGTVVFI

SEQ ID NO: 8451 - protein, 1532 aa, synthetic construct
  REGION 1..1532: note = Synthetic
MYYAVCAEATGLPGSWPLSQRFLCSVFQHPAQKGFNQQIQMPLWNFWINGWVPGYCSKATNFLLGIVKIKKTVILVNWHKKAPHFLRSLRKSSAYSLVVICSSKVGIKIKKTKLMGNILGLDLGTNSIGWAIRDLDSDIGDQIAHYGVVIFKKGVGEGKSGEFSLAAERRTNRSKRRLYNAKRYRKWATLLALLKNGMCPISEEELRLWSIGNWHDGKNKGREYPSSPDFTAWLAMDFHRIGKSVDVSVKLKPAFHNPYALRSALLETKDENDTLRLYKIGRAFYHLVQRRGFKTSRKNGKSNYGDNELFKKFKELHPDKITWKPSQIYLYLQSKIDPNPELRKERIRNNAVIQRALNEDEFDAICDKQGIPDNVSAAIKKAIYFVRPLRSQKGLVGKCTLETSKTRIPISHPAFEEFRALAFINNIQWRETDTKNPYEPLPIAIKKQILEQLFFRRFEKGKKKGKVDDGGSLAFVDIINTFSEKGKWEFNFKNKPNISTCPLIAGLMNVFDEEWTEKFVTEDDQFGINWTGLSIAYDAVYNGQIVKHKKLNHEAIWHLLFDFLHTKDDEQGLSTFCQKVLGWDIEKTTSFLEIGISQGYGSLSHSAILKITPYLQKGFIYSEAVLYANLSKALGKATFETNNPSIILSIKNTIQNTDTVKEKLNIVNSLIQEYFAENNSNRAKGVDNQIKEMAFHEVENKLKAFFGEMSWSRKTEIQRNSYLEFVLDKYLAFLDGKQSREEKASAGINKNPEIDYFKLPRVDKAIEEVLKTRFGATEAGLKKLYHPSDIDIYPKAKNDRLGDPNPPSKAWKNPMAMRTMYELRKLINYLLEAGKINIETKIVVEMARELNDANKRWAIQTYQRDREEENKEFAKAIIGVAKEKYPELNENDADNINKVRLWWEQLENGDELYKTIKTLKEDIDKYRLWKEQGCQCLYTGKIIRITDLFDGTSFDFEHTLPISDSFDNSLANLTICDAVYNRTIKKNQIPTQLKNYNNGWGTYQAIKPRIQPWINKVEQLKQRIDRNKADTKKAIRAADNVRKNDLIQKRHLLEFDYDYWDKKLKTFTVDEVPNWWKNSQMVDTQIIAKYARAYLKSLFTKVDVQKGTITAEFRKIYGIMGDEKKDRSKHSHHAKDAAVLTLIPGSAKREEILKNYYWALENRQNYHVKAYSGFEIAHVLKIEESVLINHVRKDQTLSPTKKKMRERGMVVFKKDDNGKFLKDETGTKIPNWIEGRSIRGQLHDTTYYGAIKPVERNENGYARKENGKYLLKQKDGIDELWIVKKELIQDADIENMIDIPLQKHILTQIQNGIKISEVVDFNNNKIRHVRCRVRSLTASKAIFFKEHNFKSTHLHKQQYIARNTSGSNYLNILYEGINKKNELIRAYRIINLFEFSQTGITDINLLNSDNAYNTFTKTKGSNSIKLQLKKILKVGDRVVMWHKNKEELNLLPNQEILKRLYTIFKFNNQGSDYNYLQHHLEARPDKDLDDGDTVYNPDIYQPRLKLGAEKFNCLLENDDFIILTDGNILFRP

SEQ ID NO: 8452 - protein, 1413 aa, synthetic construct
  REGION 1..1413: note = Synthetic
MTNILGIDLGTNSIGWAIRDLNSDTDDQIVDYGVIVFKKGVGEGKSGEFSLAAERRVNRSKRRLYNAKRYRKWATLLELLRNGMCPITEEELRLWSIGNWQNGKNKGRIYPTSPDFTAWLAMDFERIGKNIDPDVKLKPAYANTYMLRSDLIENVNESDPLRLYKIGRSFYHLVQRRGFKTSRKSGTTSYANNELFKKFKETYPDKSDWKPSQIYLYIQSGKDPDPELRKNRIRNNAVIQRGLNEDEFFSICKKQNIGQDLANKIHKAIYFVRPLRSQKGLVGKCTLEKDKTRIPLSHPAFEEFRALAFINNLHWREAHTRKHFEPIPISVKKQILEQLFFRRLEKGKNKGKVSESGTLSFDDIINAFSGNGKWEFNFKNKPIISTCPFIAGLMNLFDNEWKTKFITDEDRFGIDWSGLSLAYNLKYNGEIVKERKLNYEGIWHLLYDFIQTKDDEKGLADFCKGVLGWDEERSSNFIEITVEQGYSSLSKNSIDKIIPFLQQGFIYSEAVSFANLSKVLGKEFFQANQTDITSKVAATIKKADTIKEKLNIVNSLIQEYFADNNSTRAKGVDDHIKEMAYEEVEKKLSNYFGKSNWNDKTEDEKKEYFDFILNKYLTFLDGNQIKDEKASAGINKNPEIDYYKIPRLDEAIKQVLREKFNATEIGLKKMYHPSDIDIYPKAKGNRLGDPNPPSKGWKNPMAMRTMYELRKLVNYLLEAGKISSETKIVIEMSRELNDANKRWAIQTHQRYREEENKEFAKAIIGVAKDKYPNLNENDATNIDKVRLWWEQLDNGEEVYKTIKTLKEDVEKYRLWKEQGCQCLYTGKIIRLTDLFDGTSYDFEHTLPLSQSFDNSLANLTICDAEYNRKVKKNRMPTQLPNYEVDSNGYKAIAPMIESWIKKVDSLKERIEKNKSDTKKAIRAGNIEYKNDLVKKRHLLQFDHDYWDKKVKTFTLTEMPNWWKNSQLVDTQIISKYARAYLKSLFYKVEVQKGIITAEFRKIYGIMGEEKKDRSKHSHHAKDAAVLTLIPGSAKKEDILKRYYSAIEKRVQYQEKPYPNYEMSHVQKIEQAILINHVTKDQALTKTIKNVRQRGKIILTKDKNGKKITMVAQGDSIRGQLHEETFLGAIKVPERNKDGFALKENGHYLLKQKNDQDEIWIVARKAIEKINIEKDIIVDELLQKYIKKQIENGIRINEITDFNNKIIRHIRCRVKVGVGFMSKEKAIELKKHSHPSKHLHKQSILAKNDSNYLYLVYELQKGNKLMRADRIINLFEIASLKSFVNLNSHLDIYKEKEFNILLKGKDELTLKYIIRVGDRIIFFNETKNELKDLSTIEINSRIFKVNKFNEQGTAYLYVQNHLEARPDSELEEEEVIFNMTKYQSRLKLKVNKLNCVVENYDFKIKGDGKIEWLF

SEQ ID NO: 8453 - protein, 1444 aa, synthetic construct
  REGION 1..1444: note = Synthetic
MAKILGLDLGTNSIGWCIRETELFEREEYSKLFSKNITDFQNEIIDYGVVIFKKGVGEGKSGEFSLAAERRKNRSKRRLYNAKRYRKWELLKVLVENKMCPLTLEELRLWSIGNWKEVGGKKKNVGRVYPLGNEYFQKWLALDPFFFGQKGTSDNMKPIRKTPYDLRYELIDIEEQNEDIKKQKLGRALYHFAQRRGFKSSRKNGKSRYAENSELEKIKSGNPNFHIATLAKEKIDNRKRFRASGVIQRKYFEDEFYAICHKQNIDIELTNKLHKAIYFVRPFRSQKGLVGNCTLEKGKTRIPVSHPKYEEFRALQFINNIKWREKGISTFDPIPLLLKKKIFKELFFRRLESGKNKGKVHTENYFKFDEIIDKYSENGKYEFNYKNKPNISACPTIAALMNVFDNEWQNKFIEEENSYGINWDGLFIDYIVKYGRKNGQPRSLKVNEIWHLLFDYIQTKDKQEELKAFCKNVLGFNDDKSNSFSNIDILQGYGSLSHNAVCKIMPFLQNGYIYSDTVSFANLKKVLGPTFERNKEKAKKIIATTIKETSETKEKLAIVNSLIQQFFSNNNAIRAKGLDNHIKSVAAQDTTNKLQSYFRESHWANNTESDRENFKNEILNLYLKFLDGKQNKEDKASSCANKNPEIDYYKIPRLDETIKQNLKNEFNLSDFALKHLYHPSDIDMYPMSKREINTRVNGVEQYVKQLESPQPPSKGWKNPMAMRTLQELRHLLNYLLKVGKIAPKTKIVVEMARELNDSNKRWAIQTYQKGREIENKEFAKAIVGVAKEKYPNLDENNIENINKVRLWWEQIEKNEAVYTQIKDLREDVQKYRLWKEQECVCMYTGEMISLTDLFDGSQTHFEHTLPISSSFDNSLTNFTICKGYYNTNIKRDKIPTQLDNYSKDANGYTAIESRLNKWKEKVEHLKNLIETNKVKTKKIQDPETKRNLIRERHLLQFNHDYWKKKLDTFTVKEVPASWKNSQLVDTQIISKYARAYLKTVFEKVDVQKASIVIDFKKIYRIHGNGTKDRSKHNHHAEDAATLTLIPGSARREVILSEYYKAIENKKKYNLDPYTGFDTRHILDIGKNIITFHVSNNKYIVNTKKKIRKRGEIVYLKDKKTKKRILNESGKPIPIITTGDTIRGQINEESYLGAIMPPLYQNGKAVKKDNKWEIRRDKNGNPEIWIVKRLLIDSINFEKDIIIDERLRQCIKDQINGGRSATELMDLSGNSIRHIRCRVKTGKGFQSKEKTIELKKHSHTSKKEHKKNVLSKISDNFLCLFYQNKPKLDELIQRQVRIVSLFHFRDLGFDSLRDVWDDEDWNNYRINDKIGLPLTKIITQGTKALFYERSKDELRYLNTREIQQRLFIVFKFNESIVSNKYYNYIYFKNHLDARPNPDIDKECEDKFDPQKYQSGLCLKPENMDCLFEGIDFDMKPDGEIKWIEK

SEQ ID NO: 8454 - protein, 1432 aa, synthetic construct
  REGION 1..1432: note = Synthetic
MAKILGLDLGTNSIGWAIRETDKIDREYYCKQFSKTNIESESEIVDYGVVVFQKGVGDGKSGEFSLAAERRKNRSKRRLYNAKRYRKWALLKLLIENNMCPSKPEELRLWSVGKWQDENGKKKNVGRIFPLDNVTYQQWLAFDPIFFGSKETSKNGKNIRKNPYDLRCELIREYEEDEDSRKLKLGRVLYHLVQRRGFKSSRKNGKSTYAENAELEKLKNENSDFHIAVLAKNKIDNGERFRKSGVIQRRYYEDEFRAICDKQKVDERLTERLHKAIYFVRPLRSQKGLVGNCTLERNKPRIPLSHPKFEEFRALQFINNIQWREENGTKRFEPIPLSLKKRILEEIFFRRLVSGKNKGKISLDNSFQFEDIIEKYSENGKYEFNYRNKPNVPTCPVTAALMNIFDVDWEDKFLTQGDTYGINWEGLIIQYNLKYGKVKRRTEEGKKKYYQKNIGEHRALNIDSIWHLLFDYIQTKDKVEELERFCKEVLLFKDEKARAFANIDIPQGYGSLSFKAISKILPFLRFGYIYSEATYFANLKSVLGDEYKNLIDRAKRITDKTIADVKNKKEQLFIVNRLIQKYFSTNASTRAKGVDDRIKEIAAQETKEVLKDWFMGEWEKMTPEKRSDYENNILKYYLRFLDGKQENDEKATADSIRQPQIDYYKLPRLDLAIKRSLKDSFQIQYRNLNKLFHPSDIEMYPVSRTEVKVNIEGIDTVIRILESPQPPSKGLKNPMAMRTLHELRHLLNYLLRIGKINEETKVIVEMARELNDANKRWAIQKYQRDREEENIEFAKAIVGVAKQKYPNIDENNIENINKVRLWWEQIENNEEVYEQIRALKEDIDKYRLWKEQGCVCMYTGETISLADLFDGNQTNFEHTLPVSISFDNSLSNLTVCKAYYNIHIKKNQIPSQLANYSQHANGYTAILPRLEKWQVKVKNLKGLIEDNIKRSKRIQDPETKKRLIQKRHLLRFEFDYWDKKVKTFEVKEVPNTWKNSQLVDTQIISKYARSYLKTLFNRVDVQKGTVVNDFKKIYQIKGDEQKDRTKHSHHAQDAAILTLIPGSTRRDTILQNYYEAEETHQKYPINPYPGYKPLHILEIENNVLINHIPHDNTFVSTFKNERKKGVKTGRIAKGDNIRGRLHKETFLGAIKPPMRDENGFAFREEGKYKVITNPKTGLDEIWIVSRKPITEVKLDKGKIKDVIIDEILRKHIQLQLDNGVNLEHVVDFRNNPIRHVRMRVKAGVGYLSKEKAIEIKKPVYPSKYEHKNDVLTQNEENYLFLLYEGIDAGGKAIRSYKILSIFDIAKLGIKSFKQIKNEQEFQALTKRNIRLPLKVILRVGDRVIFFEENRDELTDKNIKERMFKLFKFNEMGTPYLYFQNILEARPDKDLNEEVEFDPKKYQPRLSLKIDKLKCLFEGVDFEVNPDGTLVWK

SEQ ID NO: 8455 - protein, 1525 aa, synthetic construct
  REGION 1..1525: note = Synthetic
MAKILGLDLGTNSVGWAIVDKEGNNFSLVDKGVRIFSEGVNIEAKTNSESSRAAKRTEYRSARKLKYRRKIRKIELLKVLSDNNLCPKLSDEELNDWRYKKIYPQNDEFRIWLSTDNQEDEEERKKQNKNPYSYRYKSAKETLNLNDKEDRYILGRAFYHIAQRRGFLSNRLDSSDNSIIEEKKNEITAVINDATSIAEFLELFSEFVSSFDKDETSNKPLFTLSRAFNSIFKENSALVYNDLKEKLLERLNKKEFLGPVKRAISDLSEKIEQEKCSTLGQYFYTLYQKGKKIRGEYTHRIDHYLTEFNYICDKQNVLAEAKEKIEKAIFFQRPLKSQKGLVAKCPLENIKTCVPISHPDFEEFRMLSYLNNVKIKLPTDEKLRLLNEDEREQIGTLFFRKSKANFDFSEIAKKLTPKSLKFGYYKDKNVAEYDVLFNYNLGSNVSGCLTIANLIDVFGTKWKEYLFSNFVKNTKTENNVKVKKSIDDIIDDIWHVLFRFDNEELLKQFAIDNLNCNDKTAIKFSKIKLKQDYGSLSLKAIRNILPYLRQNLIYSHAVFLANMKNILPTEIWNDEENRNVINQEIKSIIENYKVYSNKIEIVNGLIKNAKKENGTWSSDNKFVAEAYRNGLEKQVKDFFGTKKWNETPENYQNEILSECFELFSNQMKLNSGRGEFVKKQTIDEILKTFLSDNFNIDEDSLKKLYHPSAIEVYKKAKRSEEDGKKYLGSPLISSIKNPMAMRSLHQLKRVVNQLIKDDMIDEDTFIHIEMPRELNSANERVAIRQWNENLKTRRDKYTEEIKSIFRGETNIEGCNDANASYNDYEPTETDILKYQLWIEQQKVCLYTGKTICLSDFIGNNPKFDIEHTIPRSRSLDNSQLNKTLCCAIYNRQTKKDKIPFECSNHDEILPRIKHWYAKYKSIEEQIKDLSKKVKAASTKEKRDKYIIDRTKLRFEYSYYFKKYKSFIMEEVPEGFKNSQSVDIGIISKYGNLFLKTAFNKVYPIKGKTTSNLRQMWGLDEKSRDNHAHHAKDAVVVACCTRDINDALANYYHELEQFEYYGKPKPSFSHRIPWEGFHKDVDDFDNNTLISHHTPDNLPVQSKKAIRKRGIIQRNGKGEIKYKQGDTVRGALHKESFYGAILREEVDKKTGKTEEVVKYVKRQAIDLFKDTDLKNIVDDKIKEIVSSGREQEKQIKKEIEDLEKQLKNLKEEEEQPIKEEIQALKNRIKNELYVLPNKSGKPVPINKIRYYTSDVTNPLFIKKHRDVSRHEHKQFYHAKNDGNYCYAIYEGVDKKGKKERAFELINFLDAGNYYKLKNKDDRESENISLIPEKHLETGFNLLKSNNKPIVLKKGLNVILYKNQKEELDFLVPNSLIGRLYKITGLDEDGIKLIYNLSAKSTTANISYMNEVVNEQKLYEVKEDLESLDLWDNVFSDFKKQTTKRPDFFKNLNNVLNKYYLENEIFDARGKIKEVKLKESGLTTPKGGDVIDNFKEFPYIKFKVNNFNALVEGIDFNISSTGKIVRI

SEQ ID NO: 8456 - protein, 1467 aa, synthetic construct
  REGION 1..1467: note = Synthetic
MANYFIRIFQNSYKTQIEMAKILGLDLGTNSIGWAIVDKDGNDFSLVDKGVRIFSEGVSIEAKTNSESSKAAKRTEFRSARKLKYRRKIRKIELLKVLSDNDLCPKLSNDELADWRYKKIYPQNDEFRFWLSTDNQDDEENRKLQNKNPYKFRFRAAKEELDFSKKEDRYILGRAFYHIAQRRGFLSNRLDNSDNSIIEEKNSEITSIINDANSILEFSESFSEFLSSFDKDEVGNKPLFTLSRAFNAIIKENSNSIYAGVKEKFHERLNKKEFLGLVKRAISDLTEKILEEKCSTLGEYFYLLYHNGEKIRGEYTHRIDHYLTEFKFVCNRQNIPNHIKDAIEKAIFFQRPLKSQKGLVAKCPLENRKACVPISHPDFEEFRMLSYLNNVKIKLPTDEKLRLLTEDEREQIQSLFFRKSRANFDFSDIAKKLTPKGLVPKYYKDKQISNENVLFNYTLGSNVAGCPTIANLVDVFGADWKESLLLNFVKNTKTQGDLKIQKSIEDIIDDVWHVLFRYDNEALLKQFAIENLNCDEKTAPKFSKIKLKQDYGSLSLKAIRNILPYLRQNLIYSHAVFLANMKNILPMEIWNNEENRNVINNEITSIIKKYKLYSNDIDIVNGLIKNVKKENGTWSSTNKFVAEVYRNGLEKQVKDFFGTKKWNEMPEILQIKILSECFELFSNQMKLNSGRGEFAKKQTIDEILKTFLSDNFNVTEESLKKLYHPSAIEVYKKANRSNVDGKKYLESPLISSIKNPMAMRSLHQLKKVVNQLMKDDMIDEETLIHIEMPRELNSSNERVAIRQRNEILKDRRSKYSEEIKSIFRGDLEVEGCKDANSNDSNYEPTDTDIVKYQLWIEQNKVCLYTGKTICLSDFIGKNPKFDIEHTIPRSRSLDNSQMNKTLCSAVYNRQTKKDKIPFECPNHEDILPRIKHWYAKYKGIEQQIKDLSKKVKAASTKDKRDKYIIERTKLRFEYSYYFKKYKSFIMEEVPEGFKNSQSVDIGIISKYGNLFLKTVFNKVYPIKGKTTANLRQMWGLNEKSRDNHAHHAKDAVVVACCSRDINDALANYYHDLEQFEFFGKPKPSFSHRIPWEDFHKDVDDFDNNTLISHHTPDNLPVQSKKAIRKRGIIQRNEKGEIKYKQGDTVRGALHKESFYGAILREEINKKTGENQEIIKYVKRQGIEMFKDADLKNIVDDKIKEIVSSGREHERLIKKEIEELRKQLKNVKEEEEQPIKDAIQVFENKIKNDIYVLPNKSGKPVPIKKIRYYTSDVTNPLFIKKHRDVSRHGHKQFYHAKNDGNYCIAIYEGLDKKGKISRSNQLINIIDAGKYFKLSNEDKKLYPIAPEKDENLNPLKYILTKGKMVLIYDKSPKELFEMSADKLLERLFEITQMDVEKYAEIKLLHHSEARDKKRITEFMGLKTGMKGGKNVGEHKKYPWIKIGANSFDCLVEDYEFKLTPTGKIKFLK

SEQ ID NO: 8457 - protein, 1460 aa, synthetic construct
  REGION 1..1460: note = Synthetic
MRKTVKWVTIFSVILKNSYKIQIDMAKILGLDLGTNSIGWAIVDKEGTEFSLLDKGVRIFSEGVNIEAKTNSESSKAAQRTGYRSARKLKYRRKVRKIDLLKILSDNNLCPKLSDEELSDWRYKKIYPQNDEFRKWLSTDNQDNEQERKEQKYNPYYFRFISVRNSLNLNNKEDRYNIGRAFYHIAQRRGFLSNRLDSSDNSIIEEKKFDITSLINESHSIVEFSEIFSDFLSSFDKDEAIDKPLFTLSRAFNAIIKDNSKSVYDDLKEKLIERLNKKEFLGPVKRAISDLSEKIENSGCSTLGEYFYTLYEKGGKIRGEYTHREDHYLKEFETICKTQNISNELKDKIEKAIFFQRPLKSQKGLVAKCPLENRKACVPISHPDYEEFRLYSYLNNIKIKTPNDDKLRVLNADEREQIDFLFYRKSKANFDFLEIAKKLTPKNLKSGYYKDKNSKEYDILFNYNLGSNVAGCPTIANLREVFGKDWKEYLYSNFLKNTKTEKNKIVQKTVEDIIDDVWHILFRFDKEELLKQFAIDNLSCDDKTAIKFSKIKLKQEYGSLSLKAIRNILPYLKQNLIYSHSVFLANMKNILPAEIWNNEENKRVINNEINSILENYKVYSNNIEIVNGLIKNIKKENGTWSSDNKFVAEVYKKDLEKQVKDFFGTKKWNETPIEYQTAILTECFELFSSQMQLKSGRAEFAKKKTIDEILKQFLNDNFNVDAEGLKKLYHPSAIEVYKKAKRSEEDGKLYLGSPLISSIKNPMAMRSLHQLKKVVNQLIKDDLIDEETVIHIEMPRELNSANERVSIRQWQEELKNKRNKYAEEIKSIFRGDIKMDGCNDVISIEYEPTENDILKYQLWIEQHKICLYTGKTICLSDFIGSNPKFDIEHTIPRSRSLDNSQINKTLCCSIYNREVKKDKIPFECSNHKEILLRINHWFAKYKTLEEQIKDLSKKVKVASTKERRDKYIIDRTKLRFEHSYLYKKYKSFTMEEVPEGFKNSQSVDIGIISKYGNLFLKTAFSKVYPIKGKTTANLRQMWGLDEKTRDNHAHHAKDAVVVACCTRDINDALANYYHDLEQYEFYGKPKPSFAHRIPWKGFNNDVKEFDNSILISHHTPDVLSTQSKKAIRKRGIIQRNEKGEIKYKQGDTVRGALHKESFYGAILREELDKKTGKTEEVVKYVKRQAIGLFKDTDLKNIVDDKVREIVERGREHEKQIKKEIEELKKVMKNINEEEEQQFKDAIELLENRIKNELYILPNSKGSPVPIKKIRYFTNDVSNPLLIKKHRDVSRHEHKQHYFAKNDGNYCFAIYDGKDKKGKIITEYKVVNNFEAGKYYNSNANTHKFPLEFNIEDKNKNILELKFLLKTGTLVLFYKNFKDEIWELDNLDLAKRLYKTVAIEADGRIQFRLHSTSKPDGQLEKSSIIDFEVANEKLRISKSSLTVLVEGFDFNISSTGKVIKI

SEQ ID NO: 8458 - protein, 1448 aa, synthetic construct
  REGION 1..1448: note = Synthetic
MAKILGLDLGTNSVGWAIVDKDGNNFSLVDKGVRIFSEGVNIEAKTNSESSKAAKRTEYRSARKLKYRRKIRKIELLKVLSDNNLCPKLSDEELNDWRYKKIYPQNDEFRIWLSTDNQEDEEERKKQNKNPYSYRYKSAKETLNLNDKEDRYILGRAFYHIAQRRGFLSNRLDSSDNSIIEEKKNEITAVINDATSIAEFLELFSEFVSSFDKDETSNKPLFTLSRAFNSIFKENSALVYNDLKEKLLERLNKKEFLGPVKRAISDLSEKIEQERCSTLGQYFYTLYQKGKKIRGEYTHRIDHYLTEFNYICDKQNVLAEAKEKIEKAIFFQRPLKSQKGLVAKCPLENIKTCVPISHPDFEEFRMLSYLNNVKIKLPTDEKLRLLNEDEREQIGSLFFRKSKANFDFSEIAKKLTPKSLKFGYYKDKNVAEYDVLFNYNLGSNVSGCSTIANLIDVFGTKWKEYLFSNFVKNTKTENNIKVQKSIDDIIDDIWHVLFRFDNEELLKQFAIDNLNCNDKTAIKFSKIKLKQDYGSLSLKAIRNILPYLRQNLIYSHAVFLANMKNILSTEIWNDEENRNVINQEIKLIIENYKVYSNKIEIVNGLIKNAKKENGTWSSDNKFVAEAYRNGLEKQVKDFFGTKKWNETPENYQNEILSECFELFSNQMKLNSGRGEFVKKQTIDEILKTFLSDNFNIDEDSLKKLYHPSAIEVYKKAKRSEEDGKKYLGSPLISSIKNPMAMRSLHQLKRVVNQLIKDDMIDEDTFIHIEMPRELNSANERVAIRQWNENLKSRRDKYTEEIKSIFRGETNIEGCNDVNASYNDYEPTETDILKYQLWIEQQKVCLYTGKTICLSDFIGNNPKFDIEHTIPRSRSLDNSQLNKTLCCAIYNRQTKKNKIPFECSNHDEILPRIKHWYAKYKSIEEQIKDLSKKVKAASTKEKRDKYIIDRTKLRFEYSYYFKKYKSFIMEEVPEGFKNSQSVDIGIISKYGNLFLKTAFNKVYPIKGKTTANLRQMWGLNEKSRDNHAHHAKDAVVVACCTRDINDALANYYYELEQFEYYGKPKPSFSHRIPWEGFHKDVDDFDSNTLISHYTPDNLPVQSKKAIRKRGIIQRNEKGEIKYKQGDTVRGALHKESFYGAILREEVDKKTGKTEEVVKYVKRQSIDLFKDTDLKNIVDDKIKEIVSSGREQEKQIKKEIEELKKQLKNLKQEEEQPAKDAIQILENQIKNELYVLPNKNGKPVPINKIRYYTSDVTNPLFIKKHRDVSRHEHKQFYHAKNDGNYCMAIYEGIDKKGKISRSNQLINIIDAGKYFRLSNNDKKVYPIAPEKDENLNPLKYILTKGKMVLIYDKSPKELFEMSEEKLLERLFEITQMDVEKSAEIKLLHHSEARDKKRITEFMGLKTGMKGGKNIGDHKKYPWIKIGVNSFDCLVEGYEFSLSPTGKIVFL

SEQ ID NO: 8459 - protein, 1441 aa, synthetic construct
  REGION 1..1441: note = Synthetic
MAKILGLDLGTNSIGWAIVEKDINEFSLIDKGVRIFSEGVNIEAKTSSESSKAAQRTDYRSGRKLKYRRKLRKLELLKVLSDNNLCPKLTDEELKLWRYKKIYPNNDEFRLWLSTDNQNDKLERKEQIKNPYAFRFNASSKKLDLNKISDKHELGRALYHISQRRGFLSNRLDTSDNSIVEEKNNDIEDIIQQANTSEELLKMYNDFLEAYDKTEANSKALFVLGRAFKSILKENTDETFDIVKEKLLERLNRKEFSGKVKSAISDLSIKIEEANCSTLGEYFYGLHKKGQKIRNNYTHREEHYLNEFHIICDKQNLPITLRTTIENAIFYQRPLKSQKGLVAKCPLENDKACVPISHPDFELFRMQGFINSIKIKPESQDKLRFLNTEEKSIIASLFYRKSKPNFDFEEIAKKLTPKHLKSGYYKDKNAKDFDVLFNFGNYTNVSSCPTIANLKSVFGDDWKAYLIENFNKKNKDNSSKTPHQIIDAIWHVLFRFDKTEKLKQFVIDYLDCDEDIAIKFSKIKLKQDYGSLSLKAIRNILPYLEKDLLYSHAVFLANMKTVLPQPIWNNEDDRKVINNEVFSIIENYNTYRNIVDIVNGTIKKVKDNQETWNGKNTFVVEAYKKDIEKSIQDYFGLKRWDLFSEEKKGVLLKNSFNLFSTQMELNSGRGEFLKKETLDERVKAFLRDNFNVSEDSLKNLYHPSAIEVYKKAKRSDKDGKLYLGSPLISSIKNPMAMRALHQLRKVINQLIKDDAVDENTIIRIEMARELKSANERTAIRQWQTDLQKKRTSFADEIKAIFKGEIKIDDCNDKIISEYEPTETDILKYQLWLEQNRVCLYTGKTICISDFIGANPKFDIEHTVPRSKSLDNSQINKTLCCSVYNRDIKKDKIPTECNNHEEIMPRINHWYAKYKSLENQIRDITKKVRGATTKENKDRYIQNRTKLRFEYNYLKSKYKTFTITEIPRGFKNSQSVDIGIISKYGNLFLKSLFSKVYPVKGRTTSNLRDIWGLDKKERINHAHHAKDAVVVACCEKDINDALASYYHNYEDYQFYGKPKPSFKHRIPWKGFNNDVNNFDNNTLISHHTPDVLPIQSKKAIRKRGIIQRNEKGEIKYQQGDAVRGALHKESFYGAIKREETNKKGEVEEVVKYVLRKPIDSFSDTDIKHIVDDKIKEIVTNARKEEKIIKKEIETLKKKINKVNDAEEVILKAEIEVLIHKMEHELYILPNKNGSPIPIKKIRYFATDVKVPLEIKKHRDASRHEHKQHYFAKNDSNYCMAIYEGIDGKGRVTRSNLLINNLEAGSYFKKSNVNNQLYPIAPEKDKNNNPLKYILIKGKMVLVYDKNPEELFEMDEQQLLERLFQITQLDVEKSAEIKLLHHTEAREKKTLTSIMGLKSGMKGGKNIGEHKKYPWIKVGVNSFDCLVEGYDFKINSIGKLEII

SEQ ID NO: 8460 - protein, 1438 aa, synthetic construct
  REGION 1..1438: note = Synthetic
MAKILGLDLGTNSIGWAIVDKDGSEFALVDKGVRIFSEGVNIEAKTNSESSKAAKRTEYRSARKLKYRRKIRKIDILKVLSDNDLCPKLSDDDLNKWRYKKIYPQNDEFRVWLSTDSHENENERKKQNENPYFFRYRSANESLNLNNKKDRFVLGRAFYHIAQRRGFLSNRLDSSDNSIIEEKKDEITSLINDAVTIFDFSEMFSDFLLNFDKDEASDKPLFALSRAFNTIIKEQAVLNYNDLKEKLIERLNRKEFLGPVKRAISDLSEKIVKSNCSTLGQYFYTLHQTGQKIRGEYTHREDHYLAEFNFISDKQSLDTELREKIKEAIFFQRPLKSQKGLVAKCPLENRKACVPISHPDFEEFRMLSYLNNVKIKLPIDEKLRLLNDDERQQIQSLFFRKSKANFDFVDIAKKLTPKNLKSGYYRDKNVTEYDVLFNYNFGSNVAGCPTIANLIEVFGLDWKTYLYSNFVKNTKIENNVRVKKTVEDIVDDVWHVLFRFDKEERLKQFAIDNFNCDDKIATKFSKIKLKLDYGSLSLKAIRNILPYLRMNLIYSHAVFLANMKNVLPKEIWDNEENKAIINNEINSIIENYKAYSNRIDVVNGLIKNVKKDNGTWSSDNQFVAEAYRNSLNKQIKDFFGAKKWNETSETYQNEILSECFELFVNQMKLNSGRGEFAKKKTIDEILKVFLSDNFDVNDDDLKRLYHPSAIEVYKKAKRGEDDGKLYLGSPIISSIKNPMAMRSLHQLKKVVNQLMKDDLIDEDTIIHVEMPRELNSANERVAIRQWQEDLKNRRSKYGAEIKSIFNGEIKNDSCNDSNTGYSDYEPTETDILKYQLWIEQNKVCLYTGKTICLSDFIGNNPKYDIEHTIPRSRSLDNSQVNKTLCCAIYNRQIKKDKIPFECENYDEILPRIKHWYARYKTLEEQIKELSKKVKAASIKEKRDKYIIDRTKLRFEHTYYYKKYKSFTMEEVPEGFKNSQSVDIGIISKYGNLFLKTVFSKVYPIKGKTTANLRQMWGLEEKTRDNHAHHAKDAVVVACCTRDINDALANYYHDLEQFEFFGKPKPSFAHRIPWDGFHKDVADFDKNTLISHHTPDVLPIQSKKAIRKRGIIQRNEKGEIKYKQGDTVRGALHKESFYGAILREEISKKTGKPEEVVKYVKRQAIELFKDADLKNIVDDKIKEIVINGREQEKQLKKEIDDLKKQMRDLKEEDEQPLRDSIQLLENKIKNGLYVLPNGSGAPVPIKKIRYYTSDVTNPLFIKKHRDVSRHEHKQFYHVKNDGNYCFALYSGKDDKGKIISEYKVVNNFEAGKYYNSKENTHKYPLEFNLQDKNKNILDLKFLLKTGTLVLFYKDFEDEIWELENFDLVKRLYKTVAIESDGRVQFRLHSTSKPDGLLEKSSEINFDIANEKLRLSKSALKILVEGFNFKISVSGKIQKV

SEQ ID NO: 8461 - protein, 1436 aa, synthetic construct
  REGION 1..1436: note = Synthetic
MAKILGLDLGTNSIGWAIVKKDNNNFSLVDKGVRIFSEGVNIEAKTNSESSKAAQRTGYRSARKLKYRRKVRKIDLLKILSDNNLCPKLSDRELSDWRYKKIYPQNDEFRRWLSTDNQDNENERKKQKDNPYYFRFISVKNSLNLSNKLDRYYVGRAFYHIAQRRGFLSNRLDSSDNSIIEEKKFDINSIINESHSISEFSELFIDFLSLFDKDEALDKPLFTLSRAFNTIIKDNSTLVYNELKEKLIERLNKKEFLGPVKRAISDLSEKIEDAKCLTLGEYFYTLYEKGEKIRGEYTHREDHYLKEFETICSRQNIASELKDKIKEAIFFQRPLKTQKGLVAKCPLENRKACVPISHPDYEEFRLYSYLNNIKIKTLNDDKLRVLTADEREQIDFLFYRKSKANFDFAEIAKKLTPKNLKPGYYKDKNSKEYDVLFNYNLGSNVAGCPTIANLREVFGKDWKVYLSSNFLKNTKTENNKVVRKTEEDIIEDIWHVLFRFDKEELLKQFAIDNLSCDEKTANKFSKIKLKQDYGSLSLKAIRNILPYLRENLIYSHSVFLANMKNILPAEIWNNEENKRVINNEINSILENYKVYSNNIEIVNGLINNIKKENGTWSSDNKFVAEIYKKDLEKQVKDFVGTKKWNETPIAYQASILKECFELFSTQMQLKSGRGEFAKKKTIDEILKQFLNDNFNVDEGGLKKLYHPSAIEVYKKAKRSEDDGKLYLGSPLISSIKNPMAMRSLHQLKKVVNQLIKDDLIDEETVIHIEMPRELNSANERVSIRQWQEELKNRRNKYAEEIKSIFRGDIKTDDCSDVKSLEYEPTENDILKYQLWIEQDKVCLYTGKTICLSDFIGSNPKFDIEHTIPRSRSLDNSQTNKTLCCSIYNREVKKDKIPFECGNNDEILLRISHWYAKYKGLEDQIKDVSKKIKVASTKENRDKNIIKRTKLKFEHTYYYKKYKSFTIEEIPEGFKNSQSVDIGIISKYGNLFLKTAFSKVYAVKGKTTANLRQMWGLEEKTRDNHAHHAKDAVVVACCTRDINDALANYYHDLEQFEFYGKPKPSFSHRIPWKGFNDDVKEFDKNILISHHTPDVFSTQSKKAIRKRGIIQRNEKGEIKYKRGDSVRGALHKESFYGAILREELDKKTGKTEEVVKYVKRQSIDLFKDTDLKNIVDDKIKEIVEKGREQEKQIKKDIEELKKQMKNVKEEEEQQFKVAIQLLESKIKNELYVLPNQNGSPVPIKKIRYFTNDVSNPLLIKKHRDVSRHEHKQHYFAKNDGNYCFAIYEGKDKKDKFITEYKVVNNYEAGKYYNSKANTHKFPLEFNVEDKNKNVLELKFLLKTGTLVLFYKNFKDEIWELDNLDLAKRLYKTVAIEADGRIQFRLHSTSKPDGQLEKSSEINFEIAKEKLRLSKSALNVIVEGFDFKISSTGKISKM

SEQ ID NO: 8462 - protein, 1435 aa, synthetic construct
  REGION 1..1435: note = Synthetic
MAKVLGLDLGTNSIGWAIVEKEKDEKEFILLDKGVRIFSEGVNLEPKTSSESSKAAQRTGYRSGRKLKYRRKLRKLELLKVLSDNNLCPILTDEELKLWRYKKIYPTNDDFRLWLSTDNQDDKIERKRQNKNPYVFRFKASTQKLDLNKTSDRHELGRALYHIAQRRGFLSNRLDTSDNSIVEEKNSEIEEIVHQSTTVEDFLKTYDEFLEAYDKTEANSKALFTLGRAFKSILKENVNEEFNSVKEKLLERLNRKEFLGKVKSAISDLSTKMEEANCNTLGEYFYGLHKEGQRIRNHYTHREEHYLHEFHVICDQQNLSPTLKKDIENAVFFQRPLKSQKGLVAKCPLENDKACVPVSHPDFELFRMYGFINSIKIRPVEEDKLRFLNSEEKISIEPLFYRKSKPNFDFEEITKKLTPKNLKSGYYKDKNVKDFDILFNFGNYTNVSGCPTIANLRTVFGDDWKTYLIQNFNKKNKNDSSKSEHQIVDAIWHVLFRFDKIEKLKQFAKAYLDCDDDMATKFSKIKLKQDYGSLSLKAIRNILPYLEKDLIYSHAVFLANMKSVLPKDVWNNEEDRKVINNEVFSIIENYNTYRNTVDIVNGAIKNVKDNQETWNAKNTFVIDAYKKDINKSIQDYYGLKSWDSFSEEEKDTILKDSFKLFSTQMELNLGRGEFLKKETLDERVKEFLRDNFNVSEASLKALYHPSAIEVYKKAKRSDKDGKLYLGSPLISSIKNPMAMRALHQLRKVINQLIKDDAIDENTIIRIEMARELKSANERVAIRQWQNDLQNNRKDHIEAIKKLYKEDSGLDIEPSQDEVLKFQLWNEQNKICLYTGKTISICDFIGANPKFDIEHTIPRSKSLDNSQTNKTLCCSIYNRDVKKGKTPTECSNHEDIIPRIKHWYANYKSLENQIRDLTKKVRAATTKENRDSNIQKRTKLRFEYNYLRDKYKSFTMIEIPRGFKNSQSVDIGIISKYGNLFLKSLFSQVYPVKGKTTSNLRDIWGLDKKERDNHAHHAKDAVVVACCSKDINDALAEYYHNYEDYKFYGKPKPSFKHRIPWKGFNNDVRDFDDNTLISHHTPDVLPIQSKKAIRKRGIIQRNKNGEIKYKQGDTVRGALHKESFYGAIKREEKNKKGEVEDVIKYVLRKSLDSFSDTDLRNIVDDKIKEIVTNGRLQEKVYKKEIETLKKQINKVNDAEEEVIRAQIDMLSNKIENELYVLPNRNGNSIPIKKIRYFATDVKVPLEIKKHRDVSRHEHKQHYFAKNDSNYCMAIYEGVDANGKIKRSNILINNLDAGSYFKMSNTNNKIYPIAPEKDENNNPLKCVLTKGKMVLVYDKSPNELHDMEASQLLERLFQITQMDVEASCIKLLHHTEAREKKVLTTFMGLKTGMKGGKNIGEHKKYQWIKAGVNSFDCLVENYDFKITVSGKLEFIKN

SEQ ID NO: 8463 - protein, 1434 aa, synthetic construct
  REGION 1..1434: note = Synthetic
MNKILGLDLGTNSIGWAIVEKEKSEKEYSLIDKGVRIFSEGVNIEAKTSSESSKAAQRTDYRSGRKLKYRRKLRKLRLLKVLSDNNLCPTLSDEELNLWRYKKIYPENDGFRLWLSTDNQDNETERKKQNKNPYAFRYKVSTQKLDLNTTVEKHELGRALYHMAQRRGFLSNRLDTSDNSIIEEKNSEIEDIIQQCNTSEELLKIYNEFLEVYDKSDAYSKALFTLGRAFKTILKENVNAEFVAIKEKLLERLNRKEFLGKVKSAISDLSAKIEEANCNTLGEYFYGLHKEGLRIRNNYTHREEHYLHEFHVICDQQNLSTILKKEIENAIFFQRPLKSQKGLVAKCPLENDKACVPISHPDFELFRMYGFINSIKTKPIDEDKLRFLNTEEKLIIAPLFYRKSKPNFDFEEISKKLTPKNLKSGYYKDKNTKDFDILFNFGSYTNVSGCPTIANLRSVFGEDWKTYLIQNFKKKNKDNSNKTEDQIIDAIWHILFRFDKTEKLKQFVIDYLGCDEVTAIKFSKIKLKQDYGSLSLKAIRNILPYLEKGLLYSHAVFLANMKTVLPKEAWNNETDRHVINKEVFSIIDNFNTYKNRVDIVNGLIKKVKDNKETWSDNNTFVIEAYKKDIVRNIQDYFGLKRWDSFSEEKQKKLLKDSFSVFSSQMKLNSGRGEFLKRETLDERVKDFLRDNFNIEEDKLKKLYHPSAIEVYNKAKRSDKDEKLYLGSPLISSIKNPMAMRALHQLRKVINQLIKDDAIDENTIVRIEMARELKSANERVAIRQWQNDLQNNRKEYVGAIRKLYKEDCGLDIEPSQDEILKYQLWLEQNRVCLYTGKSIGICDFIGANPKFDIEHTVPRSKSLDNSQTNKTLCCSIYNRDIKKDKIPTECSNHEEILPLIKHWYAKYKNLETQIRDITKKVRVASTKEGRDSYIQKRAKLRFEYNYLKHKYRTFTITEIPKGFKNSQSVDIGIISKYGNLFLKSLFIKVYPVKGKTTSNLRDIWGLDKKERVNHAHHAKDAVVVACCSKDINDALAEYYHNYEDYKFYGKPKPSFKHRIPWKGFNNDVKSFDVNTLISHHTPNVLPIQSKKAIRKQGIIQRNEKGEIKYKQGDTVRGALHKESFYGAIKREETNKKGEVEDVIKYVLRKPLESFSDTDLKNIVDDTIKAIVINGRSQENILKKEIETFKKQINKVNDAEEQIIKAQIEILSNKIKNELYVLPNKNGKPVPIKKIRYFTTDVKAPLEIKKHRDISRHEHKQHYFAKNDSNYCMAIYEGVDVKGKVKRSNLLINNLDAGSYFKKSNTDNEIYPIAPEKDENNNPLKYILTKGKMVLVYDKTPNELFDMEGSQLLERLFQITQMDVEASCIKLLHHSEAREKKSLTSFMGLKSGMKGGKNIGEHKKFPWIKVGVNSFDCLVEGYDFRISASGKLEFVN

SEQ ID NO: 8464 - protein, 1433 aa, synthetic construct
  REGION 1..1433: note = Synthetic
MSRILGLDLGTNSIGWAVVEKDKNEKEFTLIDKGVRIFSEGVNIEAKTSSESSKASQRTGYRSSRKLKYRRKLRKLELLKILSDNNLCPKLSDEELKLWRYKKIYPNNDKFRLWLSTDNQDNELERKQQIKNPYAFRFKASTQKLDLNNLNDRNELGRAFYHIAQRRGFLSNRLDTSDNSIIEEKNSEIEDIIQQCNTPEELLKIYNEFLESYDKTDTNSKALFTLNRAFKSIIKENADEAFDDIQEKLSERLNRKEFLGKVKSAISDLSSKIEEANCNTLGEYFYGLHKEGQRIRNNYTHREEHYLHEFHAICDHQNLPNTLKKDIENAIFFQRPLKSQKGLVAKCPLENDKACVPKSHPDFELFRMYSFINSIKIKPENEDKLRVLNTDEKALIEPLFYRKSKPNFDFEEISKKLTPKNLISGYYKDKNAKNFDVLFNFGNYTNVSGCPTIANLRYVFGEDWKSYLVKKFNKKNKDNSNKTEYQIIDAIWHVLFRFDKTKKLKQFVKDYLDCDEETASKFSKVKLKQDYGSLSLKAIRNILPYLEKGLLYSHAVFLANMKHVLPKDIWNNETDRSVIKKEVFSIIETYNTYKNSVDIVNGIIKNIKDKQESWNDKNTFVVDAFKKDIDKNIQDYFGLETWNSFSEDKKETILNDSFQRFSKQMALNSGRGEFLKKETLDERVKDFLRDNFNVSEFQLKKLYHPSAIEVYDKAKRSDKDGKLYLGSPLISSVKNPMAMRSLHQLRKVINQLIKEDAIDENTIVRIEMARELKSANERVAIRQWQNDLQNNRKDYIGAIKKLYKEVCGLEIDPSEDEILKYQLWLEQNRICLYTGKTISICDFIGANPKFDIEHTIPRSKSLDNSQTNKTLCCSIYNRDVKKNKIPAECNNHEDILPRIKHWYAKYKSLEDQTRDITKKVKAAATKENRDSYIQKRAKLRFEYVYYRNKYKTFTMTEIPKGFKNSQSVDIGIISKYGNLYLKSLFSKVFPVKGKTTSNLRDIWGLDKKERDNHAHHAKDAVVVACCSKDINDALVEYYHNYEDFKYYGKPKPSFKHRIPWKGFNKDVKNFDDNTLISHHTLDVLPIQSKKAIRKRGIIQRNKKGEIKYQKGDTVRGALHKESFYGAIKRKEKNKKGEVEDVIKYVLRKPLDSFSDTDLKNIVDDRIKEIVTNGRKQEKQLKKEIETLKKQINKVNDVEGQKMEAQIEDITNKIDNELYVLPNKNGSPIPIKKIRYFANDVKAPLEIKKHRDVSRHEHKQYYFAKNDSNYCMAIYEGINDEGKVSRSNLLINNLEAGSYFKTSNTNNQLYPIAPEKDENNNSLKYILTKGKMVLVYDKMPNELFEMAESQLLERLFQITQMDVEASCIKLLHHTEAREKKTLTEFMNLKTGMKGGKNIGEHKKFPWIKVGVNSFDCLVEGYDFIITPTGKLKFI

SEQ ID NO: 8465 - protein, 1433 aa, synthetic construct
  REGION 1..1433: note = Synthetic
MAKILGLDLGTNSIGWAIVEKYNNEKEFTLIDKGVRIFPEGVNIEAKTSSESSKAAQRTDYRSGRKLKYRRKLRKLELLKVLSDNNLCPKLTDEELKLWRYKKIYPDNDQFRLWLSTDNQDEKLERKAQIKNPYAFRFKASTQKLDLNRISDKHELGRAFYHIAQRRGFLSNRLDSSDNSIVEEKNNEIEEIIQHATTVNDFLQTYDDFLDAYDKTDDNSKALFTLGRAFKSILKENTTEELHDVKEKLLERLNRKEFLGKVKSAISDLSAKIEEANCNTLGEYFYGLHKEGKRIRNNYTHREEHYLHEFHIICDKQNVSSTLKKAIENAIFFQRPLKSQKGLVANCPLENDKACIPISHPDYELFRMYSFINSIKIKTEKDDKLRFINSEEKELIIPLFYRKSKPNFDFKEIVKKLTPKDLKSGYYKDKNVQDYNVLFNFGNYTNVSGCPTIANLRSVFGDNWKTYLVENFNKKNKDNSNKTPYQIIDTIWHVLFRFDKTEKLKQFVINYLGCDADTATKFSKIKLKQDYGSLSLKAIRNILPYLEKGLLYSHAVFLANLKTVLPKSIWNNEADIKVINKELFSIIDSYNIYKNTVDIVNGLIKTVKNNKETWSDKNSFVVEAYKKDINKSVISYYGLKRWDLFLHEEKEIILTDNFKLFSTQMKLNPGRGEFIKKETLDERVKAFLSDNFNVEPEQLKKLYHPSAIEVYKQAKRSEIDGKLYLGSPLISSIKNPMAMRALHQLRKVINQLIKDDAIDENTIVRIEMARELKSANERTAIRQWQNDLQNRNNDYKKEIIAILKGELQAVNCNDVVNSNYEPTENDILKYQLWKEQNHICLYTGKTICISDFIGANPKFDIEHTIPRSKSLDNSQINKTLCCSVYNRDIKKNKIPTECNNHEEIMPRISHWYAKYKNLENQIRDITKKVRGATTKENRDKYIQNRTKLRFEYNYLKNKYKTFAITEIPRGFKNSQSVDIGIISKYGNLFLKSLFTKVYPVKGKTTSNLRDIWGLNKKERINHAHHAKDAVVVACCEKDINDALASYYHNYEDYQFYGKSKPTFKHRIPWKGFNTDVNNFDNNTLISHHTPDVLPIQSKKAIRKRGIIQRNGNGDIKYKQGDTVRGALHKESFYGAIKREETNKKGDIEEVVKYVLRKPIDSFSDSDLKNIVDDRIKEIVTNARKEEKIIKKEIDTIKKQINKVSNAEEVILKAKIEKLIYKMEHELYVLPNKKGNPIPIKKIRYFTKDVSNPLKIKKQRDTSKHEHKQHYFAKNDSNYCFAIYEGINNNKKPLKEFRVVNNFEAGKYFTANDTNSKQPLELNIIDKHKNILTLKFLLKTGTLVIFYENDKNEIYDLEDSELSKRLYKTVAIESDGRVQFRHHTVAKPDGELKKSSSVNFQIPNEKLRLSKSGLNIIVQGVDFNINSTGKIKKI

SEQ ID NO: 8466 - protein, 1426 aa, synthetic construct
  REGION 1..1426: note = Synthetic
MTKILGLDLGTNSIGWAIVEKDNNEKEYKLIDKGVRIFSEGVNIEAKTSSESSKAAQRTSYRSGRKLKYRRKLRKLELLKVLSDNNLCPKLTDEELNLWRYKKKYPTNDDFRIWLSTDNQNDKLERKEQNKNPYAFRFKSSTQKLELNNVINRHELGRAFYHMAQRRGFLSNRLDTSDNSIIEEKNNEIEDIIQQSNTKEELFLDYNNFLEAYDKTDTQNKALFTLGRAFKTILKDNANEELVSLKEKLLERLNRKEFLGKVKSAINNLSEKITEANCNTLGEYFYGLHINGQKIRNNYTHREEHYLQEFHIICDKQNLSLTLKKDIENAIFFQRPLKSQKGLVAKCPLENDKACVPISHPAFELFRMFSFLNNIKIKPQNEDKLRILNTDEKAIIKPLFYRKSKPNFDFEEITKKLTPKHLKSGYYKDKNAKDLDVLFNFGNYTNVPGCPTIANLRSVFGEDWITYLNQNFTKKNKDNSNKSENQIIDAIWHVLFRFDKTEKLEKFAINNIGCDKITALKFSKIKLKQDYGSLSLKAIRNILPYLEKGLLYSHAVFLANMKTVLPKDIWNNEKDRKIINNEVFSIIENYNTYKNIVDIVNGLIKNVKNNKETWSDSNIFVINAYKKDLDKNIKEYFGLKLWDSFSEDKKEMLLKDSFTLFSTQMKLNFERGQFLKKETLDERIKEFLRDNFNIEDYKLKNLYHPSAIEVYNKAKRSDKDGKLYLGSPLISSIKNPMAMRALHQLRKVINQLIKDDAIDENSTIRIEMARELKSSNERVAIRQWQNDLENNRKSYVNDIKKLYQEQCNLEIEPTQDEVLKYQLWIEQNRVCLYTGKSIRVCDFIGANPKFDIEHTIPRSKSLDNSQTNKTLCCSIYNRDIKKDKIPADCVNHREILLRIKHWYAKHKNLEDQIRDITKKVRAATTKENRDSNIQKRAKLRFEYNYLKHKYNTFTMTEIPRGFKNSQSVDIGIISKYGNLFLKSLFTKVYPVKGKTTSNLRDIWGLEKKERVNHAHHAKDAVVVACCSKDINDALAEYYHNYEDYTFYGKQKPSFKHRIPWKGFNNDVKNFDKNILISHHTPDALPIQSKIAIRKRGIIQRNEKREIKYKQGDTVRGSLHKESFYGAIKREVINKKGESSEIIKYVLRKPLESFSDTDLKNIVDDTVKEIVCNARKLEKGLKKEIEGLKKEINKVNDVEEQIIKDKIGVLSNKIENELYVLPNKNGNPVPIKRIRYFTTDVSNPLIIKKHRDASRHQYKQHYFAKNDGNYCYAVYEGINNKAKKLKEFRVVNNFEAGKYFTSNESNSKEALESNIIDKNKNILTLKFILKTGTLVLFYENYRSEVHDLDNIGISKRLYKTVAIESDGRVQFRHHTIAKPDSELKKSSSVNFQEPNEKLRISKSGLNILVQGYDFEISPSGKVKFNNH

SEQ ID NO: 8467 - protein, 1449 aa, synthetic construct
  REGION 1..1449: note = Synthetic
MAKILGLDLGTNSIGWAIVDKDGNDFSLVDKGVRIFSEGVNIEAKTNSESSKAAKRTEFRSARKLKYRRKIRKIELLKVLSDNNLCPKLSDDELYDWRYKKVYPQNDEFRIWLSTDSQDDEAERKKQIKNPYSFRFKGAKENLNLNTKEDRYVLGRAFYHIAQRRGFLSNRLDSSDNSIIEEKNSEITGIIIDATSILEFSDLISEFLSSYDKEETSNKPLFTLSRAFNAIIKENSTLVYSDLKEKLQERLNKKEFLGPVKRAISDLTEKIQDEKCATLGEYFYTLYQKGEKIRGEYTHRIDHYLTEFNFICKKQNIPNEIKEKIEKAIFFQRPLKSQKGLVAKCPLENRKACVPISHPDFEEFRMLSYLNNVKIKLPTDEKLRLLNEDEKEQIQSLFFRKSKANFDFIDIAKKLTPKNSKSGYYKDKNVSEFDVLFNYNLGSNVAGCPTISNLVDVFGSDWKKYLLSNFVKNTKVESNTKVQKSIDDIIDDVWHVLFRFDNEELLKQFAIENLNCDEKTATKFSKIKLKQDYGSLSLKAIRNILPYLRQTLIYSHAVFLANMKNILPAEIWNNEENRNIINKEINSIIENYKLYSNNIDIVNGLIKNVKKENGTWNSTNVFVAEAYKNALNKKVKDFFGTKKWDETPETFQAKVLSECFDLFTNQMKLNSDRGEFAKKQTIDEILKAFLSDNFNVTEESLKKLYHPSAIEVYKKAKRSDEDGKKYLGSPLISSIKNPMAMRSLHQLKKVVNQLIKDDMIDEDTSIHIEMPRELNSSNERVAIRQWNEDLKNRRNKYTEEIKSIFRGEIITEGCNDSNPNYNDYEPSETDILKYQLWIEQNKVCLYTGKTICLSDFIGNNPKFDIEHTIPRSRSLDNSQQNKTLCCATYNRQTKKDKIPFECANHDEILPRIKHWYAKYKGLEQQIKDLSKKIKAASTKEKRDKYIIERTKLRFEYSYYFKKYKSFTMEEVPESFKSSQSVDIGIISKYGNLFLKTVFNKVYPIKGKTTANLRQMWGLNEKSRDNHAHHAKDAVVVACCTRDINDALANYYHDLEQFDFFGKPKPSFSHRIPWEGFHKDVDNFDNNTLISHYTPDNLPIQSKKAIRKRGIIQRNEKGEIKYKQGDTVRGALHKESFYGAIKREELNKKTGETEEVIKYVKRQGIEMFKDADLKNIVDDKIKEIVTNGREQEKQIKKEIEELKKQLKNLKEEEEQPIKESIQVLENKIKNDLYVLPNKSGNPVPIKKIRYYTSDVTNPLFIKKHRDVSRHEHKQFYHAKNDGNYCMAIYEGLDKKGKISRSNQLINIIDAGKYFKLSNEDKKQYPIAPEKDENLNSLKYILTKGKMVLIYDKSPNELFEISEEKLLERLFEITQLDVEKYAEIKLLFHSEARDKKRITEFMGLKTGMKGGKNVGEQKKYPWIKIGANTFDCLVEGYEFVLTPTGKIKFLK

SEQ ID NO: 8468 - protein, 1433 aa, synthetic construct
  REGION 1..1433: note = Synthetic
MTQKILGIDLGTNSIGTSVRNTDLGNNLVDQLEFFSSDIFNASVNGEGVNGGKGGREYSLASSRSAKRRKRRLYEHRRYKLWATLDLLIKNNLCPMTPESLEQWRTYDKKKKLFRQYPIDDKAFHSWIILDFNGDGKPDYSSPYQLRRELVSVQLDFNQAIDRYKLGRALYHIAQHRGFKSSKGETIAEQEKQEDDSKKDKKKALAEEHVDAIKASEEKHSKGLSTYMQEHNLKTVGVAFAQLEDEGIRIRKNSEYKAIRSQHQDEIKEIFKFQKGLSEQTQLLDTLISEKQGIGTIFYKRPLRSQRGNVGKCTLEPRKPRCPIGHPLFEKFRAWTFINNIKAKSPDSDSAEPLPMDLKINIYNKLFLSRVKEDFKFEEIRYFIEKQWGVALSKDDKTINYRDDTSVAGCPITARMIKVLGENWENFQVLGTKERQTQGKSNNALHQVCYTAEDIWHLCYDAEDSGKVRTFAEEILGWDEKKASELVRLWSAIPQGYAMLSQKAIRNINRMLLFGLKYSDAVLLAKLPDILELSDEDIQTIIKKVQQLEEVVNEEKRIGNIVNSLIANYKAESLEHRFADHNYEYQLDESDEREIIKHIESNIGKQRWELMDADEQISILEGVRSGYQAFFARHKRTFVELPQLGKRLVELLSKVYPSVEKKQWERLYHPSQIAIYRPILLDNSDENKRLGNPNIGAIKNPTVMRTLNNLRRRVNQLLDDGVLVPDETRVVVETARDLNNANAKWALEQYQEIRRKENKKIKDILEEFYPQFSNITSTDVDRARYVIEQYEEDNYKLEKEIGTYSKNINKYKCWLEQGGQCLYTGRIISLSNLFDSNAFDLEHTIPASVSFDNSDQNMTLCEAHYNRFIKKNNIPTAMPNYEKDVTIDGKLYTAIKPRLEKWKKRIKRLSRNVEYWKVQARRAQMKDDKDKYTKEKLLWQMELQYWKDKLQRFTILEVTDGFKNSQLVDTRIITRHATLYLKSVFKNVEVQRGSTTAEFRKILGLQSVEEKKDRTLHSHHAIDATVLTTIPAAAKRDRILELFYKVQEKERILKNYSGDAPIGLKQDLEGLQEKLKKEVEACKLGNKLGQLGSFINENIIISHNVKDQTLTPSRKRLRRRGRVVYNKKRENDNDKNPIWQTGDTLRGEIHKESYYAAITQYAKDKDGNVLLNNGKPKIDPTIWYVIHRELTYFDDWKPLEKVIVDKNLYKLMKEQFPDGTSFKKACEQGFYMIKKGKDKEHNIKTHRIRHVRCYSDVKGALKIKEQTNKSTKEYKQYFYAAVGDLYTMCCYTNGKNKEYRVYRLYDIAQHRKSGIEDIPEFITDEKGNRLEWAYRLRSGDMILLYENTPEELYDMDPVNLKQRLYKVDRFESKGPTICMTHHLIANGERGKSIKDYNKMPPTARCSVNTLKFLIMGEHNDFVIKGNNIIFNHR

SEQ ID NO: 8469 - protein, 1432 aa, synthetic construct
  REGION 1..1432: note = Synthetic
MVQKILGIDLGTNSIGTSVRNTDLGNNLVDQLEFFSSDIFNASVSKNTNGREYSLASDRSAHRRGRRLNDSRRRKLWATLDLLIKNNLCPMAPESLEQWRTYDKKKKLFREYPIDDKAFHSWIILDFNGDGKPDYSSPYQLRRELVSVQLDFNQPVDRYKLGRALYHIAQHRGFKSSKGETIAEQEKQEDDSKKNKNNALTEEHVDVVNAMKASEEKLSKGLLAYMQEHNLKTVGAAFAQLEDEGIRIRNNSEYKAIRSQHQDEIKEIFKFQKGLSNQTQLLDTLISEKQGVGTIFYKRPLRSQRGNVGKCTLEPNKPRCPIGHPLFEKFRAWTFINNIKAKSPDSDSAEPLPMDMRINIYNKLFLSRVKADFKFEEIRHFIEKQWGVALSKDDKTINYRDDTSVAGCPITARMIKVLGEDWENFHVLGTKERQTQGKSNNALHQVCYTAEDVWHLCYDAEDPEQVRTFAEETLGWDEKKAAELVRLWSAIPQGYAMLSQKAIRNINRMLLFGLKYSDAVLLAKLPDIVELSDEDIQTIIKKAQQLEEVVNEEKRIGNIVNSLIANYKAESLEDRFADHNYEYQLDESDEREIIKHIESNIGKQRWELMDADEQTSILEGVRSGYQAFFARHKRTFVELPQLGERLVELLSKEYSSVEKKQWERLYHPSQIAIYRPILLDKSDEKRRLGNPDIGAIKNPTVMRTLNNLRRRVNQLLDDGVLVPNETRVVVETARELNDANAKWALEKYQKTRRDENAQIKKILEEFYSKPNGITDTDVDKARYVIEQCEEDNYKSKKEIGTYSKDIQKYKYWLEQGGQCLYTGRIISLSNLFDSNAFDLEHTIPASVSFDNSDQNMTLCEAHYNRFIKKNNIPTAMPNYEKDVTIDGKLYTAIKPRLEKWKKRIERLSRNVEYWKVQARRTQMKDHKDECTKEKLLWQMELQYWRDKLQRFTILEVTDGFKNSQLVDTRIITRHATLYLKSVFKKVEVQRGSTTAEFRKILGVQSVDEKKDRTLHSHHAIDATILTTIPTAGKRERILELFYKVQEKERILKNCSGEARIGLKQDLEGLQLKLKKEVADCKLGGEISQLGNFINDKIIINHCVKDQTLTPSHKRLRRRGRVVGGKEHPIWQTGDTLRGKIHKESYYGAITQYAKDEYGNVLFNDGKPKIDPTIWYVIRRELKYKKSAQDTGFASWDDLEKVIVDKNLFKLMKEQFPEGTSFKDACEQGIYMIKKRKDQEHNIKTHRIRHIRCHTSVRSALKIKEQLNKSTKDYKQYFYAESGDLYTMCCYTNGKKKEYRPYRLYDIAQHRKAGIEDIPEFITDKKGNRLELSYKLCSGDMILLYENTPEELYDMDPVNLKQRLYKVDRFESESSRIYLTNHLIANGEVGHSIKDYNQMPPTVRCGVNTLKFLIMGEHNDFVIKSNNIIFNHR

SEQ ID NO: 8470 - protein, 1426 aa, synthetic construct
  REGION 1..1426: note = Synthetic
MEQKTLGLDLGTNSIGISLRNPALGENLKEQLEYFSSDIFEAGVGTDKSGEFSYAAQRTTFRSARRLKLHRRRRLQATLRLLMDHKLCPLSEDSYKQWSVYDKTQNLKREYPIGDEGFNRWIKLDFNADGKPDYTSPYQLRCELATTQLDFSSPENKFKLGRALYHIAQRRGFKSSKGETIAEQEKNEKFSANSDDLEQEMKKSEMKRSKGLRELLETQGLKTIGQAFAYLESQGMRIRNNEDIQATRDLYEKEITYIFNFQKELSIESELYKRLVSTKKDEGTIFYKNPLRSQKGLVGKCTLEPKKGRCPIGHPEFEKFRAWAFINNIRYRRTIDSEWQEPTIEMKERLYRDVFTARVKADFLFSEIRKWLEKELEVQLHWDNNKSLRTINYADKQNVAGCPVTARLVKLLGTDWERFQQEGRKEHKTHSKQHPTKHTVCYSALDIWHVCFQADELEDVQSFAKDSLQWDDEKCKLLLRVWTSIPQGYAMLSLKAIRNINRMLCRGLKYSDAVMLAKVPEIAGMNESDIDTLIETFSKDLKTEVDRTKDIYIITNSLIADYKSLSFEDRFAEHDTSYCLQESDKEDIVQHIIKHFGEVTWGLMDAEEQETLMNEVEQLYQNFFSKTKRNFYDIPTYASTLRAFLCEKFPHVDEQAWAKLYHPSQIASYHPERDKNCPDSWRLGTPNIGAIRNPVALRTLNILRRKINALLDANMIDPLETRVVVETTRTLNDANMRWAIDRFQKKREEQNKTIRSILEKEYTTRAISETDINTARYILEQREEHIYQTEKTGELQHDFSFNIDTKRYKLWLEQGGICFYTGKVINLTNIFNDNAFDIEHTLPRSKSFDNSDANLTICDAHYNRYIKKNTLPAHLPNFEHDQTINGTLYTAIKPRLEMWRKRVERLKANVEFWKNRTRRAQNKGTRDKCIRQRHLWQMELNYWQEKLSHFEMEEIKEGFRNSQLVDTGIITRHAALFLKSLFKNVEVQKGSVTADFRKILGIQSVDEAKNRDKHSHHAIDATILTTIPIAAKRDRMLEIFLRIKELKKILCFSKDTNKQQEIISLNQKLQYEINSCHLGNDIASLPSYIENNIIIRHLRKEQTQQNSRRTIRIRGKKIYVTDHHGNKHKKWSSGDSIRGELSGQSFYGAITQWKKKTNRNETTNHKEQNIIDPTIYYVIRKPLVFKNNTSAPGFSSWEDLEKQIVNKALIPMMKSQFCEGTSFKEACGQPIYMLNRKGEKINVLRHIRCYVRIKNPIAVKKHTFLSSKPYKQNVYAGVGGLYAAAEYTNGNKRQFVIYSLKDIAQNKKKNNEIIPSKILNGTKTLTLQRLLHAKDSILIYEESPEELKKLSMTELSKRLYVIKGFEAAKIRIKAVNHLYNIDEIGETITDYQNLPITIRLSLNKLKFLLHGYDFKFTTSGLEFLDK

SEQ ID NO: 8471 - protein, 1425 aa, synthetic construct
  REGION 1..1425: note = Synthetic
MIQKIFGLDLGTNSIGSSVRNLELGENLTEQLEFFSSDIFGSSVSKNSNGREYSLAGNRSAHRRSRGLNEARRRKLWATLDLLIEHGLCPMSPDSLMQWRTYDKQKGLYRQYPIEDKDFNAWIMLDFNGDGKPDYSSPYQLRRELVVRQFDFDQPIERYKLGRALYHIAQHRGFKSSKGETIADQEKNEKKPIAEEGADIANEMKASETKLSKGLVAYMQENHLKTVGEAFAKLEDERVRIRNNESYRAIRSQYQDEIKEIFTYQKKLSVESELYERLTSEKKGVGTIFYKRPLRSQRGNVGKCTLERNKPRCPIGRPEFEEFRAWTLINNIKIRETAGEPYKQLPIKLRQELLKDCFLSKVKADFKFEDIRKYIEKRLGLSFSNDDKTINYKDSVSIAACPVTVRMKKLLGENWANCRIDGEKRRQAHGKNNNNEHIVSYTEEDIWHVCYNAEDPEEVSNFARKALHWDENKIKELVRLWTSIPQGYAMLSLKAIRNINRMLLLGLKYSDAVLLAKLPDIVPVSDEDILAITKEFLQLEDKLNQEKQINNIVNSLIANYKSKLEENRFADHNYQYQLGEGDDEDINTQIKSHIGAKLWVQIGADEQTKIFQAVRSKYQDFFKSYKRKFVESPKLGELLVAFLTEKFPNVKSKQWERLYHPSQIAIYRPIPVDNDRSKLRLGNPNIGAIKNPTVMRVLNTLRRRVNQLLDDGVISPDETRVVVETARELNDANTKWALDRYNRIRRDENEKIRKILKELNPTTNSISEQDIDKARYIFEQCETDFYTDGKVPYYNKDIKKYKLWLEQGGQCLYTGQTINLTNLFNPNAFDMEHTIPKSISFDNSDQNLTLCESYYNRFIKKNNIPTDMPNYDKDVTINGKEYTAIKPRLQRWKERVDRLSRNVDFWKGQARRAQDKDRKDECIREKHLWDMELAYWKGKLERFTMTDVTDGFKNSQLVDTRVITRHAVLYLKSIFNHVEVQRGETTAEFRKILGLQSIDEKKDRSLHSHHAIDATMLTVIPSAAKRDRMLELFYKIEETKKALKNYNDNNKTGLNLELKGLEEKLDKEKKDCRVGRRVNDLDRFINENIIVSHHTKDQALTPAHRRLRKRGKIVGGKEHPRWQTGDSLRGEIHKASYYGAITQFAKDANGKVLMKDGQAQIDPTIYYVIRRELKYKRSTQDSGFTNWEDLEKVIVDTDLFGLMKGQFPEGTSFKDACEQGFYMIKKGKNGEGDVKTHRIRHVRCKAVKTALRIKEQTYKSSKDYKQFFYAAVGDLYVMCYYTDGKKRDFKIYSLYDISNHRKSGTEDIPKFITDKKGNHLPLDYKLRTGDMVLLYKDNPEELKDLDQVNLKRRLYKVNRFESEGLIILLTHHLSTTTERGCSIGKIENYQNLPTAIRCGIKTIKFLIMGKHRDFVIRNGNIEFKH

SEQ ID NO: 8472 - protein, 1425 aa, synthetic construct
  REGION 1..1425: note = Synthetic
MTQKVLGLDLGTNSIGSSVRNLDLSDDLKGQLEFFSSDIFRSSVNKESNGREYSLAAQRSVHSRSRRLNEARRRKLWVTLDLLIKYGFCPMNPESLIRWRTYDKQKGFFREYPVDDKNFNAWILLDFDGDGKPDYSSPYQLRRELVTRQFDFNQPIERYKLGRALYHIAQHRGFKSSKDETILQQEANSKQSLTDETTDVAGEMKASEEKLSKGLSTYMKENNLLTVGAAFAQLEDERVRVRNNNDYRAIRSQFQREIETIFKFQQGLSVENELYERLVSEKKNIGTIFYKRPLRSQRGNVGKCTLERTKPRCAIGHPLFEKFRAWTLINNIKVRMSEEEQAEQLPMKLRLELYNDYFLAFVRAEFKFEDIRKYLEKRLGVHFSYNDKTINYKDSTSVAGCPIAARFRKLLGEDWESFRVDGHKQRQAHGKNNASFHTVSYTVEDIWHFCYDAEEPEEVLSFAQDSLKWEKKKADELVRIWSAIPQGYAMLSQKAIRNINKMLILGLKYSDAVLLAKVPEIVEITDEEILSVTEDYHRVEAQVGYEKQINNIVNALIAKYKSASEEYRFADHNYDYQLDESDEKDIIKQIESNIGTRKWSLLDADDQTDILQKVRDKYQNFFRSHERKFVESPKLRECFEEYLMKKFPMIEGEQWKKLYHPSQIAIYRPVSAGKDRSALRLGNPDIGAIKNPTVLRVLNTLRKRVNQLLDDGVISPDETRVVVETARELNDANRKWALDTYNRIRHDENEKIRKILEEYYPKRDTISTDDIDKARYVIDQREIDYFTESKTYNKDIKKYKLWLEQGGQCMYTGRTINLSNLFDPNAFDIEHTIPESLSFDSSDMNLTLCDAHYNRFIKKNHIPADMPNYDKAVMIDSKEYPAITSQLQRWVDRVERLNRSVEYWKGQARRAQNKDRKDQCMREMHLWSMELEYWKKKLERFTVTEVTDGFKNSQLVDTRIITRHAVLYLKSIFSHVDVQRGDVTAKFRKILGIQSVDEKKDRSLHSHHAIDATTLTVIPSSAKREHMLELFAKIEEINKILSFSGNEDRIGLKQELDGLKNQLNKEVKACRIGHNVSEIGTFINDNIFINHHIKNQALTPVRRRLRKKGHIVGGVDNPRWQTGDALRGEIHEASYYGAITLYEKDKDGKVIIKGGRPHVDPTIKFVIRRELKYKKSSTDSGFASWDDLQKAIVDKDLFTLMKGQFPEEMSFKDACEQGIYMIKRGKNGTPDKKLYRIRHIRCHTVQKNALKIKEQTYKSEKEYKRYFYAAVGDLFAMCCYTNGKTREFRTYSLYDVSCHRKSDIEDISEFITDKKGNRLMLDYKLHSGNMILLYKDSPDELYDLDNVNLSRRLYKINRFESKGNIVLMTNHLSTSKERGRSLGKTVDYQNLPESIRSSVKSLNFLIMGENRDFVIKNGKIIFNHR

SEQ ID NO: 8473 - protein, 1425 aa, synthetic construct
  REGION 1..1425: note = Synthetic
MTQKIFGLDLGTNSIGSSVRNPDLGSNLTEQLEFFSSDVFDNGVSKGESGREYSLAGVRSAHRRSRRLNEVRRRKLWATLALLIEKDLCPMSPESLEAWKTYDKKRGLYRRYPIGDEAFNSWILLDFNGDGKPDYSSPYQLRRELVTQQFDFTQKTERYKLGRALYHIAQHRGFKSSKGETIAAQEENDKIQITAESLDIASEMKASEEKISGGLQTYIEENGLRTVGEAFAKLEDEGIRIRNNSDYCAVRSQFKEEIKQIFKFQKGLSLESELYERLVSEKKGIGTIFYKRSLRSQRCNVGKCTLERNKPRCPVGHPEFEKFRAWSFINNIKIRSSVEDIFVYLPITLRKELYYERFLSYVKTDFKFEEIRKYLEKRLGLHFSYEDKTINYSDDTSVAGCPITVRLKKVLGDDWENFYKKGNKKKQGQGRINHEEHQVSYTWSDIWHICYNADELDSIEAFARNVLQFDENKIKDLKRLWAAIPQGYAMLSLKAIRNINRLLLLGLKYSDAVLLAKLPEIVPMSDDEILFISTEFLKLEKQLNEEKRIKAIINSLIAKYKSELEENRFADHNYEYQLDDEDEKIIVKQIEESIGKKCWALMGVEEQMEILQGVRAGYQKFFRSHERKFVELPKLGERLVNFLVNRYPNVGFEKWKQLYHPSQIAIYRPVQAKGDHSLLRLGNPNIGAIKNPVVMKVLNILRKRVNQLLDDGLISPDETRVVVETARELNDANTKWAIDNYDRNRSDERKRIEKILQEFYPNRKTISEQDIDNALYVLEQREGDCYTKDKGFYYKKDITRYKLWLEQGGLCMYTGKTINLSNLFNPNTFDIEHTIPESISFDSSDQNLTLCDAYYNRFIKQNRIPTDMPNYNKDMIIEGKEYSAIKPRLQIWEERIKRLRRKVEYWKAQACRAQDKDRKDKCIQQKHLWEMELSYWSAKLKRFTVTEVTDGFKNSQLVDTRIITRHATLYLKSIFSHVEVQRGSTAAKFRKILGIQASNEKKDRSLHSHHAIDATMLTVIPVSAKRDRMLELFYKIEEAEKAFRYYGNEGRNGLKQYLEGLHLKLTKEIKGCYIGRNVCNLEDFINDNIIVNHHYKNQAMTPAHRKLRKRGKIVGSMAHPQWQTGDSLRGKIHEDSYYGAITQFAKDIEGNVLVKDGQVQIDPTVIYVIRRTLKYKQSAQDSGFASWEDLENVIIDKNLFALMKAQFPEGTSFKEACEEGIYMIKKGKSGSEDVKMHRIKHVRCKAPKAGLKLKEQTYKSSKEYKQYFYAGVGDLYAMCSYTNGTIHIFKVYSLYDISCNRKAGIEDVPQFIIDNKGNRLSLEYKLQKGDMVLLYKDSPEELRDLDQINLKQRLYKVNRFESKGNLILLTNHLSATKERGSSLGKITSYQSLPAAIRCGISTIKFLIMGDHHDFVIRKGNIEFNR

SEQ ID NO: 8474 - protein, 1424 aa, synthetic construct
  REGION 1..1424: note = Synthetic
MTQKVLGLDLGTNSIGSAVRNLDLSDDLQWQLEFFSSDIFRSSVNKESNGREYSLAAQRSAHRRSRGLNEVRRRRLWATLNLLIKHGFCPMSSESLMRWCTYDKRKGLFREYPIDDKDFNAWILLDFNGDGRPDYSSPYQLRRELVTRQFDFEQPIERYKLGRALYHIAQHRGFKSSKGETLSQQETNSKPSSTDEIPDVAGAMKASEEKLSKGLSTYMKEHNLLTVGAAFAQLEDEGVRVRNNNDYRVIRSQFQHEIETIFKFQQGLSVESELYERLISEKKNVGTIFYKRPLRSQRGNVGKCTLERSKPRCAIGHPLFEKFRAWTLINNIKVRMSVDTLDEQLPMKLRLDLYNECFLAFVRTEFKFEDIRKYLEKRLGIHFSYNDKTINYKDSTSVAGCPITARFRKMLGEEWESFRVDGQKERQAHSKNNILFHRVSYSIEDIWHFCYDAEEPEAVLAFAQETLRLERKKAEELVRIWSAMPQGYAMLSQKAIRNINKILMLGLKYSDAVILAKVPELVDVSDEELLSIAKDYYLVEAQVNYDKRINSIVNGLIAKYKSVSEEYRFADHNYEYLLDESDEKDIIRQIESSLGAKRWSLMDADEQTDILQKVRDRYQDFFRSHERKFVESPKLGESFENYLTKKFPLVEREQWKKLYHPSQIAIYRPVPANKDRTALRLGNPDIGAIKNPTVLRVLYTLRRRINQLLDDGVISPDETRVVVETARELNDANRKWALDTYNRIRHDENEKIKKILEEFYPKRDGISTDDIDKARYVIDQREVDYFTESKTYNKDIKKYKFWLEQGGQCMYTGRTINLSNLFDPNAFDIEHTIPESLSFDSSDMNLTLCDAHYNRFIKKNHIPTDMPNYDKAITIDGKEYPAITSQLQRWVERVERLNRNVEYWKGQARRAQNKDRKDQCMREMHLWKMELEYWKKKLERFTVTEVTDGFKNSQLVDTRVITRHAVLYLKSIFPHVDVQRGDVTAKFRKILGIQSVGEKKDRSLHSHHAIDATTLTIIPVSAKRDRMLELFAKIEEINKMLSFSGSEDRTGLQQELDGLKNKLQMEVKACRIGHKVSEIGTFINDNIIVNHHVKNQALTPVRRQLGKKGHIVGGVDKPRWQTGDALRGEIHKASYYGAITQFVKDEEGKVLMKEGRPQINPTIKFVIRRELKYKKSSTDSGFASWDDLGKAIVDKELFALMKGQFPAETSFKDACEQGIYMIKKGKNGMPDIKLHHIRHVRCEAPQSGLKIKEQTYKSEKEYKRYFYAAVGDLYAMCCYTNGKIREFRIYSLYDVSCHRKSDIEDIPEFITDKKGNRLMLDYKLRTGDMILLYKDNPAELYDLDNVNLSRRLYKINRFESQSNLVLMTHHLSTSKERGRSLGKTVDYQNLPESIRSSVKSLNFLIMGENRDFVIKNGKIIFNHR

SEQ ID NO: 8475 - protein, 1422 aa, synthetic construct
  REGION 1..1422: note = Synthetic
MTQKILGLDLGTNSIGSSVRNLDLSDDLKGQLEFFSSDIFRSSVDKGSNGREYSLSAQRSAHRRSRGLNEARRRKLWATLDLLIKHGFCPMSPNSLIKWRTYDKHKGFFREYPIDDKVFNAWILLDFDGDGKPDYSSPFQLRRELVTRQFDFDQPIERYKLGRALYHIAQHRGFKSSKGETLSQQETDSKKPSTNEFNDVAGEMKASEEKLSKGLTTYMKENNLLTVGAAFAQLEDEGVRVRNNNDYRAIRSQFKHEIEIIFKFQRGLSLKSDFLERLVSEKKNVGTIFYKRPLRSQRGNVGKCTLERTKPRCAVGHPLFEKFRAWTLINNIKVRMPESEKAEQLPMKLRMELYRDCFLAFVRTDFKFEDIRKYLEKRLGVHFSYNDKTINYKDSTSIAGCPITARFRKILGEDWESFRMDGKKQRQAHGKNNITYHKVSYTIDDIWHFCYDAEEPELVLSFAQDTLNWEKKKAEELVRVWSAIPQGYAMLSQKAIRNINKMLMLGLKYSDAVLLAKVPELLDISDEEILSITEDYHLLESKIGYEKRINGIVNSLIAKYKSAPEEDRFADHDYEYLLDEHDEKDIIKQIESNLGERTWCLMDANEQTEILQQVRDKYQNFFRSYERKFVESPKLGCYLKDYLIEKFPMVDEKQWEKLYHPSQIAIYHPIPTGRDHSDLRLGNPAIGAIKNPTVLKALNTLRKRVNQLLDEGIISPDETRVVVETARELNDANRKWALDTYNRIREDENKKIKNILAEFYPNRKDISAVDVDKARYVIDQRKEDYFIGAKTYNKDIKKYKLWLEQGGQCMYTGRTINLSNLFDPNAFDIEHTIPESLCFDSSDTNQTLCDAHYNRFIKKNHIPTDMPNYDKAVIIDGKEYPAITSLLQRWVDRVERLIRNVEYWKGQARRAQNKDRKDQCMREMHLWSMELEYWKKKLERFTITEVTDGFKNSQLVDTRVITRHAVLYLKSIFPHVEVQRGDITAKFRKILGIQSVDEKKDRSLHSHHAIDATTLTIIPSSAKKERMLELFAKIEEINKMLSFSGNEERTGLKQELDGLKIQLNKEVKACRVGHNVSEIGTFINENIIVNHHVKNQALTPVRRRLRKNGQVVGGVNNPRWQTGDALRGEIHKASYYGAITQYKKDNDGKVQIEEGHLQINPEIKFVIRKELKFKKSAVDSGFASWEDFEKAIVDKDLFVLMKGQFPEGTSFKDACEQGIYMIKKGKKGEADKKLYKIRHIRCYAHVKNALKIKEQTYKSEKEYKRYFYAAVGDLYTMCCYTGGKSRDFRIYSLYDVSCHRKSGIEDIPEFIADKKGNRLKLDYKLNVGDMILLYKDNPEELFDLDNVNLNKLLYKIIGFENDGLRVKMVNHLLANEVKGESVKDYTNLPDVIRCGVKTIKFLIMGENRDFVIKNGKINFNHR

SEQ ID NO: 8476 - protein, 923 aa, synthetic construct
  REGION 1..923: note = Synthetic
MTQKIFGIDLGTNSIGTSVRNTDLGNNLVDQLEFFSSDIFKASVNREGVNGGKGREYSLASSRSAKRRKRRLYEHRRYKLWATLDLLIKNNLCPMTPESLEQWRTYDKKKKLFRQYPIEDKAFHSWIILDFNSDGKPDYSSPYQLRRELVSVQLDFNQAIDRYKLGRALYHIAQHRGFKSSKGETIAEQEKQEDDSKKNKNNALIEEHVDATKASEEKHSKGLSTYMQEHNLKTVGAAFAQLEDEGIRIRNNSEYKAIRSQHQDEIKEIFKFQKGLSSQTQLLDTLISEKQGIGTIFYKRPLCSQRGNVGKCTLEPNKPRCPIGHPLFEKFRAWTFINNIKAKSPDADSAEPLPMDMRINIYNKLFLSRVKADFKFEEIRNFIEKQWRVALSKDDKTINYRDDTSVAGCPITARMIKVLGEDWEKFQVLGTKERQTQGKSNNALHQVCYTAEDIWHFCYDAEDSGKVRTFAEETLGWDEKKAAELVRLWSAIPQGYAMLSQKAIRNINRMLLFGLKYSDAVLLAKLPDILELSDEDIQTIIKKAQQLEEVVNEEKRIGNIVNSLIANYKAESLEDRFADHNYEYQLDESDEREIIKHIENNIGKQRWELMDADEQISILEGVRSGYQAFFARHKRTFVELPQLGKRLVELLSKEYPSVTEKQWERLYHPSQIAIYRPILLDKSDEKRRLGNPDIGAIKNPTVMRTLNNLRRRVNQLLDDGVLMPDETRVVVETARDLNNANEKWALEKYQEIRRKENDKIKKILEEFYPQFSNITSTDVDKARYVIEQCEEDNYTSKKESGTYSKNIQKYKYWLEQGGQCLYTGRIISLSNLFDSNAFDLEHTIPASVSFDNSDQNMTLCEAHYNRFIKKNNIPTAMPNYEEDVTIDGKLYTAIKPRLEKWKKRIKDSLKMLNIGELKHDVRK

SEQ ID NO: 8477 - protein, 1436 aa, synthetic construct
  REGION 1..1436: note = Synthetic
MSKILGIDLGTGSIGLALRNPEAGDSVLEQLEYFCSDIYQAGVGKDRTGEYSLAAERTSHRQSRRLKETRRRRLWATLQLLIDYHLCPMSQSSLDQWKTYNKSKDLYRIYPINDAAFANWIKMDFDSDGVPDYSSPYQLRKELVTIQFDFTNQTNLFKLGRALYHIAQRRGFKSSKGETISSQETESKESVDYSDKDISAEMQKSETKLSQEITNYMTEHGCHTVGEAFAVLEDEGVRIRNSRYVTVRKQLEEEIKYIFDFQKGLSVDSDLYTRLTSKKKNIGTIFYKKPLRSQKWLVGKCTLENNKTRCPISHPEYEKFRALCFLNNIKYRKDSLSEWESLPIEVKQILFEALFSKRVKADFPFKEIREKAQTLLHVSLNGDCEKEHRTINYKDKQSVPGCPVIARMRNLLGDDWETFNMEGKKQRTSHSKNNINSHIVKYTALDLWHICYETDDPEYLTEFAHQQLGWDDKQTKKFVRLWSTQAQGYAMLSLKAIRNINRMLLAGLKYSDAVLLAKVPDIVRLSETELQELISDYDFTIKKSVDNEKVILGIVNSLIAQYKSLDTRSKFAFHDCEYKLQDTDYKDIQKQICNTIGNKTWELMDKEEQESIYHQVCHKYQDFFYNFKRDFYRLPHLADTLKDYLTRRFPAIETSQWEKLYHPSLISLYNVERTGTDKAELRLGSPSIGAMRNPVARRTLNILRKKINAMLDAGLIDIDDTRIVIETTRQFNDANMRWAIEAYQRERENENKAIRELLQELYPNRDINESDVDSARYAIEQPIETDGRKNSEEQLESLNKYKENKNRTYGIDVTKYRLWKEQKCLCIYTGKMISITQLFNENSFDIEHTIPRSISFDCSDKNLTICDSFYNRSIKKNLIPTQLPNYEKNAVINGVEYTAIKPRLQPWIKRVEQLKDNVEFWKAQSRRAMEKNRKDYCIRQKHLWQMELDYWKAKVERFTMTEVKEGFRNSQLIDTGIITKYATLYLKSIFNNVDVQKGTATAEFRKMLGIQSVDEKKDRSLHSHHAIDATILTLIPVAAKRQRMLKLFYDIEEAERFGHDSQYMRRILNQEITECNFGQNISQVPQYIEEHIIIKHHTTDRTFSSIHTITGYNKHMPGGDSVRGRLHKETFYGAIQLPCESGTGLDRKFITSKGKFVYPDKPSITIVTNVDITSFASEKDFETIIDFHVRDSINKTIKKRLMDGLSFKEAINRPIWMLDKEGNEIKTNKNGKMLCPIRHVRCKVKAGRGYMTREKSLEIRQHINISTKKSINISDKSYKQKVYAQNDTNYLYLLYEGIKKGHVDRKSRIISLWEATMLHGNNDIEIDQLIRDTLDYNRIVEKSIEYKLSAIIRVGDYVLIWNENPDELKELDKAEISKRLYVVVKFNTTGADLLFLKKHLSANVEPDLNLVANKVNCLIEHRDFEIDTLGNITFND

SEQ ID NO: 8478 - protein, 1435 aa, synthetic construct
  REGION 1..1435: note = Synthetic
MKKIIGLDLGTSSIGTCVRNTSIGDNLVDQLEYYSSDIFKSGVGEEKGKEYSFAADRTKHRQSRRLYETRRRRLWATLSVLIKYGYCPLSEESLKRWSTYNKEKKLFREYPIDDKPFQQWIKLDFNGDGTPDYSSPYQLRRELINQQFDFNIEQNRYKLGRALYHIAQRRGFKSSKGETIATQENDSTSEDIAELMKKSETKLSGALIQYMKDKQLSTVGEAFAYLEDEGIRLRNSQFKAVQSQYEEEISLIFNYQEGLSKESDFYKRIISRKKGEGTIFYRKPLKSQKGLVGKCTLEPNRARCPISHPEFEKFRAWSLINNIRYKKDVDDSWIELDIEVKKKLYHDVFTSRVKNDFPFEDVRKYLEKELSIPLVNSREGKTINYKDNQNIAGCPVVARLIRLFGEEWEKYNYQTDIIRHGDSKHSNKKHLKSYTALDIWHICYQADDVEELTEFVQQKMNWDEEMTRKIVRLWSSIQEGYAMLSLKAISNINRMLCEGFKYSDAVMLAKIPDICNVSLEKMHSILHDFKTIIIPKLENEKRIINITNNLIANYKSTILEDRFADHNTSYQLSEYDKEDIIKAIKDYCGENSFSDMDTNEQENLLNGVTSKYQLFFQSHKREYNKLPKNSEVFKEYLIQQFPDIDKLKWDKLYHHSQISSYSPDVKNDECRLGRPNIGGIKNPVVLRTLNILRRKINSLLDKNIIDAENTRVVIETTRGMNDANMRWAIEAYQREREKERKEIGKILSEFYKTREINDNDIDIARFVLEQSKENSMKDDKQKMFKKDISKYKLWLEQGGICMYTGKTINLSNLFDGNAFDIEHTIPRSISFDSSDKNLTICDSNYNRSIKKNQIPTSLPNFEHDWESNGILYTAIKPRLSKWEERVERIQDNIDFWKSQSRKSQEKERKDFCIRQRHLWKMELDYWKGKLERFTLKEVKSGFRNSQLVDTGIITRHAVLFLKSVFTNVDVEKGSVTADFRKMLGIQSIYEKKDRDKHSHHAIDAAILTVIPIAAKRDRMLQLFYEIEETERLINICSKDSAKSLSYKLDGLRRKMMDEIADCHIGNISAVPTYIEENLLANHISFDRTLVPAKKRVRVRGKVVKVKNADGEEVTKWAQGDCIRGRLHNESYYGAIKIPVQDENGKPKNEDGHFIYDENKENISMVIRQDIKSFTKKEEFEKIIDPSLRSIISTTIHRRMEKGATFAEAISQDIYMTDNHGNEIREDKKGRKLAPIRHVRCKVAAGRGYMTREKSLEIRQHNHFSKKQKANLTNRDYKKMVYAQNDSNYLFLLYEGIKRGALIRKCRFINTFEVANIIRTRRFDNFEKELWNEPYYQSFSESGIEYKLSAILKAGTRVLLWDKTPDEIYDLSRIELLKRLYVVVKFNNAGSDFLYLRHHLSAKSDIDIKLVPNKMNCLIEGRDFTIDVLGNISFIE

SEQ ID NO: 8479 - protein, 967 aa, synthetic construct
  REGION 1..967: note = Synthetic
MQSFAKDSLQWDDEKCKLLLRVWTSIPQGYAMLSLKAIRNINRMLCRGLKYSDAVMLAKVPEIAGMNENEIDTLIETFSKDLKTEVDRTKDIYIITNSLIADYKSLSFEDRFAEHDTSYCLQESDKEDIVQHIIKHFGEVTWGLMDAEEQETLMNEVEQLYQNFFSKTKRNFYDIPTYASTLRTFLCEKFPHVDEQAWARLYHPSQIASYHPERDKNCPDSWRLGTPNIEAIRNPVALRTLNILRRKINALLDANMIDPLETRVVVETTRTLNDANMRWAINRFQKEREEQNKTIRSILEKEYTTRAISETDINTARYILEQREEHIYRTEKTGELQHGFSFNIDAKRYKLWLEQGGICFYTGKVINLTNLFDDNAFDIEHTLPRSKSFDNSDANLTICDAHYNRYIKKNILPAHLPNFEHDQTINGTLYTAIKPRLEMWRKRVERLKVNVDFWKNRTRRAQDKDTRDYCIRQRHLWQMELNYWHEKLSHFEMEEIKEGFRNSQLVDTGIITRHAALFLKSLFKNVEVQKGSVTADFRKILGIQSVDEAKNRDKHSHHAIDATILTTIPIAAKRDRMLEIFLRIKELKKILCFSKDTNKQQEIISLNQKLQYEINSCHLGNDIASLPSYIENNIIIRHLRKEQTQQNSRRTIRIRGKKIYVTDHHGNKHKKWSSGDSIRGELSGQSFYGAITQWKEKTNRNETTNHKEQNIIDPTIYYVIRKPLVFKNNTSAPGFSSWEDLEKQIVNKALIPMMKSQFCEGTSFKEACGQPIYMLNRKGEKINVLRHIRCYVRIKNPIAVKKHTFLSSKPYKQNVYAGVGGLYAAAEYTNGNKRQFVIYSLKDIAQNKKKNNEIIPSKILNGTKTLTLQRLLHAKDSILIYEESPEELKKLSMTELSKRLYVIKGFEAAKTRIKAVNHLYNIDEIGETITDYQNLPITIRLSLNKLKFLLHGYDFKFTTSGLEFLDK

SEQ ID NO: 8480 - protein, 1416 aa, synthetic construct
  REGION 1..1416: note = Synthetic
MAQKILGIDLGTNSIGLSLRNVDLADNIKDQLMYFSSEIFKSGIGKDKHGEYSFAAERTKHRQPRRLKETRRRRLWATLHLLIEHKLCPLKIDSLHQWETYNKSEGLFRKYPIDDEAFAKWITLDFDADGKPDYSSPYQLRRELVTKQFDFNNIIDRYKLGRALYHIAQRRGFKSSKGETISLQEKEDIDLLGNSDIAQEMKKSESKLSEDIVSYMKEKGCNTVGEAFAYLEDEGIRIRNSRYKAIRSQYKEEIEKIFDFQEGLDPKSELFIGLISKQKDKGTIFYQKGLKSQKGLVGKCTLENTKSRCPQSHPEYEKFRALSFLNNIKYKTSVEDDWHNLSLEVRNKLFDDLFLARVKNDFPFSDIRIKLEKILNVKLVLGEKQRLINFKDNQCVAGCPVTARMVKMLGEEWESWNLNVDKWHTGRKDKSKEKHAVSYNALDLWHVCFSTSDPEILQEFAHKSLGWDDEQTQKLLRLWSSISVGYAMLSLKAIRNINKFLEYGLKYSDAVMLAKIPDIVDLDKAGIMQLIADYTGMIKNKINATKDIFVITNSLIANYKSTIVEHRYADHNTSYKLDDSDREDIMKRLIGYYGQCKWEKMDADKKIMLLEKVTDYYQQFFSSTKRQFYKVPRESDSLLDYLIEKFPAVDTKKLKKLYHPSQIGIYDIDNKTGDRSEWRLGSPNIGAMRNPVALRTLNVLRRKINSMLDDGLISYDDTRIVIETTRDLNNANMRWAIEKYQESRQEENKKIENVLKAYYPKRIINEKDVDIARYALEQSDIDLYKQTKGKNFSKDIERYKLWLEQGGVCIYTGRIIKLSNLFDENAFDIEHTIPRSKSFDSSDMNLTLCDSYYNQHIKKNQLPSSLQNYDKTVIIDGKEYTAIKPRLQKWEERVERIKKNIEFWKTQSHRAQDKNRKDICIRQRHLWAMELKYWQEKLSRFKMTEVTDGFRNSQLVDTGIITRYATLFLKSIFTSVEVEKGSVTSDFRKMLGIQSLEEKKNRDHHSHHAIDATMLTVIPVAAKRDRMLQLFYKIQELEKAITFIKNKDTYSSMLYELEGLKLKLDQEKRDCHIGKNVGELVDFIDSNIITNHHVKDKALALSRRRVRARGKILGDKNQPRWHTGDSIRGKICEASYYGAITQYEKDSNGKVIVNNKVPQINPNLKYVIRRELKYKKSSQDTGFSSWEDLEKVIVNKELVNMMKSQFDASISFKDACDKGIYMLDRHNNKINRIRHIRCYARITGLKIKEQVYKSNKEYKNYAYSTVGDLYCMCKYSDGINTSFVIYSLYDISENRKHGLEDIPNYINDKKNNKLELKDTIKPGDMLLLYKDSPNELYNKEHKTLLKRLYKVCSFENDGLRIKLSHHICAKDAKGESIKDFNNLPIIIRSAIGKLKYLKMGENADFQIKNGKIVFNK

SEQ ID NO: 8481 - protein, 1453 aa, synthetic construct
  REGION 1..1453: note = Synthetic
MEQKTLGLDLGTNSIGISLRNPALGENLKEQLEYFSSDIFEAGVGTDKSGEFSYAAQRTTFRSARRLKLHRRRRLQATLRLLMDHKLCPLSEDSYKQWSVYDKTQNLKREYPIGDEGFNRWIKLDFNADGKPDYTSPYQLRCELATTQLDFSSPENKFKLGRALYHIAQRRGFKSSKGETIAEQEKNEKFSANSDDLEQEMKKSEMKRSKGLRELLETQGLNTIGQAFAYLESQGTRIRNNEDIQATRDLYEKEITYIFNFQKELSIESELYKRLISTKKGEGTIFYKNPLRSQKGLVGKCTLEPKKGRCPIGHPEFEKFRAWAFINNIRYRRTIDSEWQEPTIEMKERLYRDVFTARVKADFLFSEIRKWLEKELEVQLHWDNNKSLSTINYADKQNVAGCPVTARLVKLLGTDWERFQQEGRKEHKTHSKQHPTKHTVCYSALDIWHVCFQADELEDVQSFAKDSLQWDDEKCKLLLRVWTSIPQGYAMLSLKAIRNINRMLCRGLKYSDAVMLAKVPEIAGMNESDIDTLIETFSKDLKTEVDRTKDIYIITNSLIADYKSLSFEDRFAEHDTSYCLQESDKEDIVQHIIKHFGEITWGLMDAEEQETLMNEVEQLYQNFFSKTKRNFYDIPTYASTLRAFLCEKFLHVDEQAWAKLYHPSQIASYHPERDKNCPDSWRLGTPNIGAIRNPVALRTLNILRRKINALLDANMIDPLETRVVVETTRTLNDANMRWAINRFQKEREEQNKTIRSILEKEYTTRAISETDIDTARYILEQREEHIYRTEKTGELQHGFSFNIDAKRYKLWLEQGGICFYTGKVINLTNLFDDNAFDIEHTLPRSKSFDNSDANLTICDAHYNRYIKKNILPAHLPNFEHDQTINGTLYTAIKPRLEMWRKRVERLKVNVDFWKNRTRRAQDKDTRDYCIRQRHLWQMELNYWHEKLSHFEMEEIKEGFRNSQLVDTGIITRHAALFLKSLFKNVEVQKGSVTADFRKILGIQSVDEAKNRDKHSHHAIDATILTTIPIAAKRDRMLEIFYEIEEKKHLMTSENAERIKQELEGLKESLKREIRECHIGYNIKDVPNFIETEILINHHSKDQTLTTAHRRVRIRGKKVYTTNSQGEIVEKWSSGDCIRGQLHNESYYGAIRLPQEIETENGRKPQTKDGHFVYDEKNENITMVIRVPLNSFTAMKDVDKIIDASLREEIRTTLTKRLEEGITFKDAIVQDFWRIDKAGQEIRKDKKGRPICPIRHVRCKVATGRGFMTYESSLSIRRHALTSQKALVHLPNRNYKQNVYAQNNTNYLFLLYEGIKQGKLVRQSRILNLYQVSEMLKAGCSRNLEQSLWHEPFYASFIEKKIEYKLSAIIKTGTRVLMWNETPDELRELSKQDLLKRLFVVKNFNKTGANLLYITHHLNATGAIDLKLVSNSLNCLIEHRDFEIDLLGNITLKD

SEQ ID NO: 8482 - protein, 1424 aa, synthetic construct
  REGION 1..1424: note = Synthetic
MTQKILGLDLGTNSIGSSVRNLDLSDDLKGQLEFFSSDIFRSSVNKESNGREYSLAAQRSAHSRSRRLNEARRRKLWATLDLLIKYGFCPMNPESLIRWRTYDKQKGFFREYPVDDKEFNAWILLDFDGDGKPDYSSPYQLRRELVTRQFDFDQPIERYKLGRALYHIAQHRGFKSSKGETILHQETNSKQSLTDETTDVAGEMKASEEKLSKGLSTYMKENNLLTVGAAFAQLEDEDVRVRNNNDYRAIRSQFQQEIETIFKFQQGLFTENELYERLVSEKKNIGTIFYKRPLRSQRGNVGKCTLERTKPRCAIGHPLFEKFRAWTLINNIKVRMSEEEQAEQLPMKLRFELYNDCFLAFVRAEFKFEDIRKYLEKRLGVHFSYNDKTINYKDSISVAGCPITARFRKLLGEDWESFRVDGQKQRLAHGKNNASLHTVSYTVEDIWHFCYDAEEPEVVLSFAQDSLKWEKKKAEELVRIWSAIPQGYAMLSQKAIRNINKMLILGMKYSDAVLLAKVPEIVEITDDEILSVTEDYHCVEAQVGYEKQINNIVNALIAKYKSASEEYRFADHNYDYQLDESDDKDIIRQIENSLGAKRWSLMDADEQTDILQKVRDRYQDFFRSHDRKFIESPKLRDSFENYLTKKFLIVDREQWKKLYHPSQIAIYRPVPVGKDRSALRLGNPDIGAIKNPTVLRVLNTLRKRVNKLLDDGVISPDDTRVVVETARELNDANRKWALDTYDRIRHDENEKIKKILEEFYPKRDTISTDDIDKARYVIDQREVDYFTESKIYNKDIKKYKLWLEQGGQCMYTGRTINLSNLFNPNAFDIEHTIPESLSFDSSDMNQTLCDAHYNRFIKKNHIPTDMPNYDKAVTIDGKEYPAITSQLERWIDRLERLNRNVEYWRGQARRAQNKDRKDQCMREMHLWGMEQEYWKKKLERFTVTEVTDGFKNSQLVDTRVITRHAVLYLKSIFSHVDVQRGDVTAKFRKILGIQSVEEKKDRSLHSHHAIDATTLTIIPASAKRDRMLELFAKIEEINKMLSFSGNEDRIGLKQELEGLKIQLSKEVKACRIGNKVSEIGMFINDNIIVNHHVKNQALTPVRRRLRKRGHLVGGVDNPLWQTGDALRGEIHKASYYGAITQFAKDKEGKVLMKEGRPQIEPTIKFVIRRELKYKKSAADSGFASWDDLGKAIVDKELFALMKGQFPAETSFKDACEQGIYMIKKGKNGEGDIKLHHIRHVRCEAPQSGLKIKEQTYKSEKEYKRYFYAAVGDLYAMCCYTNGKIREFRIYSLYDVSCHRKSDIEDIPKFITDKKGNRLMLDYKLRTGDMILLYKDNPMELYDLDNVNLSRRLYKINRFESQGNLVLMTHHLSTSKERGRSLGKTVDYQNLPESIRSSVKSLNFLIMGENRDFVIKNGKIIFNHR

SEQ ID NO: 8483 - protein, 1092 aa, synthetic construct
  REGION 1..1092: note = Synthetic
MKYSIGLDIGIASVGWSVINKDKERIEDMGVRIFQKAENPKDGSSLASSRREKRGSRRRNRRKKHRLDRIKNILCESGLVKKNEIEKIYKNAYLKSPWELRAKSLEAKISNKEIAQILLHIAKRRGFKSFRKTDRNADDTGKLLSGIQENKKIMEEKGYLTIGDMVAKDPKFNTHVRNKAGSYLFSFSRKLLEDEVRKIQAKQKELGNTHFTDDVLEKYIEVFNSQRNFDEGPSKPSPYYSEIGQIAKMIGNCTFESSEKRTAKNTWSGERFVFLQKLNNFRIVGLSGKRPLTEEERDIVEKEVYLKKEVRYEKLRKILYLKEEERFGDLNYSKDEKQDKKTEKTKFISLIGNYTIKKLNLSEKLKSEIEEDKSKLDKIIEILTFNKSDKTIESNLKKLELSREDIEILLSEEFSGTLNLSLKAIKKILPYLEKGLSYNEACEKADYDYKNNGIKFKRGELLPVVDKDLIANPVVLRAISQTRKVVNAIIRKYGTPHTIHVEVARDLAKSYDDRQTIIKENKKRELENEKTKKFISEEFGIKNVKGKLLLKYRLYQEQEGRCAYSRKELSLSEVILDESMTDIDHIIPYSRSMDDSYSNKVLVLSGENRKKSNLLPKEYFDRQGRDWDTFVLNVKAMKIHPRKKSNLLKEKFTREDNKDWKSRALNDTRYISRFVANYLENALEYRDDSPKKRVFMIPGQLTAQLRARWRLNKVRENGDLHHALDAAVVAVTDQKAINNISNISRYKELKNCKDVIPSIEYHADEETGEVYFEEVKDTRFPMPWSGFDLELQKRLESENPREEFYNLLSDKRYLGWFNYEEGFIEKLRPVFVSRMPNRGVKGQAHQETIRSSKKISNQIAVSKKPLNSIKLKDLEKMQGRDTDRKLYEALKNRLEEYDDKPEKAFAEPFYKPTNSGKRGPLVRGIKVEEKQNVGVYVNGGQASNGSMVRIDVFRKNGKFYTVPIYVHQTLLKELPNRAINGKPYKDWDLIDGSFEFLYSFYPNDLIEIEFGKSKSIKNDNKLTKTEIPEVNLSEVLGYYRGMDTSTGAATIDTQDGKIQMRIGIKTVKNIKKYQVDVLGNVYKVKREKRQTF

SEQ ID NO: 8484 - protein, 1163 aa, synthetic construct
  REGION 1..1163: note = Synthetic
MKYRLGLDIGIASVGWSVMEVNYDGEPIKIGGLGSRIFEKAETADKGESPAMARRLARGARRRLRRRALRLVTAKKLIMRSLELDNIALDSCVDMYELRLEALDKAITGKEFALVLLSILKHRGFKSNRKSESTKEETGALLSAISNNEKYRKEKGYRTVGEMYAKDERFVSIRDGVKLYAIRNKSEQYSKTIAQDELLEEIKILFAAQRAFGNELAAEEFEEKFIKIFTARREFDEGPGEPSPYRNSFNVGKCVFENQELRAPKASFTFEYTNVLIKLNNLRIKYAGEERILTVDEKEKILLNLKSGKKGEMTFEQLKKLLKIEREAKFNALTYSDAKNDAFKQIRGIKLNCGGTERYLSPEEKGVLLNELTEKGELNSGEIIDALNIEDSFIAVKGKKEGEFKLKLKNIEGVKFISMSASSKIIAELSPEHKVDIDLIDEIALLLSMNKSDAKLLKSIADNPLLSSLSQSEIEGLMKLSFSKFGSVSVKALKKIQPYVAQGMRYDEACSAAGYNFRAHSNGLKLKLLNSQEINDIIRYINVPVVRRAVSQTIKVINAIIRNYGSPIAVNVELARELSKTYGERMRIKRDNDVRAEENQKIMDYIRDTFHIAPRGLDLVKYRLYEEQFGKCAYSQTPIDANRLFEPTYLQIDHIIPYSRSFNDSYNNKVLVLLEENQAKKNMLPYEYMGKDENRWKTFEAYVKATYKSNPNKTEMLLRKTFTKENEKEWQERSLNDTKYISRFMFNLINDYLLLDDNINIGKKRVTAVNGAITSYLRKMWGIEKIRTDGDLHHAKDAAIIACVTDRMIKAVTDFNKGKETMFKGQSTYTDMYTGEIITREEYDKSYGGGDKLKAPYNGFPRELKLRLMPSVEDYREKYYKLGYEEEEIDSLKPVFVSRMPTRKAKGRMHKDTIRSAKCLDDGLVISKTDIKKLKLNKDGEIDNYYIKDKQDDKLLYEALRAQLAAYGGDGAAAFKDVFYKPKSDGTSGNPVRKVRLTEKSTLEVRLSKIEGAAGNTSIVRTDIFYKDKKYYSVPVYVSDVYKSVLPNKAIEAGKPYREWPDMNEGYEFLFSLYPNDLVYVEHKKGINLVKNDETKQKLIDNNGYFYFGGIDISSGAAIFDNHDQSYFTRLGLKTLPVLKKCTVDVLGNITFVGKEKRLALGS

SEQ ID NO: 8485 - protein, 1176 aa, synthetic construct
  REGION 1..1176: note = Synthetic
MPVYLGLDVGSNSVGSAWVDTEKRVITAGVSVFPAGVEDSDTKRGAPKNQARRQKRSSRHSIRHRSERKALLRWLLTQAGLLPKEKAALDALFQQDPWALRRDGLRRPLTAHEFGRVLVHLGQRRGALGIEADDEKEAGKVKDAIRRTSDSLADGKTFGEMMALKREEGRQPLLDKNSQPVPEKFFALPIRNRAGVFAFHATRAMIRDEFNRLWNKQREFGGELGKLLTDELRRKLEDDNDDENWRCKGALFGQRRTWWDTGTIGRCDLEPTDHKCPIGDRHAQAFLVLETVNNIRIQERGQPERPLNEEERRKVVAKLREQKSATPATVRAALGLKSKNLKAFYALNIERDPDRKVNTDWFYSQIVHGSFGEKSWAGLDESKRESVNRALLKLDPESPENVNKLRKGAVEWWGMDAQGAEKIINAWKSRFNTSKRVNLSRRAIINLLPYLENGATVTEARQQFAQDPSSKATPEQRARYAFTFNKAVMDAIARQAGRERAEQLLGQRGLNYDARHFLEMHPDTLPLPPMLANPVARQAIYEVRRHVNAYLRRFGRKPDRVVIELAREAYQTARVRDDILKSNRRRDSIRKKIIAEFQLERLSPNQQRAAVERVLLCRQQKGARPYTDTNLIFTEAQAAQGEECEVDHIVPRSKGGDSGLSNLLLVERGANRNKGNRTPKEWLAPAEFQGLLQKLAHIEKSQGDEYFRETDFKRKWDNLNAAVTPDGERRWRESQLTSTAYAARQVAEYLQSALYRDDPPDKRCIFFSNGRYTSMLRRDWQLYETGAIEVGEESGESRAGRVEKDRTDHRNHAVDAAVIALTGPKIVEQAASGYAWQEEHKALTGQWPPRPPISPPAPWTGVEELRAAIMRPIFGSPQGDGGLVVSHRPIKRRIVGALHEDTMYGCVNAERNLYTVRIEIGKLTAKMLRMPVQEKDERGRTISKDPPLGKGGLVRDRDLRRRLRECILANKLDPDAFLPKQIKALAKGSMLRLPSGVPIRFVKVIRKIYDPVTIKVKGVEKPRVYIAGNNHHMEILQDEKTADWMGICISNLEAARRVRQRQRKGEPQMSMVRKNHGAGKTFILSLAKGETIFSRRQDRPAEPARYYVVSKLNKKVIHFQPVNDARPVKDKKNPANCQDRWSVAPAGLKALGPEPNTPPYKVRVSPLGEVEPLHDD

SEQ ID NO: 8486 - protein, 1013 aa, synthetic construct
  REGION 1..1013: note = Synthetic
MSEVLAGNEKGEIDLSFRSPYLVLGLDIGIASVGWAILDLANSHIVAVGVRVWDKSEHPRDGRSYAKIRRLQRATRNNTARRKNRAKHCLKIMKKHGLLSSEVDADWLQTRKGDKPTGKLRVKGLDFLLTERQWAQVLYSLVKSRGYIDHSTDADLAAKMARQGSSSVNEGSSDSGVSDEEKDDKKTLDAILRNQELMSLSGSRTVGELFAQSGRFRNRAKEYSHSKSIEQIKQEIRTLFKSQRSLGNAYASEGFESEYLDCLTWQKEVTGKDEANYRKVGGCIYHPLQRRAPRASLSSEMCNLHERISNLVIVAPDGTESAVNPEVRNAFVSTMFQPVKTKGVVDSCTYKALRKFIPGMKSDMKFKGIDESSKLVIAGGWAKLRSVLSEELMIRLSANRRLTDQVLSAIAISSSIPSLEKRLRSLCLSESDLVELKRVPINSKVFSGRSSRSASSLRSIVRAFERGARSLAEAEQIAGLKLAKCASQKSEKLPPYSDFDPVCTNPVVLTAMREVRKVVNELSDYYGLMNEVHIELSRDLRNSRKIRAEIESKLRKRTKARAANAKRLEEEIENLVAEGRLAGPVEIDCKLLVKYELWKEQGERDIYTGRGIDLETLLTPNACQVDHILPYSRTAIDGLVNKVLVLASSNQDKGNRTPYEWFSHTEAMNWDDFVHRVSSSKLSKGKKAYLTRTELSEADERGFLNRNLNDTKYASLRAKAYIEEHLLMGEPKGKVSVLAVKGGATAALRGAWGIKKNRAEGDLHHAVDAAVIAACDAAAVQRIAQAHKKKQLVKKEEKRELFIRSEPWDGFVSELYKAVELCVPSRRVRHKLNGSAFKDTRYRFLGVSEDSGLGLYLSSKGKVEGTQTYHLSKDNKTVLLIDRQAFVRLWWDDGADAKKKASFLIEPVYYYDLPAMRKGTYRPRFVPPKSSKRPIHLWDPVPDYCLLRKPIMLFPGDTILVKGRPAVFRSIHLDNRNWELESVFSRKGKAEGICTIAQCRPEDISIISRDCII

SEQ ID NO: 8487 - protein, 1321 aa, synthetic construct
  REGION 1..1321: note = Synthetic
LKEKLHQVANTATCKRVATLDSLSLSTIGTPESGEPYLLLAQINKTALSASYKKRKLPPKREYRFYPSAIAGLIVIRCRKSYSGCKNTTLFLFKQIFYCNFTEKFKTASKMTKILGIDTGTNSLGWAIVEKKAEQYCLLDKGVNIFQEGVNIDKDNESSKAAERTGYRAIRVRYYRIKLRKIRLLHILTQHHLCPPLTSWELRQWRLKSIYPTDELFMQWQRTDEEKGQNPYAYRHLCLHEKLDLTQVANRYILGRVFYHFAQRRGFLSNRKDQSGEDVGVVNDGISALSEEMREAGCEYLGDYFYQLYEKGKKIRKHYTARNEHYLKEFHAICEKQQLDASLVSELEKAIFTQRPLKSQKRQVGKCVFEKNKAKCPASHPLYEEFRMLSFINHIKIKTPKEDELRPLNHEEREKILPLFFRKTKKTFNFEDIAKKLAPKKLYGFYKKAADTEMPYLFNYPMDTSVSGCPVTAALQDIFGDDWLDSICEVYTLADGKSRLEILNDIWHALFFYSDQDKLAEFAKVRLQLDDEQAQAFSNINLPSAYASLSLKAICKILPCLRRGLVYSHAVFLGNLCEVMPDYEWGIEEMRQAAIDCVIKEINSYDPKTDGRTLETCIKEYLKERYHVSDENLKKLYHPSMLETYPRVRPGQDGIYQLGSPRTDSVRNPMAMRSLFCLRKLVNRLLKEGKIDQETEIHIEFSRELNDANKRSALKRYGRDNQKAHDTARKHIVEDYKAETGKAIEPTPTDILKYELWEEQQHICLYTGQQIRISDFVGPNPKFDIEHTLPRSRGGDSTKMNLTLCDSRFNRDVKKTHLPTELANHDEIMARIAIWQEKYEELSQQIRKQKRKSQAATTKEQKDKAISYRHYLELQRDYLRGKHERFTMESVPEGFNRRQGVDIGIISKYARLYLKSVFKRVYPVKGLATSDFRKIWGLQDIYSAKERVNHVHHCIDAIVVACIGLDEYGKLAEYYHDEEKHEWYGASKATFAKPWPTFVEDVRRMQNELLVYHHTPDNMAKQGRRRIIINGKKVLAKGDAVRGSLHKETYYGAIEREGEVKYVKRVELSQLEEKNIKYIVDDTVRQIVQEAVDRLGFTEAMASTIWMNEEKQIPIKKVRCYTPQVTQPLHIRYQRDVSDKEHKRKYHVVNDKNYLLAIYIGADKKGKEKRDFELVNNLQAAKYYRTSNDRTGSGDPIVPVKSSHDYPLAYTLKIGTMVLLYENSPAELYEASQAELNRRLYKVTGLSSKNVSGYKYGEIAMKYHTEARQSKNLKSKNGVYQTGEELRPVIRMLHTQIKAAVQGVHFRINELGEIKWLARYD

SEQ ID NO: 8488 - protein, 1238 aa, synthetic construct
  REGION 1..1238: note = Synthetic
VIRCRNLTNAKIVKIFVISKFICNFTANFNKYYYMERILGIDTGTNSLGWAIVDKNESVYHLVAKGTNIFSEGVKIEKGIESSKAAERTDHRSVRKHYWRRKIRKIRLLTILSEHDLCPPLKKEQLRQWRLKKVYPTEDTFMEWQRTEDKANVNPYRFRYICLTQKLDLSDLTQRFILGRALYHLNQRRGFLSNRKESTKESEGAVKEGISSLSEDIKAAGCKYLGEYFYQLYQKGEKIRNHYTARKEHYLKEFQAICEKQGFDSELVSKLEKAIFDQRPLKSQKGQVGTCTFEKGKSRCPSSHPLYEDFRMYGFINNIKIQANTLYDKDERYLTDDEKQKIIPLFKRKSKRTFPFEDIAKKLAGKNNYSYYKSGEDKPYLFNYQMDTQVSGSPVNAQLEEIFGEDWLTSVCEVYTLAKDKTRFQIMNDIWHALFFYDDEDKLKDFGRKRLQLDDVQAEMFRKISIPNDYAALSLKAIRKILPYMRNYGLIYSEAVLLANLVEVLPQHIWGIKEMRKAAIENVIGVMHSYDKNNMDGLTLEACVKAFLKDRYQVNDDDLKKLYHPSMMELYPRQRPNDDGVYQLGSPRISSVRNPMAMHSLFRLRKVVNLMLKEGYITPDTKIHIEFSRDLNDANKRWAIQVWQRENEKDRERCRKEIEKYIVSPSDTDILKYQLWEEQNHKCLYTGEEIRITDFLGDNPKYDIEHTIPRSAGGDSTKMNLTLCSNRYNRDVKKTKLPTQLAVQNEIMERIQGWKEKYEDLDKQIRKISTKGASSKEEKDNKIRRRHLLSFQRDYWRGKYQRFTMTEVPEGFSRRQGTDISVISRYARMYLKSVFKQVYIVKGIATSDFRKIWGIQEEYTKKERVNHVHHCIDAITIACIGKAEYDKLAQYYHESDEYKQGKGKKPVFEKPWPSFVSDIKQIQDELLIAHYSKDILPKQAKRYVRDSKGNKVLTQGDTARASLHNDTYYGAINRDGEVRYVVRKNLDGLDEKDIKNIVDNEVRSKVENAILLHGSLKKAMEETIWMNEEKRIPIKKVRVFSGSVTRPINIRQQRDKSRHEYKRQYHVQNDRNYMMAIYVGQDKKGKEKREFELVNNITAANFYRRSNDRVPTDNQLVPLFSKSGYELRYKLKIGTMVLLYENSPEEIWELDRKHMQKRLYKVTGMSSMVIQGKFEYGTIELVHHQNARPSSDIKKINGEYKSGEEFRPGIKMLHSQFRALVQDVDFVINDIGEVKRQI

SEQ ID NO: 8489 - protein, 1226 aa, synthetic construct
  REGION 1..1226: note = Synthetic
MKERILGLDTGTNSVGWAVVDYNPEAPTDKYTLVDAGVNIFQEGVKIEKGTIEYSRAAERTGYRRQRIGYWRRKVRKIKLLKILIKHGLCPFVSDDALKNWRTKKEYPLSDEFVDWQRTDEAMNKNPYYYRNLCLSEKLDMDDVGNRYIVGRAIYHINQRRGFLSNRKEEAKESDGKVAKSISDINDEMETGGYEYLGQYFYSLYQRGERIRAKYTDRLEHYEKELLAICEKQGLGEELAKVLRKTIITQRPLKSQKHTVGRCVFEPNKTRCPISHPMYEQYRMYAFVNNIKIQTPIDSGSRHLTREEKDLIIPLFLRKSKKDFGFDEIAKKLSGTKNNFCYYKDKSEQPYRFNYHMDTRVSGCPVIAQLSDVFECKASDDSWLEAACEVYVMGGGKTRFQIMNDIWHALFFFEDKEHLFSFAKEKLQLDDEHAKMFSNIKVPSDYASLSLAAIRKILPYMKHYGLIYSHAVFLANMYKVVPCAIDKEALLPMLPKEDAEDIVEAFEEYDSQKSEIRTREEYVKRYVACKYQLDEEQERRLKVLYHPSQIDLFPKVRKPTEDGYFQLGSPRTSSVRNPMAMHSLFRMRHVINTLLKEGKINEFTSVRIELARELNDSNRRAAIRQWQNDNEKKNVENAKHIKEHFGESYVPTSVDLLKYKLWEEQNHLCLYTGETIRLGDLFDKNKYDIEHTIPRSVGGDSTATNLTVCQSRFNREVKKTCLPSELENYEAILERVEHWNEKYEQVDKQLRKLNTRGVADKELKDRIIQKRHRLALERDYWQGKYSRFIMKEVPEGFSRRQGADAGLISKYARLYLKSLFRNVSIVKGLATSDFRKIWGLQDKNEQKRRENHCHHAIDAVTIACIGRAEYDQLAQYYHDEERHRWGMNSCNGMFPKPWQTFTEDVKSLADRILVSHYTADNMSKRTKKHIRKNGKVMPQFMQGDTARGPLHLDTFYGAIERDGEIKYVVRKSLDQVLPKDEEKFINKIVDEKVKEKVKSAKDEYGSLKKAVAAGIWMNRDKGIKINKVRIYCEDVKHPIEIRIHRDISRKKYKQYVNVKNEVNYMMAIYVGKDKRGKEKRSFELVNNYDAVAYHNSDLKVQGIRLFQEYKDGYPLKWQLKTGSMVLLYEETPEEIYELPKSALTNRLYRVAGMSSMIVSGCHYGTIALVHHQEARPSSEVKLKNGAYRCTEDFRAGIKLYHTQFKALVQNQDFTINEIGEIKFLHR

SEQ ID NO: 8490 - protein, 1221 aa, synthetic construct
  REGION 1..1221: note = Synthetic
MEKIILGVDNGTNSIGWSIVKYDDEASENKYTLIDKGVNIFQEGVKIEKGIESSKASERTQHKHQRIGYWRRKTRKIKLLQILNKHHLCPPLSKEELRKWRSQKIYPMNEAFMAWQRTDDNVGDNPYYFRHLCLTKKLDLNDLKNRYIVGRALYHLNQRRGFLSNRKENTKESDGKVKQGIEALAQSMKECETEYLGEYFNQLYQKGEKIRTHYSSRLDCEKELLAICEKQGLPEELTQELRQTIITQRPLKSQKHMVGKCVFESSKPRCLMSHPLYEQYRMYAFINNIKIQGPSDNKLRALTEQEKQTIIPLFLRKSKKDFKFEDIAKKLSGGKKNFCFYKDKVECAYRFNYYMDTLVSGCPVIAQLSEAFDVKSHIDEWLERACEVYTQGGEKNRYEIMNDIWHVLFFFDSEDKLKEFALKKLQMDEAHAILFSKIHLPSDYASLSLKAIRKILPYMKEYGMIYSHAVFLANLPSVIPCKVDKEALLPMLSHEETDDIVKAFYEYDPSMSAIRTQEEYVKRYIAYKYNLNEEDERKLKRLYHPSMIETFPKVRQRTAEGYYQLGSPRTNSLRNPMVMRSLFRLRHVINTLLKKGKIDEDTTIHIEFARELNDANKRTAIRQWQNQRNKRHQEIAEKIKEHFGSDYLPTSMEILKYELWEEQNHLCLYTGETISLTDLFDPNKYDIEHTIPRSVGGDSTAMNLTICDSRYNREIKQAQIPSQMSNYEQIMERIDSWKETIEKLGKEIRKINTRGVYDKEVKDRMIQKRHRLMLERDYWKGKYDRFTMTEVPEGFSRRQGVDISIISKYARSYLKSVFKNVYIVKGIATSDFRKIWGIQEEYEKKQRINHCHHAIDAVTIACIGKAEYDKLAQYYHDEERWEWGLERRRAEFPKPWNTFTEDMKHLDETLLVSHYTADNLGKQTRKKIRKNGKITGQYMQGDTARGPLHQDTYYGAIEHKGEIKYVVRKSLDQLDEKNVKNIVDNIVRKKIEAAIEQYGNLKKAVEAGIWMNREKGIAIHKVRIYTPQVKRPLDIRRQRDLSPKEYKRSFHVTNDSNYMMGIYAGKSKNGKEKREFELINNMNAVEYYNSGVSVQSIDILPSESKNGYPLKWKFRVGTMVLLYDETPEEIYELDEIQLRKRLYKITGMSSMKVTSGIYGVLSLVFHQEARPSKDIPLKNGVFKYGEATRAGITLLHTQFKALVQGYDFEMDDLGKIKFKNR

SEQ ID NO: 8491 - protein, 1221 aa, synthetic construct
  REGION 1..1221: note = Synthetic
MTKILGIDTGTNSLGWAIVEKQADEYHLLDKGVNIFQEGVKIEKGIESSKAAERTAHKAARVRNYRIKLRKIRLLRILSDAHLCPPLSKAELSAWRLKKEYPKNELFMQWQATDDKSDKTPYAYRHKCLHESLDFSSITDRHILGRAFYHMIQRRGFLSNRKDQSGDDTGMVKENISNLTQEMHDAGYEYLGDYFYYLYNNGEKIRNHYTARNEHYLAEFKAICEKQDLDKNLGSEVVRQIEKAIFDQRPLKSQKGQVGKCVFEKNKTRCPSSHPMFEEFRMLSFINNIKIQTPNDGALRSLSAEERELIMPLFFRKSIIKKKQFVFEDIAKKLARRELYGFYKKSTDVEMPYLFNFPMDTSVSGCPVTAALIDIFGENWVDTLCETYTLAEGKSRLDIVNDIWHVLFFYTDEAKLAVFGKNRLQLNDEDAKKFSKITLQNGYGRLCLKVICKILPYLRRGLVKDHAIFLGNLCEVMPQYEWDIKEMRIAAIDNIIREINKTDTKDESTLEKRIKLEKRIKEYLKNQYHVSDDKLKKLYHPSKMDKYPRVLRTNDHGVYQLGSPRIDCVRNPMAMRSIFRLRKLVNRLLEEGKIDQNTEIHIEFARELNDANKRHAIAAYTKENQKTNDEARKKIKELFKDETGKDIEPKDDDVLKYVLWEEQGHICLYTGRQIAISDFVGTSQKFDKEHTIPRSVGGDSTRINLTLCDSRFNREVKKTKLPTELPNHDEIMARINDWREKYESLDGQIRKLKGKSKGATTKKQKDDIISKRHLLELQRDYWRGKYLRFTMESVPDGFSRRQGTDICVISKYARLYLKSLFKHVYTVKGIATSDFRKIWGIQKVYSKKERVNHVHHCIDAIVIACIGLDEYNKLGTYYHDEENHEWYGMSKAYFKKPWSTFVEDIKRVQDEILVYHYTPDNMPKQGRRRILLDVEINGRKKKKKVLCKGDAARGSLHKDTYYGAIMRSGEDTPYYVVRKNVDNHLSDQDIENIVDDVVRGIIQNAVAKGGKDALNGTIWMNEEKQIPIKKVRCITSVKNPLSFEHRKPRDISNKCYKNDYYVAPGDNNYLMAVYKGVTSKGKVKYMYEFINMLDAAKFYKQSNDKVLVDGNIVQLNKDGLNLYYTLKKGTMVLLYVDNPDEIWENNGDWSRRLYKVTELWKAGRIVVTKHTEARPSSEVPKVTKGFCIGDSKGLYSYSKFSALVQGYDFEINELGEIKRLR

SEQ ID NO: 8492 - protein, 1217 aa, synthetic construct
  REGION 1..1217: note = Synthetic
MEKQRILGLDPGTNSLGWAVLDFDNSKQEYNLVRKGEVIFEEGVGKSERGEFSKAAYRTFYKSTRKHYFRRRLRKIEVLKVLVKYDFCPYLSDDLLKQWHEKKIYPAVKEFMDWQRTSDAEGKNPYYDRHCCLNEKLDLSLKSDRYILGRALYHLTQRRGFKSNRLIQNNDENEEGKVKKGISELSTEMQEANCNYLGDYFYKLYTEKGNTVQIRKRYTDREKHYKNEFNAICEKQELNETIVKELDKAIFFQRKLKPQRHGVGKCTFEPNNRRCAISHPDFERFRMLCFINNIKIKTPFEENLRPLNNEEKALIEPLFYRKSIKNFDFEEIAKKLAGKNNYCYIKDDSSKQYKFNYRMSQGASTCQTIAKLKSIFGEEWKNGIAETYTNRRKKEGLKKQAEMVDDIWNVLYSVSECDVLKDFAINKLQLDEKTADNFSKTKLAQGFATLSLKAIRKILPFLEQGFGYTEAVFLANIPTVVGKEYWNNEDIRNDIMEEIKTIFYHNTLKTNDSHNTILFCIKDILSNNFDLAPGAIDKLYHPSMINVYKDVIPNEDGILQLGSPKIDAVKNPMAMRSLHIIRKVVNELLREGIINSDTEVRIEYARELNDANKRHAIADWQKKQYGKHQKYRKEIKELFKAETGFEIEPNETDILKFELWEEQNHICLYTGQEIGISEFVGENPKYDIEHTFPRSLGGDSTKMNMTLCENKFNRENKQKKLPSELANHSEILERIDDWKKKIYILQKKYDSIRTHNGMDKENKDKKIVSRHKIKLELDYWKGKYNRFTMTEIPEGFSRRQGMGIGLISRYAGLYLKTIFHKKDNPQKSNVYIVKGSITAEFRRIWNIQDDYEKKCRDNHIHHCIDAIVVGCIGKREYDLMAQFYRDEEKYRWEKKKKPFFKKPWETFTQDMLSLKDEVLTVHFNPSNFTKKAHKKVFTPKGIFVAQGDCARVKLHKGSYFGAIEQKGEIKYVMRKELSALKIEDIKNIVDAVVKEKVLAVVKKKGFKQAMAEPIYMNEDKRILIKKVRLFVSQANPLIVKKHRDLSSKEYKQNYYVDNEGNLMIAMYEGVKKNGKIDREITVVNNLEAAKFFRQSQKNNAEKQLISHLSPKNGYPLKTVLTQKQLVLMYEDSPKEIKLRDTKNMVKRLYQVFGIEKDGRVKLKFHQEARSEGLNINSAAFKIQDTPESLYRHTKSNLKVLVNGVDFKINILGEISLI

SEQ ID NO: 8493 - protein, 1217 aa, synthetic construct
  REGION 1..1217: note = Synthetic
MSRILGLDLGTNSIGWAIVDSQSDGSYKLFDKGVSIFQEGVKIEKGNESSKAAERTAYRSARRRIFRRRLRKIETLKVLIDLGWCPFLLPEQLSDWRFKGIYPKVDDFMLWQRTSDDEQKNPYYFRHLALTQKLDLSKQEDRFVLGRVMYHLSQRRGFLSNRKESTKESDGKVKESISELNKSIQNSGCKYLGEYFYTIYGKERIRTHYTSRQNYKDEFDAICKIQGIPDDIKRRLERAIFFQRPLKSQKGNVGHCKFETRKTRCPISHPRYEEFRMWSFINNIKIKTPDDQDLRPLNPEEIVKILPLFFRKSKKQFTFEDIAKTLSAKGQYAFYKDKDEKPYRFNYKMFTSVSGCPVIAGLMDIFGNNWEDGLMAKYTAAINKTKEQVVNDVWHALFFFSDGDKLVEWGKNKLQLSEEEAVRFSKISVGSDYASLSLNAINKIVVYLKRGFKYSHAVFLANISSIVPKEIYSVPENREAIEREIGIIVDNPSLTKETTELRIKEFLMDNFDLGASVHKKRLYHPSMIETYAKTNSGFLETPRTNSFKNPMAMRALFRLRALVNDLIRNGEVDKDTKIHIEYSRSLNDANKRKALERYQRDREKKNNEYREEILKHFHEHGIEAEPTKADIEKYRLWEEQGHICLYTGKTINISQFLGSNPQFDIEHTIPRSLGGEDALENKTLCDNKFNREVKKAKIPSQLGNYDEVLVRLEPIKNRIEELRKQIEKYKGGRASTKEARDGVIQKRRLLEYERNYLADKYGKFLMKEVPSDYRKNQDIDNSIISKYARPYLKTFFTHIYTIKGITTSQFRRMWGLQEDEKKDRATFLNHTVDAIVIACIGPKQYSEMARYYHAQEEYEWYGKAKPSMSKPWETFTEDVKALDKEVLVSHYTPDNLKKRTFKKLRLRGQIVRGCLTDDNGNKLPLMARGDTARGALHLDTFYGAIKKDDQLKYVVRKSLSSLEKSDVSKIVDDVVRQKVEQAINDYGFKEVIGGEVPVWMNYEKRVPIKKVRIFTPSVTNPIHLKDLRDKSRFDYKQQLHVANDRNYCMIVFEKSKSNKIDRKIVIVSNLEAVTLLKETDVPLNEKLSKLSPGEGYNFRYFLKTGTLVMFYRESPLEILKASVDVLYKRMYKVVVLKKDGRVKFKYQQEARIPDVIKADYEFETGRSAPKSLTIGISNVDFEHPAPFLLLSQVNQNMLVEGFDFTLSPSGKIQFMRG

SEQ ID NO: 8494 - protein, 1217 aa, synthetic construct
  REGION 1..1217: note = Synthetic
MTKILGIDTGTNSLGWAIVEKKADEYHLLDKGVNIFQEGVKIEKGIESSKAADRTAHKASRVRNYRIKLRKIRLLRILSDAHLCPPLSKVELSAWRLKKEYPKNDLFMQWQGTDDESEKTPYAYRHKCLHECLDFNSMTDRYILGRAFYHMIQRRGFLSNRKDQSGDDTGKVKESISNLTQEMHDDGYEYLGDYFYSLYNKGEKIRNHYTARNEHYLAEFKAICEKQKLDKNLGPEIVRQIEKAIFDQRPLKSQKGQVGKCVFEKNKTKCPSSHPMYEEFRMLSFINNIKIQTPNDSALRPLSAEERELIIPLFFRKSIIKKKQFDFEDIAKKLAPKKHYGFYKKSSDAEMPYLFNYPMDTSVSGCPVTAALKDIFGDNWIDSLCETYTLAEGKSRLNVVNDIWHALFFYTDDTKLAEFAKNRLQLNDEEARKFCEISLPGDYASLSLKAICKILPYLRRGLIYSHAVFLGNLCEVMPQYEWNMEEMRNAAIDNIIYEMNQIDSKDARTFEVCIKEYLKEQYHVSDEKLQKLYHPSMMEMYPRVQRTNNHGVYQLGSPRIDSVRNPMAMRSMFRLRKLVNRLLEEGKIDQDTEIHIEFARELNDANKRNAIAAYTKENQNKNDEARKKIRNLFKAETGNGIEPTDADVLKYVLWEEQGHICLYTGKQIRISDFVGANPKFDIEHTIPRSVGGDSTRMNLTLCDSRFNREVKKTKLPTELPNHDEIMARINDWREKYESLDGQIRRQKKMSKGATTKDQKDAIIRKRHLLELQRDYWRGKYLRFTMESVPDGFSRRQGTDISVISKYARLYLKSLFKHVYTVKGIATSDFRKIWGIQKVYSQKERVNHVHHCIDAIVIACIGLDEYNKLGAYYHDEENHEWYGMSKAYFKKPWSTFVEDVEKVQDEIMVYHYTPDNMPKQGRRRILIDGKKVLAKGDAARGSLHNDTYYGAIESDGVVKYVKRINFASMKENDVKNIVDDTVRGIIEAAINEKGFKEAMSGTIWMNEEKQIPIKKVRCYTPSVTKPLNIRQQRDVSSKEYKQQYHVTNDSNYLLALYIGKDKKGKEKREFEIINMLQTAQYFKTSNDKVAVGKNIVPLKSEHDYPFAYSLKIGTMVLLYEKSPNEIWDASLMDNNKRLYKVVGLSAMRMKGRNVDYATIKLKHHEEARLSTELKVKNGAFKQGEELRPSIIMLHTQLNALVQGYDFEINELGEIKRLR

SEQ ID NO: 8495 - protein, 1216 aa, synthetic construct
  REGION 1..1216: note = Synthetic
MTKILGIDTGTNSLGWAIVDKTADNYNLLDKGVNIFQEGVKIEKGIESSKAAERTEHRATRVRYYRIKLRKIRLLRILSDNHLCPPLSQEELSTWRLKKVYPKNELFMQWQRTDDDTEKTPYAYRHKCIHEKLDLSDVTDRYILGRAFYHIIQRRGFLSNRKEQGGEDSGKVKEGISTLTHEMNEAGYEYLGDYFYALYNKGEKIRKHYTARNEHFLSEFKAICEKQDLEKELGSEVVRNIEKAIFDQRPLKSQKGQVGKCVFEKNKTKCPSSHPMYEEFRMLTFINNIKIKTPNDDVLRPLNTGEREKIMPLFFRKSKKQFDFEDITKKLAPKKMYGFYKKEEDAEMPFLFNYPMDTSVSGCPVTAALKDVFGDDWITAICETYTLGEGKSRFDIVNDIWHALYFYSDKDKLAEFAINRLQLSEDEAKIFSEISLPADYASLSLKAICKILPYLRRGLIYSHAVFLGNLCEVMPKYEWSIKEMRETIIDNIIMEMDKCDTKDKRTFEVCIKDYLKGQYNVSDNSLKKLYHPSMIETYPRVQYTNEHGVYQLGSPRIDSVRNPMAMRSMFRLRKLVNRLLVEGKIDQNTEVHIEFARELNDANKRNAIALFVKENQSANDEARKQIITLFKKETGTDIEPTDKDILKYVLWEEQNHICLYTGKQIRISDFIGANPKFDIEHTIPRSVGGDSTKMNLTLCDSRFNREVKKTKLPVELPNHDEIMERIKEWKKKYELLDIQIRKNKKLSKGATTKEQKDTIIRKRHLLELRRDYWRGKYERFTMESVPEGFSRRQGTDISVISKYARLYLKSLFNRVYTVKGIATSDFRKIWGIQDIYSKKERINHVHHCIDAIVIACIGLDEYNKLGAYYHDEENNKWYGMSKASFKKPWATFVEDIKKIQDEILVYHYTPDNMPKQGRRRIKIDGKKILCKGDAARGSLHNDTYYGAIENDGAVKYVKRIDLASLEEKDVKNIVDDTVRSIIEAAIKEKGFKDAMASTIWMNEEKRVPIKKVRCFTPSITKPLNIRKQRDVSIKEYKQQYHVANDSNYLLALYIGTDNKGKEKREFEIVNILQAAQYYRTSNDKEVVDRHIVPIKSEHDYPFAYTLKIGTMVLLYEKSPNEVWDATIKERNRRLYKVTGLSTMRMKGRNGEYAYATVKLIHNEEARPSKDIKAKNGEYEQGEEFRPAIIMLHTQLNALVQGYDFEINELGEIRRLR

SEQ ID NO: 8496 - protein, 1214 aa, synthetic construct
  REGION 1..1214: note = Synthetic
MTKILGIDTGTNSLGWAIVDKTADNYNLLDKGVNIFQEGVKIEKGIESSKAAERTEHRATRVRYYRIKLRKIRLLRILSDNHLCPPLSQEELSTWRLKKVYPKNELFMQWQRTDDDTEKTPYAYRHKCIHEKLDLSDITDRYILGRAFYHIIQRRGFLSNRKEQGGEDSGKVKEGISTLTQEMNEAGYEYLGDYFYALYNKGEKIRKHYTARNEHFLSEFKAICEKQDLEKELGSEVVRNIEKAIFDQRPLKSQKGQVGKCVFEKNKTKCPSSHPMYEEFRMLTFINNIKIKTPNDDALRPLNTGEREIIMPLFFRNPKSKKQFDFEDIAKKLAPKKMYGFYKKEEDAEMPFLFNYPMDTSVSGCPVTAALKDVFGDEWTDAICETYTLGEGKSRFDIVNDIWHALYFYSDKDKLAEFAINRLQLSEDEAKRFSEISLPADYASLSLKAICKILPYLRRGLIYSHSVFLGNLCEVMPKYEWSIKEMRETIIDNIIMEMDKCDTKDKRTFEVCIKDYLKEQYNVSDNSLKKLYHPSMIETYPRVQYTNEHGVYQLGSPRIDSVRNPMAMRSMFRLRKLVNRLLAEGKIDQNTEVHIEFARELNDANKRNAIALFVKENQSANDEARKQIITLFKKETGKDIEPTDKDILKYVLWDEQNHICLYTGKQIRISDFIGANPKFDIEHTIPRSVGGDSTKMNLTLCDSRFNREVKKTKLPVELPNHDEIMERIKEWKKKYELLDIQIRKNKKLSKGATTKEQKDIIIRKRHLLELRRDYWRGKYERFTMESVPEGFSRRQGTDISVISKYARLYLKSLFNRVYTVKGIATSDFRKIWGIQDIYSKKERINHVHHCIDAIVIACIGLDEYNKLGAYYHDEENNKWYGLSKATFKKPWATFVEDIKKIQDEILVYHYTPDNMPKQGRRRIKIDGKKILCKGDAARGSLHNDTYYGAIENDGAVKYVKRIDLASLEEKDVKNIVDDTVRSIIEAAIKEKGFKDAMASTIWMNEEKRIPIKKVRCFTPSITKPLNIRKQRDVSTKEYKQQYHVANDSNYLLALYIGADNKGKEKREFEIVNMLQAAQYYRTSNDKEVVDRHIVPIKSEHDYPFAYTLKIGTMVLLYEKSPNEVWDATVKERNRRLYKVTGMSTSTIGNCVYARITMLYNEEARPSKDIKAKNGAYKQGEELRPAIIMLHTQLNALVQGYDFEINELGEIRRLR

SEQ ID NO: 8497 - protein, 1214 aa, synthetic construct
  REGION 1..1214: note = Synthetic
MARILGIDTGTNSLGWAIVDKDEKGYHLKDRGVNIFQEGVKIDKGIESSKASERTLHKSTRVRYYRIKLRKINLLHILSDNHLCPPLSHEELRDWRLKKIYPKTELFMQWQSTDDAAGKNPYACRHRCLHEVLDMDKLTDRYELGRAFYHIIQRRGFLSNRKEQDSDDSGKVKEGISDLTKEMEKAGCEYLGDYFYTLYNNKEKIRNHYTARIEHYHAEFKAICEKQRLPEDLAQQIEKAIFNQRPLKSQKKQVGKCVFEKNKAKCPVSHPKYEEFRMLAFINNIKIKTPEDATLRPLNAEERENIMPLFYRKSKANFDFEDIAKKLAPKKMYGCIKKSKDAEMPYLFNYDMDTSVSGCPVTASLKDIFGDDWEKGISEVYTLGEGKSGSQIINDVWHALFFYSDTDKLKEFAQKRLQLDEEDAKKFSTIKIPSAYASLSLKAILKILPFLRRGLLYSHAVFLANMGKVVPQYIWELPETREGAIENVINEINRYDAHTDSRTLEVCIKDYLKQQYNATDDALKELYHPSMTETYARVMPNELGEYRLGSPRLDSVRNPMAMRSMFRLRKLINRLLAEGKIDADTTIHIEFARELNDANKRAALHDYQRENQNEKDKARKAIIDLYKEETGLEIVPNDKDILKYMLWEEQDHICLYTGDNISIASFIGANPKYDIEHTIPRSVGGDSTRMNLTLCDCRFNRETKKTKLPSELPNHEEILSRISGWKREYEELETKIRKNKRATKGCSTKEQRDKMIRKRRLREMQRDYWKGKYMRFTMKEVPEGFSRRQGADISIISKYARLYLQSLFHHVYTVKGIATSDFRKIWGIQEIYDKKERVNHVHHCIDAIVIACIGRDEYNKLGAYYHDEENSEWFGASKAHFDMPWPTFVTDMKTIQDDLLVYHYTPDNMHKQGRRRILINGKKVMSKGDAARGSLHNDTYYGAIEHDGEIKYVKRVDLASLNVAQLNVDSFIKSIVDETVREIIRKAIAEKGIKEAIAGPIWMNEEKRIPIKKVRCYMPSVTSPLHIRQHRDQSVKEYKRTFHVANDRNYMMAIYKGKDQKGKEKSEFELVNMLEAARYFKTSNDKEAADYNIVPVKSTNGYPLAYTLKIGTMVLLYENNPSEIWEGTKAEISRRLYKVTGLSILPGKNNSYGKITLTFHEEARASKEIKAKNGAYKQGEDLRPSILMLHTQIKALVQGYDFEINEAGEIKRLR

SEQ ID NO: 8498 - protein, 1211 aa, synthetic construct
  REGION 1..1211: note = Synthetic
MERILGIDTGTNSLGWAIVDKEEGCTQLIAKGTNIFSEGVKIEKGIESSKASERTEHRSVRKHYWRRKIRKIRLLAVLCDNHLCPPLEKSSLREWRLKKVYPKNDLFMEWQRTEDKANVNPYKFRYICLTQKLDLTDVTQRYILGRALYHLNQRRGFLSNRKETTKESEGAVKEGISTLTEEMKAAGCEYLGEYFYQLYREGKKIRNHYTARKEHYLKEFHAICAKQELDEKLAKDLEKVIFDQRPLKSQKGQVGTCTFEKGKSRCPSSHPLYEDFRMYAFINNIKVQVHTLYENAERNLTAEEKQRIIPLFKRKSKRTFLFEDIAKKLAGKNNYCYYKSNEEKPYKFNYQMDTQVSGSIVNAQLEEIFGEDWLSGVSEVYTLTKDKTRFQIMNDIWHALFFYDDEDKLKEFAVNRLQLDDEDAEKFSKISMPNDYAALSLKAIRKILPFMRDYGLTYSEAVFLANLVEVLPQHIWGIKEVREATIEKIIEVMHSYDKSNIDGLTLEQCVKGFLKERYNVSDDDLKKLYHPSMMDLYPRQRPNDEGIYQLGSPRISSVKNPMAMHSLFRLRKVVNLLLKERQITPETKIHIEFSRDLNDANRRSAIQAWQRDNEKDRERCRKEIEKYVANPSDTDILKYQLWEEQNHKCLYTGEEIGINQFLGENPLYDIEHTIPRSAGGDSTKMNLTLCSNRFNRDVKRTKLPSQLTNHEDILERIASWKERYEELDKQIRKISTKGASSKDEKDAKIKRRHLLSLQRDYWRGKYQRFTMKEVPEGFSRRQGTDISVISRYARMYLKSVFKQVYIVKGIATSDFRKMWGIQEEYTKKERVNHVHHCIDAITIACIDKAEYDKLAQFYHQSDEYKFGRGEKPQFEKPWPSFVSDIKQIQDELLIAHYSKDNMPKQAKRYVRDSRGSKILTQGDTARASLHNETYYGAIEVDGEVKYVVRKSLDGLDEKDVKNIVDEEVRSKVENAILLHGSLKKALEETIWMNEAKQIPIRKVRVFTGSVTRPINIRQQRDQSKHEYKRQYHVQNDRNYMMAIYVGQDKKGKEKREFELVNNITAVNFYRRSNDRIPTDNQLVPLKSKSGYELRYKLKIGTMVLLYENSPEEVWELDRKNLQKRLYKVTGMSSMVIQGKFEYGTIEMVHHQNAKPSSEIKKVNGEYRSNEEFRPGIKMLHSQIRVLVQSVDFEINDLGEIRRLIYNSGKIL

SEQ ID NO: 8499 - protein, 1207 aa, synthetic construct
  REGION 1..1207: note = Synthetic
MERILGIDTGTNSLGWAIIEKDGDTRRLLYKGTNIFSEGVKIEKGIESSKAADRTDHRSVRKHYWRRKVRKVRLLTILSENRLCPPLDKEELRQWKLKRIYPKSDEFMEWQRTEDKDDINPYRYRYLCLTEKLDLTDIRQRYILGRALYHLNQRRGFLSNRKETTKESDGKVITGIGDLTKEIEKSGCKYLGEYFYKLYQRGEKIRSHYTSRKEHYLNEFRAICEKQDLDKELAKKLEKAIFYQRPLKSQKGTIGKCTFEKGKSRCPVSHPLYEEFRMYQFINNIKIKTPGDVELRELTFEEKEIIRPLFNKKSSFDFKVIAKALAGGRNNYCFYKDAEDKPYKFNFPMDTSVSPTPVCGGLSKIFGANWKDSLCEVYTLSEGKTQMQVINDVWHALFSFDDEDKLKEFAENRLQLNEEQAEEFSKIPIANEYASLSLKAIRKILPYMKDYGMKYTHAVFFGNLKEVLPSHIWGIKETREAAIGNIIGAIQEVAETSDSQTIEKCLKDYLKERYQVSDEKLKKLYHPSMIELYPKVRPNSDGIYQLGSPRISSVKNPMAMHSLFRMRKVINLLLKKGYIDEETKVHIEFSRDLNDANMRKAIQQLNKENEDDRKKCRDKIKELYKEQCGKEIEPTDRDILKYQLWEEQNHICLYTGDGIGICDFLGDEPKYDIEHTIPRSVGGDTTKENLTLCSSKFNRETKKTKLPSELHNHEEILQRIAKWKEEYETLEEKIRSRRKRHPAEKGQRDKNIQERHYLELKCKYWKRKYERFTMTEVPEGFSRRQGTDISVISRYARMYLQSVFKRVYIVKGIATSDFRKLWGLQDVYEKKSRVNHVHHCIDAITIACIDKGEYDKLAKYYHDEENHEWYGHDKPDFKKPWDTFVADIKNVENELLIAHYSKDNMSKQAKRNIRGRDGRILKNERGEKLQMRGDVAHTSLHQATYYSAIMKDGNIKYVGRVELPKMKDKDVDKIVDEVVKDKVKAAISEYGSLKAAIEAKIWMNKEKGIEIKKVRCFVKQTTPLQIRPLRDVSRKEYKRNLLAWNDGNYKVAIYIGKNEKGKEEREFEEVNMLDAARYFRKSSSLEQTGDPLIPIKSEKGYPLVYTLSIGSMVILYDKTPEEIWDMDMKNLQKRLYKITAMSLTDGRMVVVHHQEARQATELKQEAIAYNYDGNLKPMLRIGFNKFKALVQGVDFDINDLGEITRLI

SEQ ID NO: 8500 - protein, 1206 aa, synthetic construct
  REGION 1..1206: note = Synthetic
MERILGIDTGTNSLGWAIVDKEESSYRLIEKGVNIFQEGVKIEKGIESSKASERTDHRSIRKLYYRRKLRKIRVLRVLSDNHLCPPLSQGDLSMWRLHKKYPIDNNFIDWEQTDDKENKNPYYYRHLCVTKKLDLNKLDQRYILGRAFYHIAQRRGFLSNRKETTKESDGTVKLSIDELSTEISDSGCKYLGEYFYSLYQKGEKIRNHYTARKEHYLKEFKAICEIQGIDEGLAIKIEKTIFTQRPLKSQKGQVGTCTFEKGKSRCSASHPYYEEFRMLCFINNIKVKTPQDDDLRLLTKEEKELIAPLFYRVSKKNFNFEDIAKKIAGKNNYGYYKKETYKPYLFNYQIDTSVSGCPVLSQLRAIFGDNWIDTVSQYYTLRKDKKKSEIVNDIWHALFFYSDEDKLKGFAGNRLQLEEEKAEKFAKIAMPSDYASLSLKAIRNILPYLRKGLPYSHAVFLGNLGSIIPHYIWEIDDTRGFIIDEICKMIDQYDPSKETGTLDQCIKGFLNDNFDLPTNATDILYHPSMMDAYPKVRPNDLGEYQLGSPRTGGVKNPMAMHSLFRLRKVINQLLKEKKIDNNTTIHVEFARELNDANKRKAINDIQRSNQKKHDEYKNSIKEQYKAETGIDIEPNDSEVLKYELWEEQNHICLYTGETIRISDFIGANPKYDIEHTIPQSVGGDSTVMNLTLCNNRFNRESKGTKLPSQLPNHEEILERIEDWKDRYESLEQQIRRTKANAASSKEQKDTIIQKRHRLSIERNYWKNKYIRFTMTEIPEGFSRRQGTDIGIISKYARLYLKSVFPKVYVVKGLATSDFRKIWGLQDDYVKKERVNHVHHCIDAITIACIGKYEYDKLAQYYHDEENHKWFGLQKAQYPKPWATFTEDLKNIQQEILIAHYNANNLPKQSKHKIKMPDGSIQYAQGDTARGSLHNDTYYGAIQQDGQIKYVVRKQLKDIKESDIANIVDDVVRQKVMNAVTEKGFKTAMSEAIWMNEGKQIPIKKVRCYTPSVTNPLNIRNQRDQSQHEYKRTYHVTNDRNYMLAIYIGKDNKGKEKREFELVNNLDAAAYYKRSNDKGLTDHQLVPQISKSNYPLAYCLKIGTRVLLYEKSPSEIWENDLSVIQQRLYKVTGLSSLRISKYSYAAINMVYHQEARASSLIPVTKGIFKKEDLFRPGIFMLNTQINALVEGYDFEIDELGKLKRLRQ

SEQ ID NO: 8501 - protein, 1204 aa, synthetic construct
  REGION 1..1204: note = Synthetic
MERILGIDTGTNSLGWAIVDKDENQYHLVAKGTNIFSEGVKIEKGIESSKAAERTEHRSVRKHYWRRKIRKIRLLTILSDNDLCPRLKHEQLRQWRLKKVYPTDDTFMEWQRTEDKAQVNPYKFRYICLTQKLDLSDITQRFILGRALYHLNQRRGFLSNRKEATKESEGTVKEGISSLSKDMKDSGCEYLGEYFYQLYQQGKKIRNHYTARKEHYLKEFKAICSKQELDDALIEKLEKAIFDQRPLKSQKGQVGTCTFEKGKSRCPSSHPLYEDFRMYSFINNIKVQVDTLYDKGERSLTDEEKQLIIPLFKRKSKRTFPFEDIAKKIAGKNNYCYIKSNEEKAYKFNYQMDTQVSGSPVNAQLEEIFGEDWLSSVCEVYTLANNKSRFQIMNDVWHVLFFYDDEDKLKEFAKDRLQLDDELAEKFSKISIPNDYAALSLKAIRKIMPYLRDYGLIYSEAVFLANLVDVLPQHVWGIKEMREAAIENVIDVMHSYDKNNIDGITLEGCVKTFLKERYQVSDDNLKKLYHPSMLDPYPRQRPNDEGVFQLGSPRISSVKNPMAMHSLFRLRKVVNLMLKKGYITPDTKVHIEFSRDLNDANKRWAIQTWQRENEKERERCRKEIEKYIASPSDTDILKYQLWEEQNHKCLYTGDEIRITDFLGDNPKYDIEHTIPRSAGGDSTKMNLTLCSSRFNRDEKKTKLPAELVNHDEILERISNWKEKYEDIDKQIRKISTKGATSKEDKDSKIRRRHYLILQRDYWRGKYQRFTMTEVPEGFSRRQGTDISVISRYARMYLKSVFKQVYIVKGIATSDFRKMWGIQDEYAKKERVNHVHHCIDAITIACIGKAEYDKLADYRHQYDDYLFQGKTKPTFDKPWPSFVIDIKHIQDELLIAHYAKDNLEKFTKKNLRGKDGRIIRDKFGNKLQMKGDTSRNSLHNDKFYGAINHEGEIKYVYRTNIEALDAKSIGNIVDPTVRSIIESAIAIHGSLKAAINKGIWMNEEKHIPIKKVRVFRNDVKKPIELKDQRDLSDKDYKQHYYVTNDGNYMMLIFSKLNNKGREIRQHVVINSLEATEVIKSHKRSQVGKVVWESYYSKEGFDLIYKLKSGTMILLYENNRDEVWDLDIRNLQKRLYIITKMKYDGRIYMMHHQEAREKKDLEEKSGSFKINEDYRPLIVNSYNQFNALVQDLDFEINDLGEIRRLI

SEQ ID NO: 8502 - protein, 1204 aa, synthetic construct
  REGION 1..1204: note = Synthetic
MEKILGIDTGTNSLGWAIIEKNDNGEIKLLHKGTNIFTEGVKIEKGIESSKAAERTEHRALRKHYWRRKVRKIRLLTVLEQNRLCPPVDTEQLRDWRLNGIYPHDEEFLAWQRTEDKNNVNPYQFRHICLTQQLDLSNLTQRYILGRALYHLNQRRGFLSNRKETTKASDGAVSEGISSLTAEMQDAGCEYLGEYFYRLYQSGEKIRSRYTARNEHYLKEFNAICEKQQLSEDLVDNLRRAIFFQRPLKSQKGTVGTCAFEKGKARCPASHPLFEEFRLYSFLNNIKIKTPADADLRYLSGDEKAIILPLFKKYRKSKHSFNFEDIAKKLAGKGKYMYFRDKDDKPYQFNYQMDTPVPISTVTAQLVEIFGENWLEGACEVYTLAEGKTPFQIMNDVWHALFFFDDEEKLKMFAKDRLQLSDEDAEKFAHISMPNDYASLSLKAIRKILPFLKDYGLIYSQAVFLANLDEVLPSFFMRHDDEHEKAINAAVEALLEYGNKNDERPLEVYFKDYLKSEYSGYDFDEKSLQKLYHPSMMEQYPHVAPGDDGIYQLGSPRISSVRNPMAMRSMFRLRKVVNLLLAQGYIDKDTKVHIEFSRDLNDANRRWAIQQWQRQQEKNREEIRKRIQEDAHIENPTDNDILKYQLWEEQNHICIYTGNQIGISDFLCSNPKYDIEHTVPQSAGGDSTKMNLTLCESAYNRKTKKTKLPTALPYYEAMLQRIEHWNERAEELSKRIRKLKGSRAATKEEKDSIIRRRHLLSLERDYWRGKYRRFTMTEVPEGFSRRQGTDISVISRYARMYLKSVFDKVYIVKGIATSDFRKMWGIQDEYTAKERVNHVHHCIDAITIACIDKVQYDKLARFYQDEDNYHLGKGNKPQFEKPWPTFVADIKHIQDELLVAHYAKDNMPKHTKKKGGDNYIQGDTARGSLHNDTYYGAIERDGDIRYVVRKSLDMLEAKDIDKIVDEVVKQKVKDAIATHGSLKAAVEATIWMNEPKQIPIKKVRIFANSVTRPINIRQHRDKSRHEYKRQFHVQNDRNYMMAIYVGCDERGREKRTFELISNIIAANFYRRSGQNAEEKRQLVPEVNNGCSLKYQLKIGTMVLLYENNPDEIWNSNLQELQKRLYKVTGLNSFMSGSRSYGRISLVHHQDARPGTEVKQINGAFRASEVFRPGILMLHTQFKALVDGVDFELNDLGEIKKIIND

SEQ ID NO: 8503 - protein, 1203 aa, synthetic construct
  REGION 1..1203: note = Synthetic
MERILGIDTGTNSLGWAIIEKNDNGETKLLHKGTNIFTEGVKIEKGIESSKAAERTEHRALRKHYWRRKVRKIRLLTVLVKNRLCPPVDTEQLRDWRLKGIYPHDEEFLDWQRTEDKNNVNPYQFRHICLTQKLDLSNLTQRYILGRALYHLNQRRGFLSNRKETTKASEGAVSEGISSLTAEMQAAGCEFLGEYFYRLYQSGEKIRNHYTARNEHYLKEFNAICEKQQLPEDLVTDLRRAIFFQRPLKSQKGTVGTCAFEKGKTRCPASHPLFEEFRLYSFLNNIKIKTPDDADMRYLTGDEKAAILPLFKKYRKSKHTFNFEDIAKKLAGKGKYMYFRDKDDKPYQFNYQMDTPVPISTVTAQLEEIFGENWLEGACEVYTLADGKTPFQIMNDIWHALFFFDDEEKLKLFAIDRLQLSDEDAEKFAHISMPNDYASLSLKAIRKILPFLKDYGLIYSQAVFLANLDEVLPSYFIRHEDEHQKAINEAIDVILSYGSKQDERPLEIYFKDYLMTRYEEYGIKEDLPKLYHPSMMEQYPRVQPSDAGIYQLGSPRISSVRNPMAMRSMFRLRKVVNLLLAKGYIDKDTKVHIEFSRDLNDANRRWAIQQWQRQQEKNKEEIRKRIQEDAHIDNPTDTDILKYQLWEEQNHICIYTGNQIGISDFLCSNPKYDIEHTVPQSAGGDSTKMNLTLCECAYNRKTKKTKLPSELPHHEAMLQRIEHWNERAEELSKRIRKLKGSRAATKEEKDSIIRRRHQLSLERDYCRGKYKRFTMTEVPEGFSRRQGTDISVISRYARMYLKSVFDRVYIVKGIATSDFRKMWGIQEEYTAKERVNHVHHCIDAITIACIDKVQYDKLAQFYHEEDDYRQGKGKKPQFEKPWPTFVADIKHIQDELLVAHYAKDNMPKHTKKKGGYNFIQGDTARGSLHNDTYYGAIELEGDIKYVVRKSLDMLEAKDVDKIVDEEVKRKVNEAIAAHGSLKAAVEATIWMNEEKHIPIKKVRLFANAVTRPINIRQHRDKSRHEHKRQFHVQNDRNYMMAIYVGLDERGKEKRAFELISNIRAANFYRRSGQNAAENKQLVPDAKNGLPLKYELKIGTMVLLYENNPDEIWNANQQELQRRLYKVTGLSSMLIQSHAYGIMAMIHNQDARPSSIIKLKNGAYTSGEEFRPGIKMLHTQFKALINGVDFELNDLGEIRRISND

SEQ ID NO: 8504 - protein, 1203 aa, synthetic construct
  REGION 1..1203: note = Synthetic
MEKILGIDTGTNSLGWAIVEKHEDGYKLLHKGVNIFQEGVKIEKGIESSKAAERTEHRSARVRYYRIKVRKIRLLKVLSDNNLCPPVTSKELMMWRHRNIYPKNDLLLKWESTDDIENKNPYAYRYKCLNEKLDLTDITQRYILGRALYHINQRRGFLSNRKSEDSDDEGKVKSGISELSKEIENAGCKFLGEYFYQLYQKGEKIRNHYTARNDHYLAEFKAICEKQQLDETLIKKLEEVIFFQRPLKSQKGLVGHCVFEPKKTKCPASHPFFEEFRMLQFVNNIKIQTPHDEVLRPLNEEEREKILPKFFRKSKTSFEFEDIAKELAGKNNYAYYKNPKGKPYQFNYQMDISVSGCPVTAGLKEVFGEDWQDAVCEVYDKATDKSQYQIINDIWHVLFDFSDKEHVVEFGKKHLQLNDEVATKFGNIKVHSDYASLSLKAICKILPYLRMGLIYPIATFLGKIEDIIPSNVWNVEENRKQIIDELLSAISKKDDNPADVRTTEQCIKDYLISHFGVNEEDADKLYHPSMIESYPHVPEGVNKLGSPRINSVRNPMAMRSLFRMRHVINTLLAEGKIDRDTTIHIEFARELNDANKRQAVYRINRENEKERQKAKDEIIKLYKVETGKDIIPTDTDILKYLLWEEQNHRCIYTDEEIGISEFLGENPKYDIEHTIPRSVGGDSTMMNLTLCNSKFNRDIKQTSLPSQLSNHEDILVRIEEWKKKYEELDKRIHKNRTIAGMAKDVKDRRIQERNYLKLRRDYWYGKYQRFVMTEVPEGFSRRQGSGISVISKYGRLYLKSFFNRVFVVKGLATSDFRKIWGIQEVYSKKERVNHVHHCIDAIVIACIGPGEYSKLAEYYHDEENQKWYGASKAKFDAPWSTFAADINKIQQDIIVAHHTADNMAKKGKHKILLKGKKVWADGDTARASLHLDTYYGAIERDGEIKYVVRKALDENFKDSDVKNIVDETVKEIVLNAIKEHGNLKKAIAEGIWMNKEKGVAIKKVRCFTPSVTRPLDIRKQRDLSPKEYKQQYHVMNDGNYAMAIYIGHDKKGKEKRAFEMINNLDASRYYKVSNDKESVDYNLVPLSKKDYPLAYVLKKGTMVLLYENTPEEIEECSRLDLVKRLYKITGLSSMETSSSEFGRIVLTHSQEARPSGELKAQNGAYKSQELFRNKIIMLHTQIKALVEGYNFIINDIGEIKMLR

SEQ ID NO: 8505 - protein, 1203 aa, synthetic construct
  REGION 1..1203: note = Synthetic
MEKILGIDTGTNSLGWAIVEQQGEGYKLVDKGVNIFQEGVKIEKGIESSKAAERTTHRSARVRYYRIKVRKIRLLKILSDYHLCPPVTSAELSQWRLRNVYPDNELLHQWEGTDDKSDKNPYTYRYKCLTEQLDLTDTTQRYILGRALYHINQRRGFLSNRKSEDGDGEGAVKSGISDLTKEMEAAGCHYLSEYFYHLYHKGVKIRGHYTARNEHYLNEFDAICEKQHLSEELAKKLKNVIFFQRPLKSQKGLVGHCVFEPKKTKSPASHPLFEEFRMLCFVNDIKIKTPQDDELRPLTEEERKKILPKFYRKSKPDFDFEDIAKELAGKGKYAYYRDPQGKPYLFNYRMDTSVSGCPVTAGLRDIFGEDWVNAICEVYDKAKGKTLLQIVNDIWHVLFDFSDKEHLIEFGKKHLQLSDEEAKKFGNIRLSSEYASLSLKAIGKILPYLRGGMIYSLSAFFANLGEVVPADIWQEESNRPQIINGILEAIARRDSNELDHRTTERCIKDYLIAQYEVTEKETDKLYHPSMMEAYPRVPEGVNQLGSPRISSLRNPMAMRSLFRLRHVINTLLAEGKIDRDTTIRIEFARELNDANKRQALARYVKENENERKKARAEIVQLYKGETGKAIEPTDTDILKYQLWEEQDHRCIYTDEQIGIADFLGPNPKYDIEHTIPRSAGGDSTKMNLTLCNSRFNREVKQTLLPSQLANHQEILLRIAGWKERYEELDKRIRRIRTSSSMTKQQKDQKIQARNLLKLRRDYWYGKYQRFVMTKEPEGFSRRQGTDISIISKYARLYLKSFFNRVFVVKGLATSDFRKIWGIQDIYAKKERVNHVHHCIDAIVIACMGSVGYSRLAQYYHDEENHKWYGSAKGHLAAPWETFQEDMNKIQREIIVSHSTQDNIGKSGRRRIRLKGKKVWVDGDAARASLHNDTYYGAIERDGKIKYVVRKALDDSFKESDVDKIVDDTVRGIVKEAISACGSLKEALAQGIWMNKEKGIPILKVRCFTPSVTRPLNIRHQRDVSAKEYKRQYHVTSETNYAMAIYVGHDKRGKEKRAFELVSNLDACDYYKESNNKEVQGYHLVPPTKNGYPLTYLLKKGTMVLLYENTPDEIRDCTKAELVRRLYKITGFSSMVVGGNEYGTLTMLHSQEARPSSSIKTKNGAYKQNEEFRSSIAMYHTQLKALVAGRDFEINDLGEIKWLK

SEQ ID NO: 8506 - protein, 1202 aa, synthetic construct
  REGION 1..1202: note = Synthetic
MTKILGIDTGTNSLGWAIVEKQADEYHLLDKGVNIFQEGVKIEKGIESSKAAERTAHKAARVRNYRIKLRKIRLLRILSDAHLCPPLSKVELSAWRLKKEYPKNELFMQWQSTDDESEKTPYAYRHKCLHDCLDFSSVTDRYILGRAFYHMIQRRGFLSNRKDQSADDTGKVKESISNLTQEMHDAGYEYLGDYFYSLYNKGEKIRNHYTARNEHYLAEFKAICEKQDLDKNLGPEVVRQIEKAIFDQRPLKSQKGQVGKCVFEKNKTKCPSSHPMYEEFRMLSFINNIKIQTPNDGVLRPLSPEERALIMPLFFRKSKKLFDFEDIAKKLAPQKQYGFYKKSSDAEMPYLFNYPMDTSVSSCSVTTALKDIFGDDWIDSLCETYTLAEGKSRLNVVNDIWHVLCFYTDDTKLAEFAKNRLQLNDEEAKKFCEISLPGDYASLSLKAICKILPYLRRGLIYSHAVFLGNLCEVMPQYEWDIEEMRNAAIDHIIHEMNQIDSKDARTFEMCIKEYLKEQYHISEEKLKKLYHPSMMEVYPRVQRTNNHGVYQLGSPRIDSVRNPMAMRSMFRLRKLVNRLLEEGKIDSDTEIHIEFARELNDANKRNAIAAFTKENQNKNDEARKKIKNFFKAETGKDIEPTDVDVLKYVLWEEQGHICLYTGKQICISDFIGGNPKFDIEHTIPRSVGGDSTKMNLTLCDSRFNRDVKKTKLPTELPNHEEIMARINDWREKYESLDGQIRRQKKMSKGATTKDQKDAIIRKRHLLELQRDYWRGKYLRFTMESVPEGFSRRQGTDISVISKYARLYLKSLFKHVYTVKGIATSDFRKIWGIQKAYSKKERVNHVHHCIDAIVIACIGLDEYNKLGAYYHDEENHEWYGMSKAYFKKPWSTFVEDIEKVQDEILVYHYTPDNMPKQGRRRILIDGKRVLSKGDAARGSLHNDTYYGAIKNDGVVRYVKRINLASMKESDVKNFVDDVVRGIVEATIREKGFKEAMAGTIWMNEEKQIPIKKVRCYTSIKNPLSFDKKKQRDLSDKEYKRNYYVTTDGNYMVALYVGSAKTGKKKTFYEFVNMMEAADYYKTSYDKSVIGHNIVPLEKDNCQLAFILKKGTMVIFYKETKEEVWDYSQKEKDRNLYYVSVIESDGRVTFKYHQEARQDKELPRNASDTSDIRPKIRVGLASAKILVQGYDFEINELGEIKRLK

SEQ ID NO: 8507 - protein, 1202 aa, synthetic construct
  REGION 1..1202: note = Synthetic
MERILGIDTGTNSLGWAIIEKNDKGETRLLHKGTNIFTEGVKIEKGIELSKAAERTTHRALRRQYWRRKVRKIRLLTVLVENRLCPPVDSRQLRDWRLKKIYPHDEEFLAWQLTEDKNNVNPYQFRHICLTQKLDLNNLTQRYILGRALYHINQRRGFLSNRKETTKASDGAVSEGISKLTAEMNQAGCQYLGEYFYQLYQSGQKIRGHYTARNEHYLNEFYAICEKQQLPEDLVKKLERAIFFQRPLKSQKGTVGTCTFEKGKARCPASHPLYEEFRLYSFLNNIKIKTPQDAQLRYLNGDEKATVLPLFKKYRKSKHTFNFEEIAKKLAGKNKYMYFRDKDDKPFQFNYQMDTPVPISIVTAQLEGIFGDNWLEGVCEVYTLADGKTPFQIMNDVWHALFFYDDSEKLKDFAINRLQLNEEDAERFASISMPNDYASLSLKAIRKILPFLKDYGLIYSLAVFMANLDAVLPAHFMIHEDEHQKAINEAVDVLLAYDSKNDDRPLELYFKDYLMYRYEEYGLCSEELQKLYHPSMLEQYPRVLPNKDGIYQLGSPRISSVRNPMAMRSMFRLRKVVNLLLAKGYIDENTKVHIEFSRDLNDANRRWAIQQWQRQQEKNREEIRKRIQEDAHIENPTDTDILKYQLWEEQNHICIYSGNQIGISDFLCSNPKYDIEHTVPQSAGGDSTKMNLTLCESGYNRKTKKTKLPSELPDHEEMLQRIEHWNERAEDLSKRIRKLKGSRATTKDEKDSIIRRRHLLALERDYWRGKYLRFMMTEVPEGFSRRQGTDISVISRYARLFLKSVFKHVYIVKGIATSDFRKMWGIQEEYTAKERVNHVHHCIDAITIACIDKTQYDKLAQFYHDEDNYRQGKGKKPQFEKPWPTFVADMKHIQDELLIAHYTKDNMPKHTRKRSGDVFLQGDTARGSLHNDTYYGAIEHDGDIRYVVRKSLDMLDAKDVDKIVDEEVKSKVKEAIATHGSLKAAVEATIWMNEGKQIPIKKVRIFANSVTRPINIRKHRDKSRHEYKQQFHVQNDRNYMMAIYAGLDEHGRERSVCELVSNIAAAKFYRRSIHGAFENQDIVPDTKNGYQLKYQLKIGTMVLLFESNPDELWHLDKQDLQKRLYKVIGLNSFQSGTSVYGRISLVHHQDARPSGLIKLKNGAFSSSEEFRSGILLLHGQFKALVEGVDFELNDLGEISRLR

SEQ ID NO: 8508 - protein, 1201 aa, synthetic construct
  REGION 1..1201: note = Synthetic
MEKILGIDTGTNSLGWAIVEKNGEECRLLAKGTNIFSEGVKIEKGIESSKASERTIHRSVRKHYWRRKIRKIRLLSILSDNNLCPPLRKGELREWRLKKIYPVNDAFLAWQRTEDKDNINPYRYRYLCLTQKLDLTDITQRYILGRAIYHLNQRRGFLSNRKESTKSSEGQVLEGIKDLSVEMAEAGCMYLGEYFYHLYQEGKRIRNHYTDRKEHYFKEFHAICSKQELSAELVSKLEKAIFDQRPLKSQKGQVGTCTFEKGKPRCSSSHPLYEDFRMYSFLNNIKIKTPKDDEMRYLTRDEKASIIPLFKRKSKRTFNFEDIAKKLAGKKNYCYYKDKEDLPYKFNYQMDTQVSGSIVNAQLEDIFGENWIDGVCEVYALANNKTKFQIINDVWHALFFYDDEDKLKEFAKNRLQLDEEQAEKFSQIVLPNDYASLSLKAIRKILPYLRDYGFIYSQAVFLANMKEVLPEHIWGIKEVRDGAIENVIDLICSYDKSCDDRTLEFCIKDFLRDRYQVEVDKLNKLYHPSMMELYPRATPDNDGIYQLGSPRISSVKNPMAMHSLFRLRKVINMLLREGLVDTDTIINIEFSRDLNDANKRWAIQTWQRENNKAREECRKKMGEIKELHLTSISERDILKYQLWEEQNHKCIYTGEEIGLTDFLGENPKYDIEHTIPRSAGGDSTKMNLTLCNSRYNRDVKKVKLPSQLSEHEEILERIKSWKEKYEELNSRIRRISTKGASSKEEKDMRIRRRHLLSLERDYWRGKYQRFEMTEVPEGFSRRQGTDASVISRYARLYLKSVFKHVYIVKGIATADFRKMWGIQDEYTKKERVNHVHHCIDAIIIACIGKNEYNKLAQYYHDADAYKYNKGQKPHFDMPWPTFVSDMKQMQDQLIITHYSKDIMPKQSRRYVRDSRGRKLLTQGDAARASLHNDTYYGAINVDGEIKYVVRKSLDSLEPKDVALIVDEAVRKKVEEAIREHESLKKALEKGIWMNEERGIPIKKVRIFTGSVTRPINIRNHRDKSRHDYKRQFHVQNDRNYMMAIYRGKDKKGKDRSEFELINNLDAALYYRRSNNNKYSLVPERSKSGYPLLFCLKIGTMVLLYESSSDEIWDLDPKNLAKRLYKVTGLSSMVVDSRNYGKIALVHHQEARPSSEVKLKNGKFVSGEDFRPGILMLHGQIKALVQGVDFEINELGEIKRLI

SEQ ID NO: 8509 - protein, 1199 aa, synthetic construct
  REGION 1..1199: note = Synthetic
MEKILGIDTGTNSLGWAIVEKQDDEYKLIDRGVNIFQEGVKIEKGKELSKAAEKTSYKSTRVRYYRIKLRKIKLMKILSAYHLCPPVSQEEFSVWRHRSIYPKNELLLKWESTDEDSNKNPYYYRFKCLTKKLDLDDVEQRYLLGRALYHINQRRGFLSNRKNIGDDSGVVKTGISDLTKEMHEAGCQYLGEYFYKLYQQKAKIRNHYTDRNEHYLKEFKAICAKQELDYDLVSKLEHAIFDQRPLKSQKGLVGHCPFERKKTKCPSSHPLFEEFRMLEFINNIKIQTPHDDTLRPLNEEERKAILPKFYRKSKPSFNFEDIAKELAGHNKYAFYKKPQGKPYLFNYSMDTSVSGCPITAGLKEIFGEDWLISVSEVYDKADGKSALQIMNDIWHVLFDFSDKEHIVKFGKEHLQLDEENAKKLSNIKVYSDYASLSLKAICKILPYLRRGLIYPIATFLAKLEDIIPAEIWKGGSASDQIVSDILAAIDAKDNNPADDRTTERCIKDYLMKTYHLAENEVNSLYHPSMIEVYPHVPEDKNKLGSPRISSVRNPMAMRSLFRLRHVINALLREGKIDRNTTIHIEFARELNDANKRKAISRMVKDNEKERSKAKNEIIRLYKEETDNTIEPTDNDILKYLLWEEQNHRCIYTDKQIGIVDFLGKNPKFDIEHTVPRSVGGDTTKMNLTLCDSSFNRNIKQTCLPSELSNHEEILNRIAPWKEKYENLDKQIRKKRTSATMDKEQKDKIIQDRNLLKLKRDYWYGKYQRFVMTTVPEGFSRRQGTDISLISKYARLYLKSFFNRVFTVKGIATSDFRKIWGIQDVYTKKARVNHVHHCIDAIVIACLGPSEYSKLAQYYRDEENHEWYGSSKPHIAAPWPSFVADMNTIQKELIVAHHTSDNLVKQGKRRILLKGKNVLAMGDAARASLHNETYYGAIERNGKIEYVVRKALNEEFKDSDVKNIVDDTVRNKVEDAIKQYKTLKEAIANTIWMNKEKGIAIKKVRCYAPKVTRPVDIRYQRDLSPKKYKQRYHVTNDSNYAMAIYIGHDKKGKPKNAFEMINNLDACSYFKQSNDKEIVGKSMVPLTKKDYPLAYILKKGTMVMVYEISPEELDCQETMVKRLYKIVGISSCEKSGIEYGIINMVHLQEARSSGEIIGRYGAFKKSDEFRNRIIMYHTQFKALVEGYDFDINDLGEIKMR

SEQ ID NO: 8510 - protein, 1198 aa, synthetic construct
  REGION 1..1198: note = Synthetic
MSRILGLDLGTNSIGWAIVDTQQNGSYKLYDKGVSIFQEGVKIEKGNESSKAAERTGYRSARRRIFRRRLRKIETLKVLVDLGWCPYLSVEQLSDWRYRNIYPKIDEFMLWQRTNDNEQKNPYYYRHLALTQKLDLSKKEDKYILGRVMYHLSQRRGFLSNRKENTKESNGKVKDDISALNKALEESGCKYIGEYFYTIYGKERIRAHYTSRQHYKDEFDAICKIQGISDSIKKQLERAIFFQRPLKSQKGSVGHCKFETKKTRCPVSHPRFEEFRMWSFLNNIKVKTPYEEDMRPLNGEEIIKILPLFFRKSKKQFPFEDIAKALSARGQYAFYKDPDEKPYRFNYKMFTSVSGCPVIAGLKEIFGDNWEEGIISRYTDKKQKTKEQIVNDVWHSLFFFSDDEKLRAWAKEKLQLSEEEALKFSKISIGNDYSSLSLNAINKILVFLRRGFKYSHAVFLANISSIVPKEIISNPENRKIIEREIGVIVDNPSPTKETIEQRIKEFLMDNFDLGAAHYERLYHPSMIDVYAKSNTGFLGSPRTNSFKNPMAMRALFRLRALVNDLIKNGEIDKDTKIHIEYSRSLNDANRRKALERYQRDREKKNNEFREEIIKHFREHGIDAQPTLTDIEKYRLWEEQGHICIYTGERIALSQFLGSNPQYDIEHTIPRSLGGEDALENKTLCNNKFNRDVKKNKIPSQLSNYQEILIRLEPVKERIEELRKQIEKLKGGSAATKEVRDAIIQKRRLLEYERNYLSDKYGKFLMKEVPSDYRKNQDVDNSIISKYARPYLRTIFTHIYTVKGLTTSQFRKMWGLQEDEKKDRSTFLNHTVDAIVIACIGPKEYSEMAHYYKADEEFRWFGKNRPTMPKPWATFTEDVQNISKEVLVSHYTPDNLKKRTYKLLRKRGEIQKGPDGKPLMTKGDTARGALHLETFYGAIQRDDEIKYVVRKPLSSLEKTDITKIVDDVVRQKVEQAIEEKGFKEAMAGTIWMNEQKGIQIKKVRIFTPSVTNPIHLKDLRDKSRFEYKQQLNVANDRNYCMGIYEGTDKKGKVKRSFKLVNNLNAVGAVNEGVSSNMVPVEDSNGFKLRYVLKIGTMVLLYENTPDEIYEANQEELTRRLYKVVGLSVLSLSNRDYGRVNLWYNQESRPAKEVKTINGAFIRGEDIRAAIMNYHTQLNALVEGFDFTLSPSGKIRFIRR

SEQ ID NO: 8511 - protein, 1197 aa, synthetic construct
  REGION 1..1197: note = Synthetic
MKKILGIDTGTNSLGWAIVKKETNEYHLLDKGVNIFQEGVKIEKGIESSKAAERTMHKATRVRYYRIKLRKIRLLRILSDNQLCPPLTSAELSAWRLKKIYPKNELFMHWQSTDDNVDKNPYACRHKCLHEKLDLTNLTDKYTLGRAFYHMIQRRGFLSNRKDQTSDDTGKVKEGISSLTEEMNKAGYEYLGDYFYHLYNNGKKIRNHYTARKEHYLSEFKAICKKQSLSQDLVSKIEKAIFDQRPLKSQKSQVGKCVFEKNKTKCPSSHPMYEEFRMLSFINNIKIQTPKDDELRPLNKEERSTIMPLFFRKSKKQFDFEDIAKKLAPKKQYGFSKKATDSEMPYLFNYPMDTSVSGCPVTAALKDIFGDNWIDGISEVYTLSKGKASQEIVNDIWHVLFFYSDTSKLVQFAKVRLQLNDNEAKAFSEITIPSAYAALSMKAICKILPYLRRGLIYSHAVFLGNLCEVMPSYEWSIKEMREAAIDNIIREMTKYDCHDERTFETCIKDYIREQYNVPEENLKKLYHPSMMETYPKVRPNTQGEYRLGSPRIDSVRNPMAMRSMFRLRKLINRLLEERKIDSDTEIHIEFARELNDANKRKAIADFVKENQSANDKAKKEIAMLYKKEMGKDIEPTDSDIIKYTLWEEQNHICIYTGKQIRISDFIGTSPKFDIEHTIPRSVGGDSTKMNLTLCESHYNRDIKKTKLPTELPNHDEIMSRIADWKEKYESLEGQIRTQKKKSKGATTKEAKDKIIAKRHLLELQRDYWKGKYERFTMESVPEGFSRRQGTDISVISKYARLYLKSLFKHVYTVKGIATSDFRKIWGIQDIYSKKERVNHVHHCIDAIVIACIGPDEYNKLGAYYHDEENHEWYGMSKATFVKPWNTFVEDIKKIQDEILVYHYTPDNMPKQGRHRIKINGKKILTQGDAARYSLHNDTYYGAIENDCNIKYVKRIDLASLKESDVKNIVDDTVRSLVENAIKTKGFKKAMEEPIWMNEEKHIPIKKVRCYTPSVTKPLHIRQQRDASTKEYKQQYHVANDSNYMLALYIGKDKKGKEKREFEIVNMLQAAQYFKTSNDKEVAGHNLVPIKSEHDYPFAYYLKIGTMVLLYEKTPAEVWEDTTTGLNKRLYKVTGFWFDGRLVITKHTEARPSSEVPTESKNFIIGDAKGRYSYSKFTALVQGYDFEINELGEIKRLR

SEQ ID NO: 8512 - protein, 1196 aa, synthetic construct
  REGION 1..1196: note = Synthetic
MKEKILGIDTGTNSLGWAIVEKEDGVTRLLEKGTNIFTEGVKIEKGIESSKAAERTEHRASRKHYRRRKVRKIRLLTILVENHMCPPVSKLELKNWRTKKIYPANEQFMAWQRTEDKEGINPYHYRYICLTEKLNLDNLSQRYILGRALYHLNQRRGFLSNRKDTSKESEGVVNEGISDLSVKIEEAGCQYLGEYFYKLYEKGEKIRNHYTARKEHYLKEFHAICEKQGIDVELVGKLEKAIFTQLPLKSQKGLVGTCKFEKGKSRCPSSHPLYEEFRMYSFLNNIKMRTPKDLEMRYLTVEEKNKVIPKFKRKSKKSFTFEDIAKELAGKNNYCFNGDTAEKPYRFNYQMDTNVAGCVVTAQLEEIFGDKWLDNVCEVYTLAQGKTKFNIMNDVWHALFNFDDEDRLREFGKNRLQLDDEVARKFSKISMPNDYASLSLKAIRKILPYMRDYGLIYSQAVFLANLEEVLPKYVWEIKDMREAAIEKIIDLINNYDKRCEERTLEQCIKDFLKKKFMVDESRLKKLYHPSMIELYPCVQPDDMGLYQLGSPRISSVRNPMAMHSLFRLRKVINLLLKEKKIDENTTIQIEFARELNDANMRNAIQQYQRNREKNHNEYRERIIEYGIKDPTERDILKYQLWEEQEHKCIYTGEEICIGDFLGTHPKYDIEHTVPRSVGGDSTMANMTLCNSAYNRDVKGTKLPTALQDYDAILQRIEGWKEKYVELDRRIRKTKGVSTSTKEEKDKNIRKRNLLVLERNYWRDKYSRFTMTEVPEGFARRQGVNIGLISRYARLYLKSVFKRVFVVKGIITSEFRKIWGIQDEYSKKERVNHVHHCIDAITIACIGKHDYDMLAQYYHDDEEFKWGRSAKKPQFPKPWPTFVEDIKAVQDEILVAHYNNDTLPKHTKKRDDKRLIIQGDTARASLHNDTYYGAISENGEVKYVVRRNLDALDPKDVRNIVDKAVREKVEQAIADNKNLKAAIEKGIWMNVEKKIPIKKVRVYTPSVVRPIHIRKHRDESIAEYKKQFHVQNDRNYLMAIYIGKDQKGKEKRSFELVNNIDAANYYKLSNDALDDLVPRTSLKGNYPLAYCLKIGMMVLLYEESPEEVWDLGVNELTKRLYKVNGLSSMIQKSPYGVIFLLHHQEARKSTMIKYKNGAYHNNEEMRAGIKMLHTQIKCLVQGVDFEINELGEIRRII

SEQ ID NO: 8513 - protein, 1212 aa, synthetic construct
  REGION 1..1212: note = Synthetic
MTKILGIDTGTNSLGWAIVEKQTDGYHLLDKGVNIFQEGVKIEKGKESSKAAERTAHKAARVRNYRIKLRKIRLLRVLSDSHLCPPLSKAELSAWRLKKEYPKNELFMQWQSTDDALEKTPYACRHKCLHESLDFSSMTDRYILGRAFYHMIQRRGFLSNRKDQSGDDTGKVKESISNLTQEMHDAGYEYLGDYFYSLYKRGEKIRNHYTARNEHYLSEFKAICEKQDLAKNLGQEVVSQIEKAIFDQRPLKSQKGQVGKCVFEKNKTKCPSSHPMYEEYRMLSFINNIKILTPKDDALRPLSAEERELIMPLFIRKSKKQFDFEDIAKKLAPKKQYGFFKKSADAGMPYLFNYPMDTSVSGCPVTAALKDIFGDNWIDGLCETYTLAEGKSRLDIINDIWHALFFYTDNTKLAEFAKNRLQLSDEEAKKFCEISLPADYASLSLKAICKILPYLRRGLIYSHAVFLGNLCEVMPQYEWNIEEMREAAIDNIIHEMNQIDSKDARTFEVCIKEYLREQYHVSDEKLKKLYHPSMMEVYPRVQHTNNHGVYQLGSPRIDSVRNPMAMRSMFRLRKLVNRLLEEGKIDSDTEIHIEFARELNDANKRNAIAAFTKENQNANDDARKQIIALFKKETGKDIAPTDNDVLKYVLWKEQKHICLYTGKQIAISDLVGANPKFDIEHTIPRSVGGDSTKMNLTLCDSRFNREVKKTKLPTELSNYDEIMTRIQGWKDEYESLEAQIRKQKKLSKGATTKEQKDNIIRKRHLLELRHDYWKGKYLRFTMESVPEGFSRRQGTDISVISKYARLYLKSLFKHVYTVKGIATSNFRKIWGIQDIYSKKERVNHVHHCIDAIVIACTGLDEYNKLGAYYHDEENHEWYGKSKAYFKKPWPTFVEDIKKVQDEILVYHYTPDNMPKQGRRRIKINGQKVLCKGDAARGSLHNDTYYGAIENDGQVKYVKRIDLTSLKESDVKNIVDDTVREIIKAAIREKGFKDAMAGTIWMNEEKQIPIKKVRCFTPSVTKPLNIRHQRDTSTKEYKQQYHVANDSNYMLALYIGKDKKGKEKREFEIVNMLQAAQYFRTSNDKNAAEGHLVPVKSEHDYPFVYSLKIGTSVLLYESSPEEIWESSMKEQARRMYKVTGMSTSTISNSVYARITFVHNEEARSSKDFKAKNGAYKQGEELRPSIIMLHTQLNALVQGYDFEINELGEIKRLR

SEQ ID NO: 8514 - protein, 958 aa, synthetic construct
  REGION 1..958: note = Synthetic
LKSQKGQVGTCTFEKGKARCPSSHPLYEDFRMYSFLNNIKMKIHTLYENTERGLTEEEKLKVIPLFKRKSKKTFPFEDIAKKLAGKNNYCYYKSDVDKPYKFNYQMDTQVSGSVVSAQLEELFGEDWLSGVCEVYTLAKDKTRFQIMNDIWHALFFFDDDEKLKEFAVNRLQLNDEDAEKFSNISMPNDYSSLSLKAIRKMLPYMRDYGMMYSQAVFVANLCEVLPHYIWGIKETREVAIENVINEINSYDSNRIDGKTMEACIKDFLREKYQIDENNLKKLYHPSMLELYPRQCPNDEGIYQLGSPRISSVKNPMAMHSLFRLRKVVNLLLKEQIITPETKIHIEFSRDLNDANRRWAIQTWQRDNEKERMNCRKEIEKYISNPTDSDIMKYQLWEEQNHKCLYTGEEIRITDFLGSNPRYDIEHTIPRSAGGDSTKMNLTLCSNRFNRDVKRTNLPSQLTNHEDILERIAAWKEKYEELAKQIRKTNTRGAASKEEKDKIIKRRHYLSLQYDYWRGKYQRFVMTEVPEGFSRRQGTDISVISRYARMYLKSVFKQVYIVKGIATSDFRKMWGIQDEYTKKERINHVHHCIDAITIACIDKNEYDKLAQFYHQSDEYKLGRGEKPVFGKPWPTFVSDIKQIQDELLIAHYFKDNMPKQAKRYVRDSKGRKVLTQGDTARASLHNDTYYGAIEVDGAIKYVVRKKLSGLEEKDVKNIVDAEVRSKVENAILLHGSLKKALEETIWMNEEKQIPINKVRVFTGSVTRPINIRQQRDKSRHEYKRQFHVQNDRNYMMAIYIGHDKNGKEKREFELINNITAANFYRRSNDRIPTDNQLVPLYSKSGYELCYRLKIGTMVLLYENSPEEVWELDKKNLQMRLYKITGLSSMVIQQKYEFGTIEMVHHQNARPSSDVKKVNGEYKSNEEFRPGIKLLHTQFKALVQGVDYEINDLGEIKRLL

SEQ ID NO: 8515 - protein, 904 aa, synthetic construct
  REGION 1..904: note = Synthetic
LIEPLFYRKSIKNFDFEEIAKKLAGKNNYCYIKDDSSKQYKFNYRMSQGASTCQTIAKLKSIFGEEWKNGIAETYTNRRKKEGLKKQAEMVDDIWNVLYSVSECDVLKDFAINKLQLDEKTADNFSKTKLAQGFATLSLKAIRKILPFLEQGFGYTEAVFLANIPTVVGKEYWNNEDIRNDIMEEIKTIFYHNTLKTNDSHNTILFCIKDILSNNFDLAPGAIDKLYHPSMINVYKDVIPNEDGILQLGSPKIDAVKNPMAMRSLHIIRKVVNELLREGIINSDTEVRIEYARELNDANKRHAIADWQKKQYGKHQKYRKEIKELFKAETGFEIEPNETDILKFELWEEQNHICLYTGQEIGISEFVGENPKYDIEHTFPRSLGGDSTKMNMTLCENKFNRENKQKKLPSELANHSEILERIDDWKKKIYILQKKYDSIRTHNGMDKENKDKKIVSRHKIKLELDYWKGKYNRFTMTEIPEGFSRRQGMGIGLISRYAGLYLKTIFHKKDNPQKSNVYIVKGSITAEFRRIWNIQDDYEKKCRDNHIHHCIDAIVVGCIGKREYDLMAQFYRDEEKYRWEKKKKPFFKKPWETFTQDMLSLKDEVLTVHFNPSNFTKKAHKKVFTPKGIFVAQGDCARVKLHKGSYFGAIEQKGEIKYVMRKELSALKIEDIKNIVDAVVKEKVLAVVKKKGFKQAMAEPIYMNEDKRILIKKVRLFVSQANPLIVKKHRDLSSKEYKQNYYVDNEGNLMIAMYEGVKKNGKIDREITVVNNLEAAKFFRQSQKNNAEKQLISHLSPKNGYPLKTVLTQKQLVLMYEDSPKEIKLRDTKNMVKRLYQVFGIEKDGRVKLKFHQEARSEGLNINSAAFKIQDTPESLYRHTKSNLKVLVNGVDFKINILGEISLI

SEQ ID NO: 8516 - protein, 795 aa, synthetic construct
  REGION 1..795: note = Synthetic
MEKQRILGLDPGTNSLGWAVLDFDNSKQEYNLVRKGEVIFEEGVGKSKRGEFSKAAYRTFYKSTRKHYFRRRLRKIEVLKVLVKYDFCPYLSDDLLKQWHEKKIYPAVKEFMDWQRTSDAEGKNPYYDRHCCLNEKLDLSLKSDRYVLGRALYHLTQRRGFKSNRLIQNNDENEEGKVKKGISELSTEMQEANCNYLGDYFYKLYTEKGNTVQIRKRYTDREKHYKNEFNAICEKQELNETIVKELDKAIFFQRKLKPQRHGVGKCTFEPNNRRCAISHPDFERFRMLCFINNIKIKTPFEENLRPLNNEEKALIEPLFYRKSIKNFDFEEIAKKLAGKNNYCYIKDDSSKQYKFNYRMSQGASTCQTIAKLKSIFGEEWKNGIAETYTNRRKKEGLKKQAEMVDDIWNVLYSVSECDVLKDFAINKLQLDEKTADNFSKTKLAQGFATLSLKAIRKILPFLEQGFGYTEAVFLANIPTVVGKEYWNNEDIRNDIMEEIKTIFYHNTLKTNDSHNTILFCIKDILSNNFDLAPGAIDKLYHPSMINVYKDVIPNEDGILQLGSPKIDAVKNPMAMRSLHIIRKVVNELLREGIINSDTEVRIEYARELNDANKRHAIADWQKKQYGKHQKYRKEIKELFKAETGFEIEPNETDILKFELWEEQNHICLYTGQEIGISEFVGENPKYDIEHTIPRSLGGDSTKMNMTLCENKFNRENKQKKLPSELANHSEILERIDDWKKKIYILQKKYDSIRTHNGMDKENKDKKIVSMQVRISGSSICVYSQNTLLWLQYGYN

SEQ ID NO: 8517 - protein, 1197 aa, synthetic construct
  REGION 1..1197: note = Synthetic
MERILGLDTGTNSLGWAIVDKYDDGHYELLDKGVDIFQEGVKREKNKESSKAAERSNQRALRVRYYRIRLRKIALLRVLSENHLCPPLSNQELSEWRHHKIYPKNALFMTWQSTDDKTGKNPYHDRYVCLTKKLDLTDPANRFMLGRALYHINQRRGFKSNRKDLSREDKDTGTVKEGISELSQEIKNAGCTFLGEYYYKLYEKGEKIRKHYTAREEHYHKEFLAICQRQGLDSELVGKLERAIFYQRPLKSQKGQVGHCVFEPKKTKCPVSHPLFEEFRMLSFINSIRIQTPQDRAMRPLTAEERKKISPLFYRKSKRSFDFADIARKLAGKSKFANYKEGEAPYLFNYFKDSNVSGCPVTASLRDLFGEDWLSGVKEVYDRAEGKTDLQIINDIWSALFFYTDNNKLAGFARQHLQLSVEDAEKFGAIPLDDGYAALSLKAICKILPYLRRGMIFSHAAFMGNLIEVLPQEIWNFENRREEVIHELETTIANYSKNTNARTLEQCFKDHLSVKYGISDERLEKLYHPSMIDVYPKVPLGVNKLGSPCNNALRNPMVMRSLFQMRHLVNHLLKEGKIDRNTTVHIEFARELNDANKRIAWAQYTRDNQKDHDNCRKKIVELFQEATGETIVPTDVEILKYQLWEEQNHICIYTGREIGITEFIGPEPSYDIEHTIPRSKGGDSTRMNLTLCSSRFNREIKKTMLPSELSNHELILHRIEGWKKKYEDLDSQIRKIHTWSGMEKVLKDKKIQKRHLLQLQRDYWYGKYHRFEMTDVPEGFSRRQGVDNSVISRYGRLYLKSFFDRVFIIKGLATSDFRKIWGLQDAYTKKDRVNHVHHCIDAIVIACIGPHEYSQLASYYHDEENHEWYGMSKPHVALPWDSFVTDIKDIQNEIFVVHHTNDNIRKQGRRVKRKDGTKAQPCDSVRVQLHLDTYYGAIEQGSKLKYVVRKTLDANFKETDIKNIVDATVQKKVQEAVDRLGFKEAMASTIWMNEEKQVPIKKVRCLIAPSSSPNIHIRQHRDQSDKSYKRQYHTLNKENYALAIYIGKDSKGKERRLAKMISYMRAAEYFKASHKHSDTDALVRTSEDGCLLKYLLKKGMMVLPYVDSPDELKSCNKKDLVKRLYKITGLSTSAPSYKIELTFHEEARPSSDITPKFGAYSSGNEIAPKIVMRYTQFRALVEGVDFELSDTGELNVK

SEQ ID NO: 8518 - protein, 1202 aa, synthetic construct
  REGION 1..1202: note = Synthetic
MTKILGIDTGTNSLGWAIVEKQTDGYHLLDKGVNIFQEGVKIEKGKESSKAAERTAHKAARVRNYRIKLRKIRLLRILSDAHLCPPLSKAELSAWRLKKEYPKNELFMQWQGTDDDSEKTPYAYRHICLHESLDFCSMTDRYILGRAFYHMIQRRGFLSNRKDQSGDDTGKVKESISNLTQEMHDAGYEYLGDYFYSLYKRGEKIRNHYTARNEHYLSEFKAICEKQDLDKNLGQEVVSQIEKAIFDQRPLKSQKGQVGKCVFEKNKTKCPSSHPMYEEYRMLSFINNIKILTPKDDALRPLSAEERELIMPLFFRKSKKQFDFEDIAKKLASKKQYGFFKKSADAGMSYLFNYPMDTSVSGCPVTAALKDIFGDNWIDGLCETYTLAEGKSRLDIVNDIWHALFFYTDDTKLAEFAKNRLQLSDEEAKKFCDISLPADYASLSLKAICKILPYLRRGLIYSHAVFLGNLCEVMPQYEWNIEEMREAAIDNIIHEMNQIDSKDSRTLEVCIKEYLREQYHVSDEKLKKLYHPSMMEVYPRVQHTNNHGVYQLGSPRIDSVRNPMAMRSMFRLRKLVNRLLEEGKIDSDTEIHIEFARELNDANKRNAIAAFTKENQNANDDARKQIIALFKKETGKDIAPTDNDVLKYVLWKEQKHICLYTGKQIAISDFVGANPKFDIEHTIPRSVGGDSTKMNLTLCDSRFNREVKKTKLPTELSNYDEIMTRIQGWKDEYESLEAQIRKQKKLSKGATTKEQKDNIIRKRHLLELRRDYWKGKYLRFTMESVPEGFSRRQGTDISVISKYARLYLKSLFKHVYTVKGIATSDFRKIWGIQDIYSKKERVNHVHHCIDAIVIACTGLDEYNKLGAYYHDEENHEWYGKSKAYFKKPWPTFVEDIKKVQDEILVYHYTPDNMPKQGRRRIKINGKKVLCKGDAARGSLHNDTYYGAIENDGQVKYVKRIDLTSLKESDVKNIVDDTVREIIKAAIREKGFKDAMAGTIWMNEEKQIPIKKVRCFTSIRNPLSFNKKKQRDLSDKEYKRNYYVTTDGNYMVALYVGSTKTGKRKTFLEFVNMMEAADYYKTSNDKSVVAHNIVPLKKDDCQLALIIKKGTLVIFFKETKEEVWECSQNEIVRNLYYVSVIESDGRVTFKYHQEARQDKELPRNDNKTSDMRSKIRISLASAKILVQGYDFEINELGEIKRLR

SEQ ID NO: 8519 - protein, 1212 aa, synthetic construct
  REGION 1..1212: note = Synthetic
MTKILGIDTGTNSHGWAIVEKQADEYHLLDKGVDIFQEGVLKTEKGKEYSKAAERTAHKAARVRNYRIKLRKIRLLRILSDAHLCPPLSKVELSAWRLKKEYPKNELFMQWQSTDDESEKTPYAYRHKCLHESLDFSSITDRHILGRAFYHMIQRRGFLSNRKDQSADDTGKVKESISNLTQEMHDAGYEYLGDYFYSLYNKGEKIRNHYTARNEHYLAEFKAICEKQDLDKNLGPEVVRQIEKAIFDQRPLKSQKGQVGKCVFEKNKTRCASSHPMYEEFRMLSFINNIKIQTPNDDVLRPLSSEERALIMPLFFRKSKKLFDFEDIAKKLAPKKQYGFYKKSSDAEMPYLFNYPMDTSVSGCPVTTALKDIFGDNWIDSLCETYTLAEGKSRLNVVNDIWHVLFFYTDDTKLAEFAKNRLQLNDEEARKFCKISLPGDYASLSLKAICKILPYLRRGLIYSHAVFLGNLCEVMPQYEWDIEEMRNAAIEHIIHEMNQIDSKDESTLEKRIKEYLKNQYHVSDDKLKKLYHPSKMDKYPRVLRTNDHGVYQLGSPRIDSVRNPMAMRSIFRLRKLVNRLLEEGKIDQNTEIHIEFARELNDANKRHAIAAYTKENQKTNDEARKKIKELFKDETGKDIEPKDDDVLKYVLWEEQGHICLYTGRQIAISDFVGTSQKFDKEHTIPRSVGGDSTRMNLTLCDSRFNREIKKTKLPAELPNHDEIMARINDWREKYESLDKQIRRQKKLSKGATTKDQKDAIISKRHFLELQRDYWRGKYMRFTMESVPEGFSRRQGTDISVISKYARLYLESLFTHVCTVNGIATSDFRKIWGVQDVYGKKERVNHVHHCIDAIVVACISQDEYDKLSAYYHNEENHKWYGMSKAYFKKPWPTFVEDLKNVQDEILVYHYTPDNMPKQGRRKILLDVEVDGIKKKKKVLCKGDAARGLLHSDTYYGAIENDGVVRYVKRINLASMKKVADVKNIVDDAVRGIVEAAIREKGFKEAMAGTIWMNEEKQIPIKKVRCYTSIKNPISFDKKKQRDLSDKEYKRNYYVTTKGNYIVALYVGSTKTGKRKTFYEFVNMMEAAGYYKTSNDKSVVGHNIVPLEKDDCQLAFILKKGTMVIFYKETKEEVWDYSQKETVRNLYYVSEIESDGRVTFKYHQEARLDKELPRNASDTSDIKPKIRVGLASAKILVQGYDFDINELGEIKRLR

SEQ ID NO: 8520 - protein, 1221 aa, synthetic construct
  REGION 1..1221: note = Synthetic
MKKRILGIDTGTNSIGWAIVDCDDEVSENRYALIDRGGNIFQEGVKIEKGIESSKASERTGYRHQRVGYWRRKTRKIRLLKILVKNQLCPPLSMEELKQWRSQKKYPQEEAFMAWQRTDDNTGDNPYYFRHLCLTQKLDLSSLRNRYIVGRALYHLNQRRGFLSNRKENTEESDGKVKQDIEKLSQSMRDCETEYLGEYFYRLYQKGEKIRTHYTSRMDCEKELLAICRKQGLSEELTQELRQTIITQRPLKSQKHTVGRCVYEPSKSRCPISHPLYEQYRMYAFINNIRMQGPADDELRALTEKEIQTIVPLFLRKSKKEFKFEEIAKKLSNSKKNFCYYKDRTECAYRFNYYMDTLVGGCPVIAQLSEAFDVKNQIDEWLERACEIYTRGSGENRYEIMNDVWHVLFFFDSEDKLKEFAREKLQMDEEHACLFSKIHLPSGYASLSLKAIRKILPYMKTYGMIYSHAVFLANLPGVVSCKVDKDALLPMLPREDADDIVKAFYDYDPATSAIRTQEEYVKRYIAYKYNLDEKEERKLKKLYHPSMVETFPKVRQQTTGGYYQLGSPRTSSMRNPMAMHSLFRLRHVVNALLKDGKIDENTTIRIEFARELNDSNKRAAIRQWQNERNKQRKAAAERIKEYFGSNYEPSSVDVLKYLLWEEQGHHCLYTGKPIDLADLFDANKYDIEHTVPRSVGGDSTDENLTVCNSRYNREVKRAQLPSQLADHEQIMERIADWKEKREKLEKEIRKINTRGISDKEVKDRMIQKRHRLILECNYWKGKYSRFTMTEVPEGFSRRQGVDISVISKYARSYLKSVFRNVYVVKGIATSDFRKIWGIQEEYEKKQRVNHCHHVIDAITIACIGKAEYDRLAQYYHDEERWEWGMDKRRAEFPKPWSTFTEDMKHLDEALLISHYTADNLGKQTRKKLRKNGKITGQYMQGDTARGSLHQDTYYGAIERDGEIRYVVRKPLDLLDEKNVRNIVDDTVREKVEEAIKQYGNLKKAVEAGIWMNQDKRVAIRKVRVYAPQIQRPLHIRLQRDLSSKEYKHKFHVANDSNYMMGIYVGKNKSGKEKRDFELVNRLDAVGYYNSGVSAQGIDILRPESDNGYPLRWTLKIGTMVLLYDESPEEIYELGEAELCKRLYKITGMSSMTVHGSNYGTLSLLFHQEARSSTDVKAKNGAFKNGEPTRAAIVLLHTQFKALVQGRDFEMDDLGKIKFKNR

SEQ ID NO: 8521 - protein, 1211 aa, synthetic construct
  REGION 1..1211: note = Synthetic
MEKILGIDTGTNSLGWAIVEKSDEGKKLLDKGVHIFQEGVKIEKGIESSKAADRTGHRATRVRYYRIRIRKMQLLKILIENHLCPPLSKDDLKNWKLKKIYPKNELFMHWQRTNDNEGKNPYADRHKCLHEKLDLNNLMNRYTLGRALYHFVQRRGFLSNRKEQGGDDTGAVKEGISALSEEMLNSGFEYLGDYFYSLYNKGEKIRDHYTARNEHYLKEFKAICEKQELDSRLGSDVVKAIEKAIFYQRPLKSQKGQVGKCVFEKNKAKCPASHPLFEEFRMLSFLNNVKIQTPKDDALRPLNNDEREKVMQLFFRKLKNSKGKFDFEDIAKKLAPKKMYAFYKENPDMPYLFNYPMDVSVSGCVVTAYLRDIFGEDWLTGVCEVYTLAEGKTRMQILNDVWHALFFYSNKEKLEGYAKERLQLSDDDAKKFSEIPIPSEYASLSLKAISKILPYLRRGMIYSRAVFLGNLCEIMPRYEWGITEMREVAIEKIVNEMDNYNPSIDNRTLEVCIKDYLKSEYGVTDEDLKKLYHPSMMETYPRVRPNNDGVYQLGSPRINSVRNPMAMRSMFRLRKLINRLLQEGKIDKNTTINIEFARELNDANKRKAIADNVRENQKQRDDARKKICELYKAETGKDIEPNDDDILKYILWEEQEHVCLYTGKQIGIADFIGADPKYDIEHTVPQSVGGDSTRMNLTLCDSHYNREVKRALLPSELSNHDEILKRIEPWKKKYEDLDKQIRRQRTSGASTKDAKDKIIQRRHLLQLKRDYWRGKYERFTMTEVPEGFSRRQGTDISVISKYARLYLKSVFDKVYTVKGIATSDFRKIWGIQDVYVSKERVNHVHHCIDAIVIACIGKAEYDKLAQYYHDKENHAWYGYSKADFVKPWATFVEDIKNVQNEILVSHYTPDNMAKQGRKYTIVNGKKVLSKGDSARGSLHNDTYYGAIERDGDIKYVVRRELASLGEKDIKNIVDDTVRGIVETAIAEKGFKEAMAGPIWMNEEKQIPIKKVRCYTPSVTNPLNIRKHRDESEKEYKRQFHVANDSNYALAMYIGKDTKGKEKRDFELVNMIDAVGFYKTSNNKEVVGGSMVPIKSKHDYPLAYMLKIGTMVLLYEKSPEEIWEGNAAERCKRLYKVVGLSSMRVSGCSYGVIILRYHEEARPATEIKAKNGVYIHNEDLRPGVKMLHTQLKALVQGYDFDINELGEIKRLR

SEQ ID NO: 8522 - protein, 1203 aa, synthetic construct
  REGION 1..1203: note = Synthetic
MEKILGIDTGTNSLGWAIVEKFEDGYKLLDKGVNIFQEGVKLEKGIESSKAADRTSHRSTRVRYYRIKLRKIRLLKVLSDNHLCPPVSTEELKLWRLKNIYPNNELLRQWEQTDDMADKNPYTYRYRCLTEKLDLTDLTQRYVLGRALYHINQRRGFLSNRKSDGGDEEGKVKTAISNLSEEMKEAGCQYLGEYFYKLYHRGERIRCHYTARNEHYFNEFKAICKKQCLGDDLVKALKDVIFFQRPLKSQKGVVGHCVFEPKKPKCPASHPLFEEFRMLCFLNNIKIQTPKDKDLRPLTEEERKKVMPKFYRKSKPSFNFEDIAKELSGKGKYAYYKAPKGKPYLFNYHMDTSVAGCPVTSGLRDVFGEDWVDALCEVYDKALGKTRLQIINDIWHVLFDFSDEYKLIEFGKTHLQLSDEDAKKFSQIKVCSDYASLSLNAICKILPYLRRGMIYSLSTFFANMGAVVPANIWKEKANRDKIVKEIISAIADKENNAADSRTTERVIKDYLISRYGVSEEETDKLYHPSMVESYPHVPENENKLGSPRIDSVRNPMAMRSLFRLRHVVNTLLAEGKIDRDTTIHIEFARDLNDANKRQALYRFVKENENERKKIKAEILQLYKDETGLTIEPTDTDILKYQLWEEQNHRCIYTDEQISITDFLGDNPKYDIEHTIPRSAGGDSTKMNLTLCNSKFNREIKQTLLPSQLANYKDILLRIQGWKDNYEELDKRIRKIRTSSSMSKEQKDSLIQKRNLLKLRRDYWYGKYQRFLMTEVPEGFSRRQGTDISVISKYGRLYLKSFFNRVFVVKGLATSDFRKIWGIQDIYSKKERVNHVHHCIDAIVIACLGPGEYGKLAEYYRDEENHEWYGASKGHIAAPWQTFQEDMRKIQKEIVVSHYTSDNIGKTGRHRILLNGKKVWADGDSARASLHNDTYYGAIERNGKVKYVVRKPLDNNFKDSDVDKIVDDMVKTHVKEAIQQYGSLKDAISHGIWMNKEKGIPIRKVRCFTPSVTRPLEIRHHRDVSTKVYKQQFHVTSDTNYAMAIYVGQDKKGKEKRSFELISNLDACNYYRKSNDKEIVDNNLVPLAKNDFPLTYVLKKGTMVLLYENTPDEIRECSTEELVKRLYKVTGLSSMVVSGHEYGTIVLLHSQEARPSGELKAKNGAYKQNEEFRSCIILLHTQFKALVAGYDFQINDVGEIEWLR

SEQ ID NO: 8523 - protein, 1204 aa, synthetic construct
  REGION 1..1204: note = Synthetic
MERILGIDTGTNSLGWAIVDKEDGVTQLVAKGTNIFSEGVKIEKGIESSKAAERTEHRSVRKHYWRRKIRKIRLLTILSDNHLCPPLDKSSLRQWRLKKIYPDSELFMEWQRTEDKANVNPYKFRYVCLTQKLDLTDITQRYILGRALYHLNQRRGFLSNRKETTKESEGKVKEGISDLSDEMKSAGCEYLGEYFYRLYQDGKKIRNHYTARKEHYLKEFHAICDKQELDAELVKKLEKAIFDQRPLKSQKGQVGTCTFEKGKPRCPLSHPLYEDFRMYAFINNIKVQIHTLYENTERGLSEEEKKQVISLFKRKSKRTFPFEDIAKKLAGKNNYCYYKSDEDKPYRFNYQLDTQVSGSPVNAQLEEIFGEDWVTSVCEVYTLAKDKSRFQIENDIWHALFFYDDEDKLRVFAKNRLQLDDEQAEKFSKISMPNDYAALSLKAIRKILPYMRDYGLIYSEAVFLANLVEVLPQHIWGIKETREAAIENVIEVMHSYDKKNVDSVTLEQCVKGFLKDRYNISDDDLKRLYHPSMMELYPRQRPNDDGIYQLGSPRISSVKNPMAMHSLFRLRKVVNLLLKEGMITPETKIHIEFSRDLNDANKRKALQTLQRQNEKDREECRKKIAEHIDNPTDDDILKYQLWEEQNHKCIYTGEEIRITDFLGDNPKYDIEHTIPRSAGGDSTKMNLTLCSNRFNRDVKKTKLPSQLSNHDDILERIAGWKDKYEELDKQIRKINTKNVTSKEDKDRLIQRKHLLKEQCKYWKGKYDRFLMTEVPEGFSRRQGTDISVISRYARLYLKSVFKHVYIVKGIVTSEFRELWGLQNEYTKKKRDNHVHHCIDAITIACVDKAAYDKLAQYHHQQDEYKYDKGSRPDFEKPWPSFVNDVKHIQDELLIAHYSKDNMPKQAKRYVRDSKGNKVLTQGDTARASLHNDTYYGAIEVDGDVKYVVRKSLDTLEEKDIKNIVDAEVRSKVENAILLHGSLKKALEETIWMNEDKQIPIKKVRIFTGSVTRPINIRQQRDQSKHEYKRQYHVQNDRNYMMAIYVGRDKKGKEKREFELVNNITAANFYRRSNDRVPTDNQLVPLYSKNGYELRYKLKIGTLVLLYENSPEEIWELDRMNLQKRLYKITGMSSMVLREKDYYGTIEMVHHQNAKPSSEIKKVNGKYVSNEDFRSGIKMLHTQFKALVQGVDFELNDLGEIRRLI

SEQ ID NO: 8524 - protein, 783 aa, synthetic construct
  REGION 1..783: note = Synthetic
MAEKILGIDTGTNSLGWAIVEKHDDGYRLVDKGVNIFQEGVKIEKGIESSKAADRTSHRSTRVRYYRIKVRKIRLLKVLSDNHLCPPVSSDELKLWRLKDIYPNNELLRQWEQTDDKTDKNPYTYRYKCLTEKLDLTDFTQRYILGRAFYHINQRRGFLSNRKGEGSEEDGVVKSGISDLTKEIESSGCHYLGEFFYMLYHRGDRIRNHYTARNEHYLSEFIAICEKQHLDDKLVKSLKDVIFSQRPLKSQKGQVGHCVFETKKPKCPTSHPLYEEFRMLSFLNNIKIQTPQDDALRPLTEEERKKVMPKFYRKTKPSFCFEDIAKELSGKGKYAYYKTPKGKPYLFNYHMDSSVSGCPVTSGLRDILGEDWVNSICEVYDKTQGKTRLQIINDIWHVLFDFSDVEKLVEFGKKHLQLNDEDAKKFSQIKVCSEYASLSLKAICKILPYLRRGMTYSLSTFFANLGSVVPADIWKDNTNKDKIIKDILDAIADKDNNAADDRTTERCIKDYLISRFDIPKEDTDRLYHPSMIESYPHVPEHVNKLGSPRIDSVRNPMAMRSLFRLRHVVNTLLEEGKIDRNTTIHIEFARELNDANKRQALLKFIKDNETDRKKIKAEIIQLYKDETGLAIEPTDTDILKYQLWEEQNHRCIYTDEQIGIVDFLGDNPKYDIEHTIPRSAGGDSTKMNLTLCSSKFNREIKQTLLPSQLANHEAILLRIENWKANYEELDQRIRKMRTSSNMTKEQRDKLMQRRNLLKLRRDYWYGKYQRFLMTEVPEGFSRR

SEQ ID NO: 8525 - protein, 1203 aa, synthetic construct
  REGION 1..1203: note = Synthetic
MAKILGIDTGTNSLGWAIVEKTEDNYNLLDKGVNIFQEGVKKNEKGKESSKAAERTKHRSARVGYYRRKLRKIRLLRILSDNHLCPPLSQEELSTWRLKKVYPKNELFMQWQRTDDDTEKTPYAYRHKCLHEKLDLSDITDRYILGRAFYHIIQRRGFLSNRKEQGGDDSGKVKEGISTLTQEMNEAGYEYLGDYFYALYNKGEKIRKHYTARNEHFLSEFKAICDKQDLEKELGLEVVRNIEKAIFDQRPLKSQKGQVGKCVFEKNKTKCPSSHPMYEEFRMLTFINNIKIKTPNDDVLRPLNAGERESVMSLFFRKSKKQFDFEDIAKKLAPKKMYGFYKKEEDAEMPFLFNYPMDTSVSGCPVTAALKDVFGADWIDAICETYTLGEGKSRFDIVNDVWHVLYFYSDKDKLAEFAINRLQLSEDEAKRFSEISLPADYASLSLKAICKILPYLRRGLIYSHAVFFGNLCEVMPNYEWSIKEMRDAIIDNIIMEMDRYDTKDKRTFEVCIKEYLKKQYNISDESLKKLYHPSMIETYPRVQYTNEYGVYQLGSPRIDRVRNPMAMRSMFRLRKLVNRLLAEGKIDQDTEIHIEFARELNDANKRNAIALFVKENQSANEEARKKIIALFKKETGKNIEPTDKDILKYVLWEEQNHICLYTGKQIRISDFIGANPKFDIEHTIPRSVGGDSTKMNLTLCDSRFNRDVKKTKLPVDLSNHEEIMERINDWKKKYETLDFQIRKQKKLSKGATTKEKKDDIISKRHLLELRRDYWRGKYERFTMECVPEGFSRRQGTDISVISKYARLYLKSLFNRVYTVKGIATSDFRKIWGIQDIYSKKERVNHVHHCIDAVVIACIGLDEYNKLGAYYHDEENNKWYGMSKATFKKPWATFVEDIKKIQDEILVYHYTPDNMPKQGRRRIKIDGKKVLCKGDAARGSLHNDTYYGAIENDGAVKYVKRIDLASLKEGDVKNIVDDTVREIIEAAIKDKGFKDAMASTIWMNEEKRIPIKKVRCFTSVKNPLIFENRKPRDVSDKEYKRNYYVTTEGNYMIALYVGLKTNGKKKTFYEFVNIMEAARYYRTSNEKSIVGYNVVPQIKNDCHLAYILKKGTMVIFYRETVDEVWEYSSADFAKNLYYVSVIESDGRVTFKHQQEARQDKELPRTASESMDIKPKIRIGLATAKILVQGYDFEINELGEIKRLR

SEQ ID NO: 8526 - protein, 1204 aa, synthetic construct
  REGION 1..1204: note = Synthetic
MAEKILGIDTGTNSLGWAIVEKHDDGYRLVDKGVNIFQEGVRIEKGIESSKAADRTSHRSIRVRYYRIKVRKIRLLKVLSDNHLCPPVSSDELKLWRLKDIYPNNELLRQWEQTDDKTDKNPYTYRYKCLTEKLDLTDFTQRYILGRAFYHINQRRGFLSNRKGEGSEEDGVVKSGISDLTKEIESSGCHYLGEFFYMLYHRGDRIRNHYTARNEHYLSEFIAICEKQHLDDKLVKSLKDVIFFQRPLKSRKGQVGHCVFETKKPKCPASHPLYEEFRMLSFLNNIKIQTPQDDALRPLTEEERKKVMPKFYRKTKPSFCFEDIAKELSGKGKYAYYKTPKGKPYLFNYHMNSSVSGCPVTSGLRDILGEDWVNSICEVYDKTQGKTRLQIINDIWHVLFDFSDVEKLVEFGKKHLQLNDEDAKKFSQIKVCSEYASLSLKAICKILPYLRRGMTYSLSTFFANLGSVVPADIWKDSTNKDKIIKDILDAIADKDNNAADDRTTERCIKDYLISRFDIPKEDTDRLYHPSMIESYPHVPEHVNKLGSPRIDSVRNPMAIRSLFRLRHVVNTLLAEGKIDHNTTIHIEFARELNDANKRQALSKFIKENENDRKKIKAEIIQLYKDETGLAIEPTDTDILKYQLWEEQNHRCIYTDEQIGIVDFLGDNPKYDIEHTIPRSAGGDSTKMNLTLCSSKFNREIKQTLLPSQLANHEAILLRIENWKANYEELDQRIRKMRTSSNMTKEQRDKLMQRRNLLKLRRDYWYGKYQRFLMTEVPEGFSRRQGTDISVISKYGRLYLKAFFNKVFVVKGLATSDFRKIWGIQDIYTKKERTNHVHHCIDAIVIACIGPDEYSKLAEYYRDEENHEWYGASKGHFAAPWPTFQEDMNKIRKEIVVSHDTADNIGKSGRHRILLKGKKVWANGDSARASLHNDTYYGAIERNGKVKYVVRKALDAKFKDTDVDNIVDNKVKEIVKDAILQNGSLKEAIANGIWMNKEKGIAIRKVRCFAPNVTRPLDIRHHRDLSTKDYKQQFHVTNDTNYAMAIYVGHDKKGKEKKSFELINNLDACNYYKKSNDKEIVGYNLVPLSKNDSPLTYVLKKGSMVLLYEKTPDEIRDCGVEELVKRLYKVTGLSSMVVSGCVYGTIVLLHSQEARSSGELKAKNGAYKQNEEFRSSIKLLHTQFKALVAGYDFLINDVGEIKWLR

SEQ ID NO: 8527 - protein, 1216 aa, synthetic construct
  REGION 1..1216: note = Synthetic
MTKILGIDTGTNSHGWAIVEKQADEYHLLDKGVDIFQEGVLKTEKGKEYSKAAERTAHKAARVRNYRIKLRKIRLLRILSDAHLCPPLSKVELSAWRLKKEYPKNELFMQWQSTDDESEKTPYAYRHKCLHESLDFSSITDRHILGRAFYHMIQRRGFLSNRKDQSADDTGMVKESISNLTQEMHDAGYEYLGDYFYSLYNKGEKIRNHYTARNEHYLAEFKAICEKQELDKNLGHEVVHQIEKAIFDQRPLKSQKGQVGKCVFEKNKTRCPSSHPMFEEFRMLSFINNIKIQTPNDGALRSLSAEERELIMPLFFRKSIIKKKQFVFEDIAKKLARREQYGFYKKSTDVEMPYLFNFPMDTSVSGCPVTAALIDIFGENWIDALCETYTLAEGKSRLDIVNDIWHVLFFYTDEAKLAEFGKNRLQLNDEDAKKFSKITLQNGYGRLCLKVICKILPYLRRGLVKDHAILLGNLCEVMPQYEWDIKEMRIAAIDNIIREINKTDTKDESTSEKRIKLEKRIKEYLKNQYHVSEEKLKKLYHPSKMDKYPRVLRTNDHGVYQLGSPRIDSVRNPMAMRSIFRLRKLVNRLLEEGKIDLDTEVHIEFARELNDANKRRAIAKFAKDNQKKNDEARKKIIDIMGEDYDVKDDDIKKYILWEEQGHICLYTGRQIAISDFIGNSQNFDIEHTIPRSVDGDSTRMNLTLCDSRFNREIKKTKLPAELPNHDEIMARINDWREKYESLDGQIRKLRGKSKGATTKKLKDDIIYNRHLLELQRNYWRGKYLRFTMEIVPEGFSRRQGTDIGVISKYARLYLKSLFKHVYTVNGIATSDFRKIWGVQDVYGKKERVNHVHHCIDAIVVACISRDEYDKLSAYYHNEENHKWYGMSKAYFKKPWPTFVEDLKNVQDEILVYHYTPDNMPKQGRRKILLDVEVDGIKKKKKVLCKGDAARGLLHSDTYYGAIENDGVVRYVKRINLASMKVTDVKNIVDDAVRGIVEAAIREKGFKEAMAGTIWMNEEKQIPIKKVRCYTSIKNPISFDKKKQRDLSDKEYKRNYYVTTKGNYIVALYVGSTKTGKRKTFYEFVNMMEAAGYYKTSNDKSVVGHNIVPLEKDDCQLAFILKKGTMVIFYKETKEEVWDYSQKETVRNLYYVSGIESDGRVTFKYHQEARRDEELPRNASDTSDIKPKIRVGLASAKILVQGYDFEINELGEIKRLR

SEQ ID NO: 8528 - protein, 1210 aa, synthetic construct
  REGION 1..1210: note = Synthetic
MTKILGIDTGTNSLGWAIVEKQADEYHLLDKGVNIFQEGVKIEKGIESSKAAERTAHKAARVRNYRIKLRKIRLLRILSDAHLCPPLSKAELSAWRLKKEYPKNELFMQWQSTDDESEKTPYAYRHKCLHDCLDFSSITDRYILGRAFYHMIQRRGFLSNRKDQSGDDTGMVKESISNLTQEMHDAGYEYLGDYFYSLYNKGEKIRNHYTARNEHYLAEFKAICEKQELDKNLGHEVVHQIEKAIFYQRPLKSQKGQVGKCVFEKNKTRCPSSHPMYEEFRMLSFINNIKIQTPNDDVLRPLSSEERALIMPLFFRKSKKLFDFEDIAKKLAPKKQYGFYKKSSDAEMPYLFNYPMDTSVSGCPVTTALKDIFGDNWIDSLCETYTLAEGKSRLNVVNDIWHVLFFYTDDTKLAEFAKNRLQLNDEEARKFCEISLPGDYASLSLKAICKILPYLRRGLIYSHAVFLGNLCEVMPQYEWDIEEMRNAAIEHIIHEMNQIDSKDARTFEVCIKEYLKEQYHVSEEKLKKLYHPSMMEVYPRVQRTNNHGVYQLGSPRIDSVRNPMAMRSMFRLRKLVNRLLEEGKIDFDTEIHIEFARELNDANKRNAIALFTKDNQKKNDEARKKIIDIMGKDYDVKDDDILKYILWEEQGHICLYTGRQIAISDFVGNSQKFDKEHTIPRSVGGDSTRMNLTLCDSRFNREVKKTKLPTELPNHDEIMARINDWREKYESLDGQIRKLKGKSKGATTKKQKDDIISKRHLLELQRDYWRGKYLRFMMESVPEGFSRRQGTDISVISKYARLYLKSLFKHVYTVKGIATSDFRKIWGIQKTYSKKERVNHVHHCIDAIVIACIGLDEYNKLGSYYHDEENHEWYGMSKAYFKKPWPTFVEDIKKVQDEILVYHYTPDNMPKQGRRRIMVDGKKVLSKGDAARGSLHNDTYYGAIESDGVVKYVKRINLASMKENDVKNIVDDTVRGIIETAINEKGFKEAMSSTIWMNEEKQIPIKKVRCYATSVAKPLNIRQQRDVSSKEYKQQYHVTNDSNYLLALYIGKDKKGKEKREFVIINMLQTAQYFRTSNDKVAVGNNIVPVKSEHEYPFAYSLKIGTMVLLYEKSPDEIWDASLTEINKRLYKVVGLSAMRMKGRNVDYATIKLKQHEDARLSTELKAKNGAFKQGEELRPSIIMLHTQLNALVQGYDFEINELGEIKRLK

SEQ ID NO: 8529 - protein, 1222 aa, synthetic construct
  REGION 1..1222: note = Synthetic
MTKILGIDTGTNSLGWAIVEKNADDYHLLEKGVNIFQEGVKIEKGIESSKAAERTAHKAARVRNYRIKLRKIRLLRILSDAHLCPPLSKAELSAWRLKKEYPKNELFMQWQATDDDSEKTPYAYRHICLHENLDFCSMTDRYILGRAFYHMIQRRGFLSNRKDQNGDETGKVNESISSLTQQMHDAGYEYLGDYFFFLYNKGEKIRNHYTARNEHYLAEFKAICEKQDLDKNLGPEVVRQIEKAIFDQRPLKSQKGQVGKCVFEKNKTKCPSSHPMYEEFRMLSFINNIKIQTPNDDALRPLTTEERELIMPLFYRKSKKQFDFEDIAKKLAPKKQYGFYKKSTDVAMPYLFNYPMDTSVSGSPVTASLKDIFGEDWINGLCETYTLAEGKTHLDVVNDIWHALSFYTDNEKLAEFAKNRLQLNDDEAKKFCDISLPGDYAALSLKAICKILPYLRRGLIYSHAVFLGNLCEVMPQYEWNIEEMRNAAIDNIIHEMNQIDSKDARTFEVCIKEYLKEQYHVSDEKLKKLYHPSMMEMYPKVQHTNNHGVYQLGSPRIDSVRNPMAMRSMFRLRKLVNRLLEEGKIDQDTEIHIEFARELNDANKRNAIAAYTKENQNKNDEARKKIKSLFKDETGKDIEPSDIDVLKYVLWEEQKHICLYTGKQICISDFIGSNPKFDIEHTIPRSVGGDSTKMNLTLCDSHFNRDIKKTQLPTELSNYDEIMARINDWKEKYESLDGQIRRQKKLSKGASSKEQKDGIIRKRHLLELQRDYWRGKYLRFTMESVPEGFSRRQGTDISVISKYARLYLKSLFKHVYTVKGIATSDFRKIWGIQKTYSKKERVNHVHHCIDAIVIACIGLDEYNKLGAYYHDEENHEWYGKSKAYFKKPWSTFVEDIERVQDEILVYHYTPDNMPKQGRRRILLDVEINGRKKKKKVLCKGDAARGSLHNDTYYGAIEDDGVVKYVKRINLSTMKESDVKNIVDETVRGIIEAAIKEKGFKEAMAGTIWMNEEKQIPIKKVRCYTPSVTKPLNIRKQRDVSPKEYKQQYHVVNDSNYMLALYIGKDKKGKEKREFEIVNMLQTAQYFRTSNDKEAAGGNIVPVKSEHDYPFAYSLKIGTMVLLYEKSPDEIWDASLTEINKRLYKVVGLSAMRMKGRNVDYATIKLKQHEDARLSTELKAKNGAFKQGEELRPSIIMLHTQLNALVQGYDFEINELGEIKRLK

SEQ ID NO: 8530 - protein, 1203 aa, synthetic construct
  REGION 1..1203: note = Synthetic
MERILGIDTGTNSLGWAIVEKEGDSYRLLHKGTNIFSEGVKIEKGIESSRAAERTEHRAVRRHYWRRKVRKISLLKILIDNHLCPSIPKESLREWRLKKVYPKDEAFMSWLLTEDKTGVNPYHFRYLCLTQKLDLSNPTQRYILGRALYHLNQRRGFLSNRKETTKASEGNVSTGISELTAEIEAAGCTYLGEYFYHLYEKGEKIRKHYTARKEHYLKEFRAICEKQCLDTALANKLEEAIFSQRPLKSQKGQVGTCTFEKGKPRCPISHPLYEDFRMYAFLNNVKIQTPFDAELRPLDKDELQKVMPLFKRKSKRSFNFEDIAKKLAPKNSYCFYKDNEQKPYRFNYPMDTSVSGSIVNAQLEDIFGENWLDAVCEVYTLGASKSRLEILNDIWHALFFFDDEDKLKEFAMNRLQLSEEDATRFSKISIPQDYASLSLKAICKILPYMRDYGLIYSHAVFLGNLKEVLPSHVWGVPQMRQAAIEKVIEVLFSVQQTSDSRTQEQSVKEFLKERYHLDDKAVNKLYHPSMIDLYPRVRPNDEGLYQLGSPRISSVRNPMAMHSLFRLRKVVNLLLQKGYIDHETTIHIEFSRDLNDANRRWAIQAWQRENEKDRERCKKEIEKLFKEATGRDSVEISDRDILKYQLWEEQHHKCLYTGEEIGLTDFLGEHPKYDIEHTVPRSAGGDSTKMNLTLCSSRYNREVKKTKLPTELAEYEAILQRIEEWKERYEDLDRQIRKTKGMPSATKEEKDKKIRRRHLLTLQRDYWRGKYNRFTMTEVPEGFSRRQGTDISVISRYARLFLKSVFPHVYIVKGIATSDFRKIWGIQEEYTKKERVNHVHHCIDAITIACIGPDEYAKLAQYYHDEENHEWYGKSKGQITPPWANFVEDIHKIQDELLVAHYTEDRMQKRAKRYVRTAKGKVLTAGDSARASLHNDTYYGAISVGDEIKYVVRRPLDALEEKDIKNIVDEVVRKKIEDAIVKYGNLKEALEHTIWMNEEKHIPIKKVRVFTPSVTRPLNIRQQRDQSRHEYKRQYHVQNDRNYMMAIYVGQNEKGKEKRDFELVSNLAAASRSKKSGGVQQPLAPIAKNGLPLVYQLKIGTMVLLYEKSPEEIWTASQKEMQRRLYKVTGLSSLVISSYHYGTIVLVHHQEARPSSDVKQKNGIFISGEDFRSSIKLYHTQFKALVQGFDFQINDLGEIHRLR

SEQ ID NO: 8531 - protein, 1204 aa, synthetic construct
  REGION 1..1204: note = Synthetic
MERILGIDTGTNSLGWAIVDKDENQYHLVAKGTNIFSEGVKIEKGIESSKASERTDHRSVRKHYWRRKIRKIRLLSILSDNDLCPRLKKEQLRLWRLKKQYPSDDTFMEWQRTEDKAQVNPYKFRYICLTQKLDLSDITQRFILGRALYHLNQRRGFLSNRKESTKESEGTVKEGISSLSKDMKDAGCEYLGEYFYHLYQQGKKIRNHYTARKEHYLKEFKAICAKQELDDALIEKLEKAIFDQRPLKSQKGQVGTCTFEKGKSRCPSSHPLYEDFRMYSFVNNIKVQVNTLYDKGERSLTDEEKRLIIPLFKRKSKRTFLFEDIAKKIAGKNNYCYIRSNEEKAYKFNYQMDTQVSGSPVNAQLEEIFGEDWLSGVCEVYTLANNKTRFQIMNDVWHVLFFYDDEDKLKEFAKDRLQLDDELAEKFSKISIPNDYAALSLKAIRKIMPYLRDYGLIYSEAVFLANLVDVLPQHVWGIKEMREAAIENIIDVMHSYDKNNIDGITLEVCVKTFLKERYQVNDDDLKKLYHPSMIDPYPRQRPNDEGVFQLGSPRIGSVKNPMAMHSLFRLRKVVNLMLKEGYVTPDTKIHIEFSRDLNDANKRWAIQMWQRENEKEKERCRKEIEKYIANPSDTDILKYQLWEEQNHKCLYTGDEIRITDFLGDNPLFDIEHTIPRSAGGDSTKMNLTLCSSRFNRDVKKTKLPSELVKHDEILERIKDWKEKYEELDKQIRKISTKGATSKDEKDSKIRRRHYLILQRDYWRGKYLRFTMTEVPEGFSRRQGTDISVISRYARMYLKSVFKKVYIVKGVATSDFRKMWGIQEEYAKKERVNHVHHCIDAITIACIGKAEYDKLAEYRHKYDDYLFNGKTRPTFDKPWPSFVIDIKHIQDELLIAHYAKDIMPKQSKRYVRDSKGKRVLTQGDTARASLHNDTYYGAIEVDGEVKYVVRKNLAGLDEKDVKNIVDAEVRSKVENAILIHGSLKKALEAKIWMNEDKQIPIKKVRVFTGSVTRPINIRQQRDQSKHEYKRQYHVQNDRNYMMAIYVGHDKKGKEKREFELVNNITAANFYRRSNDRVPTDGQLVPLNSKSGYELRYKLKIGTMVLLYENGPEEVWELDKVNLQKRLYKVTGMSSMIIQRKFEYGTIELVHHQNAKPSSEIKKVNGEFKSGEDFRPGIKMLHSQLNALVQGVDFEINDLGEIRRLI

SEQ ID NO: 8532 - protein, 1213 aa, synthetic construct
  REGION 1..1213: note = Synthetic
MKKILGIDTGTNSLGWAIVGKDDDDRWLIDKGVDIFQEGVKVEKGIESSKAAERTDHRAQRVRYYRIKLRKIKLLRALSDNYLCPPLTSEELRAWRLKKVYPVNELFMRWQCTDDDADKTPYAFRHRCLHERLDLSSVTDRYVLGRAFYHLAQRRGFLSNRKDQASDDTGKVTKGITQLTADMREAGYEYLGDYFYELYRKGEKIRCHYTARNEHYLAEFNAICERQGLDADLASKIRHAIFDQRPLKSQKGQVGKCVFEKKKAKCPASHPRYEEYRMLAFLNNIKIKAPGDIELRPLTDGERAKVIPLFYRGTKKQFAFEDIAKKLAPKKQYGFCKRSEDRMMPYLFNYPMDTPVSGCPVTAALRGLFGDDWEQSVCEVYTLAKDKSREEIVNDVWHVLFFYSDGDKLMQFAQDRLQLSPEEAKKFAEIRLPSDYASLSLKAIRKILPYLRRGLIYSHAVFLANLGEVMPAYEWGNEAMREAAIAHVVQAMDSHDPCDGRTMEQRVKDCLRDRYHVSDKALERLYHPSMMEAYPPVRPDAQGRLRLGSPRISSVRNPMAMRSMFRLRHLVNQLLAEGCIDADTEVHIEFARELNDANMRKALESQARANQKANDAARKRIAELYKEETGRDIEPTDRDVLKYVLWEEQKHLCVYTGQQIKLADFVGDNPRFDIEHTIPRSVGGDSTRMNLTLCDSHFNRDVKKTKLPTELACHEDILVRIAPWKDTVEQLDKQIRKLKGASKGATTKDQKDSIIQRRHELELQRNYWRGKYERFTMTSVPEGFSRRQGTDISVISKYARLYLKSLFRHVYTVKGLATSDFRKIWGVQEVYSRKERVNHVHHCIDAIVIACISPDDYNKLGAYYHDEENHEWYGASKASFPKPWPTFVEDVKRVQDEILVYHHTPDNMPKQGRRRIMAEGKRVLSCGDAARGSLHKDTYYGAIEREGGVRYVKRMALADLKDAKDVEKIVDETVKAIVKQAIAEKGFKAAMDPENTIWMNEEKRIPIRKVRCYQPSVTNPLHIRQQRDVSPKEYKRQFHVANDDNYLLAVYAGKDKKGKDKRTFELVNRLQAAEFFKTSNDKEAAGHHLVPVKSQEDYPLAFTLKIGTMVLLYEKSPVEVWEATPKELNRRLYKVAGLSSMVISGNPYATIKMRHHEEARQSKDIKAKNGAYKQGEELRPAILMLHTQLRALVQGYDFEINELGEIKWLRTHD

SEQ ID NO: 8533 - protein, 914 aa, synthetic construct
  REGION 1..914: note = Synthetic
INGFLCFSSPLSLIRFVLCPIEKSKIIPKFKRKSKKKFPFEDIAKELAGKKNYCYFKDKEQKPYKFNYPMDTSVSGSVVNAQLEEIFGSDWKNAVCEVYTLSDGKTQDEIVNDVWHALFFYDDEEKLKGFAKNRLQLSDEESEKFCKITLPSDYAALSMKAIRKILPYMRDYGLIYSKAVYLANLGEVIPQEIWENEEARKSVIDEVKDVMENVEIGKLSGNLGTVVREYLSQKYGVDENALNRLYHPSMLEHYPQQRSNSDGIFQLGSPRINSVRNPMAMHSLFRLRKVVNLLLKEGKIDEKTIIHIEFARELNDANKRKAIKFLQKINENDRDACRKKIEELGYTSVSDTDILKYQLWEEQGHQCLYTGEQIGVKDFLGENPKYDIEHTIPRSAGGDSTKENMTLCSSKFNREVKRTKLPTALPDYDEILMRIEFMREKYESLDKQIRAIKRKSATTKEQRDSDIQKRHQLKMQRDYWKGKYDRFTMEEVPEGFARRQGAGIGLISRYARLYLKSVFEKVYVVKGNATAEFRKIWGIQEEYTKKERVNHVHHCIDAITIACIGLDEHNKLAHFYHQVEEYRNNEKNRPQFVKPWPTFTEDVMKIQDELLVAHYSQDNMPKHTRKRVGKTYIQGDTARTSLHNETYYGAIEKDEEVKYVVRKPLDGMEEKDVKNIVDDVVRQKVEDAIAKHGSLKKAVESTIWMNEQLQIPIKKVRIYAKNVVRPLQIRQQRDQSRKEYKRQYHVENDRNYLMAIYIGKDKKGKEKRDFVVVNNLEAAKYYRRSNNAEGGLVPDVSEKNGFSLAYCLKIGTMVLLYEKSPEEIWLSDKKAWQRRLYKVTGLSSLVISSYVYGTISLIHHQEARRSSEVKLKNGAYASNEELRSGIKMYHTQINALVEGVDFVLNDLGEIKRLR

SEQ ID NO: 8534 - protein, 1197 aa, synthetic construct
  REGION 1..1197: note = Synthetic
MMERILGIDTGTNSLGWAIVEKHDDEYKLLEKGTNIFAEGVKIEKGIESSKAAERTEHRSVRKHYWRRKVRKIRLLTILTKNRLCPPVSNADMRQWRLKKIYPIDENFMAWQRTEDKGGVNPYHFRYICLTQKLDLTNLTQRYILGRAIYHLNQRRGFLSNRKESTKESEGAVKDGISDLTKDMESAGCTYLGEYFYRLYEKGEKIRSHYTARKEHYLKEFRAICEKQELDAELVEKLERAIFPQRPLKSQKGQVGVCTFEKGKARCPISHPMYEEFRMYQFINSIKVTARTLYENEERSLTVEEKRRIIPLFMRKSKTFEFRHIAEKLVGKKNCCYKDDDVEGAYRFNYQKDYSVPSCTVTKQLQDVFGEEWMDSVCEVYTLAGKKSRFEIMNDIWHALFFFDDEEKLREFAKNRLQLDEADAEKFSNISLPNDYPALSLKAIRKILPYMKDYGLIYSQAVFLGNLVEVLPRDMWGVKEVRDAAIENVIEMMQSYDKKFEARTMEQCVKDFLRDRYHVDDAQLKKLYHPSMMDLYPRVRPDDDGVYQLGSPRISSVRNPMAMHSLFRLRKVVNLLLKEGKIDENTTIHIEFSRDLNDANRRKAIQDYQRKNEKEREACKKKIQEFGIANPTDRDILKYQLWEEQGHKCIYTGDEIGLVDFLGNNPKYDIEHTIPRSVGGDSTKANLTLCNSEYNRKTKKTKLPSELVEHEDIIQRIAGWKERYEELDKRIQKKKGSSASTKEDRDKIIKEKHLLSLERDYWRGKYQRFTMTSVPEGFSRRQGTDISVISRYARLYLKSVFKQVYIVKGIATSDFRQIWGIQEEYTKKERVNHAHHCIDAITIACIGKGEYDKLAQYYHADEAFKWGKAVDKAQFPKPWSTFVEDIKAVQDELLIAHYTKDNMAKHTRKRGERGYMQGDTARASLHNDTYYGAIQVGDEVKYVVRKNFDSLEEKDVKNIVDVTVRQKVEDAIAMHGNLKDARDAGIWMNREKHIPIKKVRIFTPSVTRPINIRQQRDQSRFEYKRQYHVQNDRNYMMAIYIGYDKRGKEKRAFEIVNNIDTARYHKRSNDSNDGLVPQTHLDSGYPLAYCLKIGTMVLLYDESPEEIWDLDRKDLVKRLYKVTGLSSMVISSYNYGTINLVYHQDARQSTEIKLKNGIYKTDEEFRPGIKMLHTQIKALVQGVDFEINDLGEIRRMI

SEQ ID NO: 8535 - protein, 908 aa, synthetic construct
  REGION 1..908: note = Synthetic
VIRCRKSYSGCKNTTLFLFKQIFYCNFTEKFKTASKMTKILGIDTGTNSLGWAIVEKKAEQYCLLDKGVNIFQEGVNIDKDNESSKAAERTGYRAIRVRYYRIKLRKIRLLHILTQHHLCPPLTSWELRQWRLKSIYPTDELFMQWQRTDEEKGQNPYAYRHLCLHEKLDLTQVANRYILGRVFYHFAQRRGFLSNRKDQSGEDVGVVNDGISALSEEMREAGCEYLGDYFYQLYEKGKKIRKHYTARNEHYLKEFHAICEKQQLDASLVSELEKAIFTQRPLKSQKRQVGKCVFEKNKAKCPASHPLYEEFRMLSFINHIKIKTPKEDELRPLNHEEREKILPLFFRKTKKTFNFEDIAKKLAPKKLYGFYKKAADTEMPYLFNYPMDTSVSGCPVTAALQDIFGDDWLDSICEVYTLADGKSRLEILNDIWHALFFYSDQDKLAEFAKVRLQLDDEQAQAFSNINLPSAYASLSLKAICKILPYLRRGLVYSHAVFLGNLCEVMPAYEWGIEEMRQAAIDCVIKEINSYDPKTDGRTLETCIKEYLKERYHVSDENLKKLYHPSMLETYPRVRPGQDGIYQLGSPRTDSVRNPMAMRSLFCLRKLVNRLLKEGKIDQETEIHIEFSRELNDANKRSALKRYGRDNQKAHDTARKHIVEDYKAETGKAIEPTPTDILKYELWEEQQHICLYTGQQIRISDFIGPNPKFDIEHTLPRSRGGDSTKMNLTLCDSRFNRDVKKTHLPTELANHDEIMARIAIWQEKYEELSQQIRKQKRKSQAATTKEQKDKAISYRHYLELQRDYLRGKHERFTMESVPEGFNRRQGVDIGIISKYARLYLKSVFKRVYPVKGLATSDFRKIWGLQDIYSAKERVNHVHHCIDAIVVACIGLDEYGKLAEYYHDEEKHE

SEQ ID NO: 8536 - protein, 1241 aa, synthetic construct
  REGION 1..1241: note = Synthetic
MTTKVKSIFVYTNWNHINLNLNNQKMKERILGIDTGTNSIGWSIVDYDSELLENKYTLINKGVNIFQEGVKIEKGIESSKAAERTEHKHQRVGYWRRKVRKIKLLRLLIKHDLCPPLTTDELKNWRSKKQYPLNEAFMEWQRTNDNENRNPYYYRNLCLSQKLDLSDIHNRHIIGRAIYHLNQRRGFLSNRKEETKESEGAVKEGINAITNEMQSHGVECLGQYFYILYQQKGKIRSNYTSRIDHYEKELLAICKKQELPEELTNELRKIIITQRPLKSQKQNVGKCVFEPSKSRCPVSHPLYEQYRMYAFINNIKIQGPNDNQLRELNNVEKNAIIPLFLRKSKKDFKFEDIAKKLSGTKKDFCYYKDKPEKAYRFNHHMDTTISGCPVIAQLSEVFGVKENIDEWLERACEVYTNGAGKNRYEIMNDIWHALFFFDDDEKLKIFAMEKLQLDEVHAIQFSKIRIPSDYASLSLKAIRKILPYMKQYGMIYSHAVFLANLSHIIKCQTDKEALLPMLPREEAEDIVKAFYEFDPSMSALRTQEEYVKHYIAYKYHLDEENERKLKKLYHPSMIETFPKIRQKTPDGYYQLKSPRTGSMRNPMAMHSLFRLRHVINKLLQKGKIDEDTIIKIEFARELNDYNQRTAIKQWQNILEKQNKEAYEKIKEHFGNDYIPSTTDLLKYKLWEEQQHICLYTGKSIGIEKLFSSTEFDIEHTIPRSVGGDSTDMNLTICDSHFNREVKKAQIPSQLANHEDILERISSWKSKIEKLDKEIRKINTKGISDKETKDHRIQKRHLLILERDYWKGKYSRFVMQEVPEGFSRRQGVDISVISKYARLYLKSLFHHVYIVKGLITSDFRKIWGLQDEYDKKARHNHCHHAIDAITIACIGKAEYDKLAQYYHDKERYDWSLSSQKAVFPKPWKTFTEDVKHIDETLLVSHYTADNIKKRTRKKIRINGKDTNKYMEGDTARVSLHQDTYYGAIERAGEIRYVVRKPIDQTDPKQIVDNVVREKVMAAISEYGSLKKAVEAGIWMNKEKGIRINKARVYATQIKRPLDIRRQRDAIKEYKQMYHVANDSNYIMGIYVGADKKGKEKRTFKLVNSLDAVKFYNSGLKEQNIDILHYEDKNGYALKWKLKIGSMVLLYEDTPSEIYDLDLKALSKRLYKITGMSSMVVSGNSYGTLSLVFHQEARPSTEFSSKNGIYKANEILRPGITLLHTQFKGLVQDQDFAINEIGEIIFF

SEQ ID NO: 8537 - protein, 1213 aa, synthetic construct
  REGION 1..1213: note = Synthetic
MKKILGIDTGTNSLGWAIVEKKADEYKLLDKGVNIFQEGVKIEKGIESSKAAERTAHRATRVRYYRIKLRKIRLLRILSDNHLCPPLTSEELAAWRLKKEYPQNELFMQWQRTDDNSEKTPYTCRHKCLHTKLDFNSITDRYILGRAFYHIVQRRGFLSNRKDQGGDDSGKVKEGISTLTQKMQKAGYDYLGDYFYSLYNKGKKIRNHYTARNEHYLNEFKAICKKQELNKELGQKTVDSIEKAIFDQRPLKSQKGQVGKCIFEKNKTKCPSSHPLFEEFRMLAFINNIKIKTPRDEEMRPLNEEERTLIMPLFFRKSKKQFDFEDIAKKLAPKKSYGFYKKSTDSEMPYLFNYPIDTSVSGNPVTATLKDIFGDNWLDTICEVYTLGEGKSRLEIMNDVWHALFFYSDKDKLTEFATTRLQLNDEEAKRFSDISLPTSYASLSLKAICKILPYLRRGLIYSHSVFLGNLCEVMPSYEWGIKEIREAAIDNIINEMAKYATNDERTFETCIKEYLKEKYNVNDDSLKKLYHPSMMEPYPMVRHTNLHGIYQLGSPRIDSVRNPMAMRSMFRLRKLVNRLLEEGKIDQDTEIHIEFARELNDANKRNAIAAFTKENQTANDEAKKSIKKLYKEETGIEIEPSDSEALKYILWEEQEHICLYTGKQIRISDFIGANPMFDIEHTIPRSVGGDSTKMNLTLCDSRFNRDIKKTHLPTELANHDEIMARINVWKEKYEALDQQIRKQKKLAKGSSTKEQKDTIIRKRHLLELRRDYWRGKYMRFTMESVPEGFSRRQGTDISVISKYARLYLKSLFKHVFTVKGIATSDFRKIWGIQDIYSKKERVNHVHHCIDAIVIACIGLDEYNKLGAYYHDEENHEWYGATKASFIKPWPRFVEDINKVQDELLVYHYTPDNMPKQGRRRIKIDGKKILCKGDAARGSLHNDTYYGAIENDGMVKYVKRIDLASLKESDVKNIVDNTVRELIENAIKEKGFKKAMGSTIWMNKEKQIPIKKVRCYTPSVTKPLNIRKQRDLPRKVYKQEFHVANDSNYLLAMYIGKDNKGKEKRDFELVNMLQAAQYFKTSNDKKASGNNMVPVKSKHDYPFAYTLKIGTMVLLYEKNPSEIWENSRQEQAKRLYKITGLSSMTINDGRAYATIKMRHHEEARQSKDVKAKNGAYKQGEGFRPAIIMLQTQIKALVQGYDFEINELGEIKRLR

SEQ ID NO: 8538 - protein, 1204 aa, synthetic construct
  REGION 1..1204: note = Synthetic
MERILGIDTGTNSLGWAIIEKEDGVTKLIDKGTNIFSEGVKIEKGIESSKAAERTEHRSVRKHYWRRKVRKIRLLAILSDNHLCPPLDKSSLRQWRLKKVYPENELFMEWQRTEDKANVNPYKFRYICLTQKLDLTDITQRYILGRALYHINQRRGFLSNRKETTKESEGSVKEGINALTEEMAAADCKYLGEYFYQLYQKGEKIRNHYTARKEHYLKEFRAICSKQELDADLVSKLEKVIFDQRPLKSQKGHVGPCTFEKGKSRCPSSHPLYEDFRMYAFINNIKVQVHTLYENAERGLTDEEKRNIIPLFKRKSKRTFPFEDIAKKLAGKNNYCYYKSNEEKPYKFNYQMDTLVSGSVVNAQLEEIFGEDWLSNACEVYTLAKEKTRFQIMNDIWHVLFFYDDNEKLKEFAVNRLQLNDEQAERFSKISIPNDYAALSLKAIRKILPYMRDYGLIYSEAVFLANLIEVIPHHIWTIKEMREVVIENVIEVMQSYDKNRIDGLTLEQCVKAFLQERYNVDDSNLRKLYHPSMMELYPRQRPNNEGIYQLGSPRISSVKNPMAMHSLFRLRKVVNLLLAEGKVTPETKIHIEFSRDLNDANKRKALQTLQKQNEKDREECRKKIAEHISNPTDADILKYQLWEEQSHKCIYTGEEIRIADFLGDEPKYDIEHTIPRSAGGDSTKMNLTLCSNRFNRDIKKTRLPSQLANHDDILERISGWKDKYEDLERQIRKINTKGATSKEEKDKQIQRKHQLKEQCKYWKGKYERFIMTEVPEGFSRRQGTDISVISRYARLYLKSVFKHVYIVKGLATSKFREMWGLQDEYTKKERVNHVHHCIDAITIACIDKAAYDKLAEYYHKYDEYKYNKGERPSFELPWTSFVSDVKNIQDELLIAHYSKDSMPKQAKRYVKNSKGDKILTQGDTARASLHNDTYYGAIEVDGMVKYVVRKSLDGLDEKDVKNIVDGEVRSKVENAIHLHGSLKKALEEVIWMNEEKRIPIKKVRIFTGSVTRPINIRQQRDLSKHEYKRQYHVQNDRNYMMAIYVGLDKKGKEKREFELVNNITAAYFYRRSNDKIPTDNQLVPLRSKSGYELRYKLKIGTMVILYENNPEEVWELDKRNLQKRLYKVTGMSSMVLQDKYYFGTIELVHHQDARPSTEIKKKNGEFKANEEFRNGVKLLHTQFNALVQGIDFEINDLGEIRRLI

SEQ ID NO: 8539 - protein, 993 aa, synthetic construct
  REGION 1..993: note = Synthetic
MTKILGIDTGTNSLGWAIVEKQTDGYHLLDKGVNIFQEGVKIEKGKESSKAAERTAHKAARVRNYRIKLRKIRLLRVLSDSHLCPPLSKAELSAWRLKKEYPKNELFMQWQSTDDALEKTPYACRHKCLHESLDFSSMTDRYILGRAFYHMIQRRGFLSNRKDQSGDDTGKVKESISNLTQEMHDAGYEYLGDYFYSLYKRGEKIRNHYTARNEHYLSEFKAICEKQDLAKNLGQEVVSQIEKAIFDQRPLKSQKGQVGKCVFEKNKTKCPSSHPMYEEYRMLSFINNIKILTPKDDALRPLSAEERELIMPLFIRKSKKQFDFEDIAKKLAPKKQYGFFKKSADAGMPYLFNYPMDTSVSGCPVTAALKDIFGDNWIDGLCETYTLAEGKSRLDIINDIWHALFFYTDNTKLAEFAKNRLQLSDEEAKKFCEISLPADYASLSLKAICKILPYLRRGLIYSHAVFLGNLCEVMPQYEWNIEEMREAAIDNIIHEMNQIDSKDARTFEVCIKEYLREQYHVSDEKLKKLYHPSMMEVYPRVQHTNNHGVYQLGSPRIDSVRNPMAMRSMFRLRKLVNRLLEEGKIDSDTEIHIEFARELNDANKRNAIAAFTKENQNANDDARKQIIALFKKETGKDIAPTDNDVLKYVLWKEQKHICLYTGKQIAISDLVGANPKFDIEHTIPRSVGGDSTKMNLTLCDSRFNREVKKTKLPTELSNYDEIMTRIQGWKDEYESLEAQIRKQKKLSKGATTKEQKDNIIRKRHLLELRRDYWKGKYLRFTMESVPEGFSRRQGTDISVISKYARLYLKSLFKHVYTVKGIATSNFRKIWGIQDIYSKKERVNHVHHCIDAIVIACTGLDEYNKLGAYYHDEENHEWYGKSKAYFKKPWPTFVEDIKKVQDEILVYHYTPDNMPKQGRRRIKINGQKVLCKGDAARGSLHNDTYYGAIENDGQVKYVKRIDLTSLKESDVKNIVDDTVREIIKAAIKCFSSRL

SEQ ID NO: 8540 - protein, 1204 aa, synthetic construct
  REGION 1..1204: note = Synthetic
MERILGIDTGTNSLGWAIVDKEEGKSTLIAKGTNIFTEGVKIEKGIESSKAAERTKYRSVRKHYWRRKIRKIRLLTILSENHLCPPLDKSILRQWRLKKLYPDNELFMEWQRTEDKAQVNPYKFRYICLTQKLDMSDIVQRYMLGRALYHLNQRRGFLSNRKEATRESEGALKEGISALSEEMKEAGCEYLGEYFYQLYQKGEKIRNHYTARKEHYLKEYRAICEKQGLEAALVKKLEHAIFDQRPLKSQKGQVGTCTFEKGKSRCPSSHPLYEDFRMYSFLNNIKVQVNTLYENCERGLTNEEKARIIPLFKRKSKRTFLFEDIAKKLAGKNNYCYYKSNEDKPYKFNYQMDTLVSGSIVNAQLEEIFGEDWLTCVCEVYTQANNKTRFQIMNDIWHTLFFYDDDEKLKSFAVNRLQLDDEQADKFSKISMPNDYAALSLKAIRKILPYMRDYGLIYSEAVFLANLVEIMSRYIWSVKEMREAAIENVIEVMHSYDKNNIDGMTLEQCVKAFLHERYNVSDVDLRKLYHPSMMDLYPRQRPRENGVYQLGSPRISSVKNPMAMRSLFRLRKIVNLLLKERKITPDTKIHIEFSRDLNDANRRWAIQTWQRENEKDREKCRKEIEKYIANPTDTDILKYQLWEEQNHKCLYTGEEIRLTDFLGNNPRYDIEHTIPRSAGGDSTKANLTLCSCRYNRDVKKTKLPTQLSEHDEILERIADWKERYEDLDRQIRKISTKGISSKEEKDKIIKRRHLLSLQRDYWRGKYQRFTMKEVPEGFSRRQGTDISVISRYARMYLKSVFKQVYIVKGVATSDFRKIWGIQEEYTKKERVNHVHHCIDAITIACIDKSEYDKLAQFYHQSDEYKFGRGEKPQFEKPWPSFVSDIKQIQDELLIAHYTKDNMSKQAKRYVRDSHGDKVLTQGDVARSSLHNETYYGAINVDGVVKYVVRKSLDGLDEKDVKNIVDGEVRAKVEHAIRLHGSLKKALENSIWMNEEKQIPIKKVRIFTGSVTRPIHIRQQRDLSKHDYKRQYHVQNDRNYMMAIYVGQDNKGKEKREFELVNNITAANFYRKSNDKVPTNNQLLPIYSKSGYELKYRLKIGTMVLLYENSPEEVWELDRKNLQKRLYKVTGMSSMIIQGKFEYGTIEMVHHQNAKPSSEIKKINGEYKSDEDFRPGIKMLHSQIKVLVQGVDFEINDLGEISRLI

SEQ ID NO: 8541 - protein, 892 aa, synthetic construct
  REGION 25..45: note = misc_feature - Xaa can be any naturally occurring amino acid
  REGION 1..892: note = Synthetic
MQRTNRISLIFLWTPLCRQLPSVAXXXXXXXXXXXXXXXXXXXXXANWKDSLCEVYTLSEGKTQMQVINDVWHALFSFDDEDKLKEFAENRLQLNEEQAEEFSKIPIANEYASLSLKAIRKILPYMKDYGMKYTHAVFFGNLKEVLPSHIWGIKETREAAIGNIIGAIQEVAETSDSQTIEKCLKDYLKERYQVSDEKLKKLYHPSMIELYPKVRPNSDGIYQLGSPRISSVKNPMAMHSLFRMRKVINLLLKKGYIDEETKVHIEFSRDLNDANMRKAIQQLNKENEDDRKKCRDKIKELYKEQCGKEIEPTDRDILKYQLWEEQNHTCIYTGDGISICDFLGDEPKYDIEHTIPRSVGGDTTKENLTLCSSKFNRETKKTKLPSELHNHEEILQRIAKWKEEYETLEEKIRSRRKRHPAEKGQRDKNIQERHYLELKCKYWKRKYERFTMTEVPEGFSRRQGTDISVISRYARMYLQSVFKRVYIVKGIATSDFRKLWGLQDVYEKKSRVNHVHHCIDAITIACIDKGEYDKLAKYYHDEENHEWYGHDKPDFKKPWDTFVADIKNVENELLIAHYSKDNMSKEAKRNIRGRDGRILKNERGEKLQMRGDVAHTSLHNDTYYGAIMVDDTVKYVIRKNLDSLEEKDVKNIVDKEVRSKVENAILLHGSLKKAVEATIWMNEEKQIPIKKVRIFAGSVTRPLNIRQQRDLSRHEYKHQYHVMNDRNYMMAIYAGVNNKGKEKRDFELVSNLIAADYYKKSNDKTPTGGNLIPQNKNGLELCYQLKIGTMVLLYENSPEEVWDLDKSNLQKRLYKVSGLSSMVIQGKYDYGTIELTHHQDARPSTDVKKKNGEFKADEEFRAGIKMLHSQFKALVQGVDFDINDLGEITRLI

SEQ ID NO: 8542 - protein, 1219 aa, synthetic construct
  REGION 1..1219: note = Synthetic
MTKILGIDTGTNSLGWAIVKKQADEYHLLDKGVNIFQEGVKIEKGIESSKAAERTAHKAARVRNYRIKLRKIRLLRILSDAHLCPPLSKAELSAWRLKKEYPKNELFMQWQSTDDESEKTSYAYRHKCLHNCLDFSSVTDRYILGRAFYHMIQRRGFLSNRKDQSADDTGKVKESISNLTQEMHDAGYEYLGDYFYSLYNKGEKIRNHYTARNEHYLAEFKAICEKQDLDKNLGSEVVRQIEKAIFYQRPLKSQKGQVGKCVYEKNKTRCPSSHPMYEEFRMLSFINNIKIQTPNDDALRSLSAEERELIMPLFFRKSIIKKKLFDFEDIAKKLAHRGQYGFYKKSTDVEMPYLFNYPMDTSVSGCPVTAALKDIFGENWIDALCETYTLAEGKSRLNVVNDIWHVLFFYTDDTKLAEFAKNRLQLNNEEARKFCEISLPGDYASLSLKAICKILPYLRRGLIYSHAVFLGNLCEVMPQYEWDIEEMRNAAIEHIIHEMNQIDSKDARTFEVCIKEYLKEQYHVSEEKLKKLYHPSKMDKYPRVLRTNDHGVYQLGSPRIDSVRNPMAMRSIFRLRKLVNRLLEEGKIDPDTEVHIEFARELNDANKRHAIAEFAKINQEKNDEARKNIIDIMGEDYDVKDDDIKKYILWEEQGHICLYTGRQIAISDFVGNSQKFDIEHTIPRSVGGDSRRMNLTLCDSRFNREIKKTKLPTELSNHDEIMARINDWREKYESLDGQIRKLRGKSKGATTKKQKDDIIYKRHLLELQRDYWRGKYLRFTMESVPEGFSQRQGTDIGVISKYVRLYLKSLFKHVYTVNGIATSNFRKIWGVQDVYGKKERVNHVHHCIDAIVVACISRAEYDKLGAYYHNEENHKWYGMSKAYFKKPWPTFVEDLKNVQDEILVYHYTPDNMPKQGRRKILLDVEVDGIKKKKKVLCKGDAARGSLHNDTYYGAIENDGVVRYVKRINLASMKENDVKNIVDDTVRGIIETAIKEKGFKKAMSSTIWMNEEKQIPIKKVRCYTPSVTKPLNIRQQRDVSSKEYKQQYHVTNDSNYLLALYIDKDKKGKEKREFEIVNMLQAAQYFRASNDKVVVEGRIEPIKSEHDYPFAYSLKIGTLVLLYEKSPNEVWDASLEERGRRMYKITGFSSTTINGCSYARINMRNHEEARLSKEVKAKNGAFKQGEELRPAIVMLHTQFNALVQGYDFEINELGEIKRLK

SEQ ID NO: 8543 - protein, 1215 aa, synthetic construct
  REGION 1..1215: note = Synthetic
MTKILGIDTGTNSLGWAIVEKQADDYYLLDKGVNIFQEGVKIEKGIESSKAAERTAHRAARVRNYRIKLRKIRLLRILSDAHLCPPLSKTELSAWRLKNEYPKNELFMQWQGTDDVSEKTPYAYRHKCLHESLDLSNITDRHILGRAFYHMIQRRGFLSNRKDQSGDETGKVKESISNLTQEMHDAGYEYLGDYFYALYNKGEKIRNHYTARNEHYLAEFKAICNKQELDRNLGNEVVYQIEKAIFDQRPLKSQKGQVGKCLFEKNKTKCPSSHPMYEEFRMLSFINNIKIRTPKDDTLRHLTEKERELIMPLFYRKTKKQFDFEDIAKKLAPKKQYGFYKKSEDAEMPYLFNYPMDTSVSGCPVTAALKEIFGENWIDAICETYTLGTGKSRLDIVNDIWHALSFYTDNNKLAEFSKNRLHLNDEEAKQFCEISLSGDYASLSLKAICKILPFLRRGLIYSHAIFLGNLCEVMHSSYEWSIKELREAVVDNVIKELYKYDSKDERTLEVCIKDYLKEQYHVSDENLKKLYHPSMMEMYPKVRHTNQQGVYQLGSPRIDSVRNPMAMRSMFRLRKLINRLLQEGKIDSETEIHIEFARELNDANKRNAIAAYTKDNKNKNDEARKKIQNLFKTETGKNIEPTDADILKFVLWEEQKHICLYTGKQICISDFIGANPKFDIEHTIPRSVGGDSTKMNLTLCDSRFNRDVKKTKLPTELSNHDEIMARINDWKEKYETLDAQIRKQKKLSKGATTKEQKDGIIRKRHLLELQRDYWRGKYLRFTMESVPEGFSRRQGTDISVISKYARLYLKSLFKHVYTVKGIATSDFRKIWGIQKAYSKKERVNHVHHCIDAIVIACIGLDEYNKLGAYYHDEENHEWYGMSKAYFKKPWPTFVEDLEKVQDEILVYHYTPDNMPKQGRRRIVVDGKKILSKGDAARGSLHNDTFYGAIENEGIVKYVKRVNLESMKEGDVKNIVDDTVRGIIEAAIKEKGFKDAMTGVIWMNEEKQIPIKKVRCYTPSVTKPLNIRQQRDISVKEYKQQYHVVNDGNYMLALYIGKDKKGKEKRDFEIVNMLQTAQYYRTSNDKEAVGGNIVPIKSEHDFPFAYSLKIGTMVLLYEKSPNEVWDASVEEKNKRLYKVVGLSAMKMKGRNVDYATIKLKHHEDARLSKEIKAKNGAFKQGEEIRPAIIMLHTQFNALVQGYDFEINELGEIKRLR

SEQ ID NO: 8544 - protein, 741 aa, synthetic construct
  REGION 1..741: note = Synthetic
MPQYEWNMEEMRNAAIDNIIYEMNQIDSKDARTFEVCIKEYLKEQYHVSDEKLQKLYHPSMMEMYPRVQHTNNHGVYQLGSPRIDSVRNPMAMRSMFRLRKLVNRLLEEGKIDQDTEIHIEFARELNDANKRNAIAAYTKENQNKNDEARKKIRNLFKAETGNDIEPTDADVLKYVLWEEQGHICLYTGKQIRISDFVGANPKFDIEHTIPRSVGGDSTKMNLTLCDSRFNRDVKKTKLPTELSNHDEIMTRINEWKEKYESLDGQIRRQKKMSKGATTKDQKDAIIRKRHLLELQRDYWRGKYLRFTMESVPDGFSRRQGTDISVISKYARLYLKSLFKHVYTVKGIATSDFRKIWGIQKVYSQKERVNHVHHCIDAIVIACIGLDEYNKLGAYYHDEENHEWYGMSKAYFKKPWSTFVEDVEKVQDEIMVYHYTPDNMPKQGRRRILIDGKKVLAKGDAARGSLHNDTYYGAIESDGVVKYVKRINFASMKENDVKNIVDDTVRGIIEAAINEKGFKEAMSGTIWMNEEKQIPIKKVRCYTPSVTKPLNIRQQRDVSSKEYKQQYHVTNDSNYLLALYIGKDKKGKEKREFEIINMLQTAQYFKTSNDKVAVGKNIVPLKSEHDYPFAYSLKIGTMVLLYEKSPNEIWDASLMDNNKRLYKVVGLSAMRMKGRNVDYATIKLKHHEEARLSTELKVKNGAFKQGEELRPSIIMLHTQLNALVQGYDFEINELGEIKRLR

SEQ ID NO: 8545 - protein, 964 aa, synthetic construct
  REGION 1..964: note = Synthetic
LKSQKGQVGKCVFEKNKTKCPSSHPMYEEFRMLSFINNIKIQTPNDSALRPLSAEERELIMPLFFRKSKKQFDFEDIAKKLAPKKHYGFYKKSSDAEMPYLFNYPMDTSVSGCPVTAALKDIFGDNWIDSLCETYTLAEGKSRLNVVNDIWHALFFYTDETKLAEFGKNRLQLDDEEAKKFCEISLPSDYASLSLKAICKILPYLRKGLIYSHAVFLGNLCEVMPQYEWNMEEMRNAAIDNIIYEMNQIDSKDARTFEVCIKEYLKEQYHVSDEKLQKLYHPSMMEMYPRVQRTNNHGVYQLGSPRIDSVRNPMAMRSMFRLRKLVNRLLEEGKIDQDTEIHIEFARELNDANKRNAIAAYTKENQNKNDEARKKIRNLFKAETGNDIEPTDADVLKYVLWEEQGHICLYTGKQIRISDFVGANPKFDIEHTIPRSVGGDSTRMNLTLCDSRFNREVKKTKLPTELPNHDEIMARINDWREKYESLDGQIRRQKKMSKGATTKDQKDAIIRKRHLLELQRDYWRGKYLRFTMESVPDGFSRRQGTDISVISKYARLYLKSLFKHVYTVKGIATSDFRKIWGIQKVYSQKERVNHVHHCIDAIVIACIGLDEYNKLGAYYHDEENHEWYGMSKAYFKKPWSTFVEDVEKVQDEIMVYHYTPDNMPKQGRRRILIDGKKVLAKGDAARGSLHNDTYYGAIESDGVVKYVKRINFASMKENDVKNIVDDTVRGIIEAAINEKGFKEAMSGTIWMNEEKQIPIKKVRCYTPSVTKPLNIRQQRDVSSKEYKQQYHVTNDSNYLLALYIGKDKKGKEKREFEIINMLQTAQYFKTSNDKVAVGKNIVPLKSEHDYPFAYSLKIGTMVLLYEKSPNEIWDASLMDNNKRLYKVVGLSAMRMKGRNVDYATIKLKHHEEARLSTELKVKNGAFKQGEELRPSIIMLHTQLNALVQGYDFEINELGEIKRLR

SEQ ID NO: 8546 - protein, 901 aa, synthetic construct
  REGION 1..901: note = Synthetic
LRKSKKDFKFEDIAKKLSGTKKDFCYYKDKPEKAYRFNYHMDTTISGCPVIAQLSEVFGVKENIDEWLERACEVYTNGAGKNRYEIMNDIWHALFFFDDDEKLKIFAMEKLQLDEVHAIQFSKIRIPSDYASLSLKAIRKILPYMKQYGMIYSHAVFLANLSHIIKCQTDKEALLPMLPREEAEDIVKAFYEFDPSMSALRTQEEYVKHYIAYKYHLDEENERKLKKLYHPSMIETFPKIRQKTPDGYYQLKSPRTGSMRNPMAMHSLFRLRHVINKLLQKGKIDEDTIIKIEFARELNDYNQRTAIKQWQNILEKQNKEAYEKIKEHFGNDYIPSTTDLLKYKLWEEQQHICLYTGKSIGIEKLFSSTEFDIEHTIPRSVGGDSTDMNLTICDSHFNREVKKAQIPSQLANHEDILERISSWKSKIEKLDKEIRKINTKGISDKETKDHRIQKRHLLILERDYWKGKYSRFVMQEVPEGFSRRQGVDISVISKYARLYLKSLFHHVYIVKGLITSDFRKIWGLQDEYDKKARHNHCHHAIDAITIACIGKAEYDKLAQYYHDKERYDWSLSSQKAVFPKPWKTFTEDVKHIDETLLVSHYTADNIKKRTRKKIRINGKDTNKYMEGDTARVSLHQDTYYGAIERAGEIRYVVRKPIDQTDPKQIVDNVVREKVMAAISEYGSLKKAVEAGIWMNKEKGIRINKARVYATQIKRPLDIRRQRDAIKEYKQMYHVANDSNYIMGIYVGADKKGKEKRTFKLVNSLDAVKFYNSGLKEQNIDILHYEDKNGYALKWKLKIGSMVLLYEDTPSEIYDLDLKALSKRLYKITGMSSMVVSGNSYGTLSLVFHQEARPSTEFSSKNGIYKANEILRPGITLLHTQFKGLVQDQDFAINEIGEIIFF

SEQ ID NO: 8547 - protein, 875 aa, synthetic construct
  REGION 1..875: note = Synthetic
MPYLFNYPMDTSVSGSPVTASLKDIFGEDWINGLCETYTLAESKTRLDVVNDIWHALSFYTDNAKLAEFAKNRLQLNDDEAKKFCDISLPGDYAALSLKAICKILPYLRRGLIYSHAVFLGNLCEVMPQYEWNIEEMRNAAIDNIIHEMNQIDSKDARTFEVCIKEYLKEQYHVSDEKLKKLYHPSMMEMYPKVQRTNNLGVYQLGSPRIDSVRNPMAMRSMFRLRKLVNRLLEEGKIDQDTEIHIEFARELNDANKRNAIAAYTKENQNKNDEARKKIKSLFKDETGKDIEPSDIDVLKYVLWEEQKHICLYTGKQICISDFIGSNPKFDIEHTIPRSVGGDSTKMNLTLCDSHFNRDIKKTKLPTELSNHDEIMARINDWKEKYESLDGQIRRQKKLSKGASSKEQKDGIIRKRHLLELQRDYWRGKYLRFTMESVPEGFSRRQGTDISVISKYARLYLKSLFKHVYTVKGIATSDFRKIWGIQSIYSKKERINHVHHCIDAIVIACIGLDEYNKLGAYYHDEENHEWYGKSKAYLKKPWSTFVEDIERVQDEILVYHYTPDNMPKQGRRRILLDVEINGRKKKKKVLCKGDAARGSLHNDTYYGAIEDDGVVKYVKRINLSTMKESDVKNIVDETVRGIIEAAIKEKGFKEAMAGTIWMNEEKQIPIKKVRCYTPSVTKPLNIRKQRDVSPKEYKQQYHVVNDSNYMLALYIGKDKKGKEKREFEIVNMLQTAQYFRTSNDKEAAGGNIVPVKSEHDYPFAYSLKIGTMVLLYEKSPDEIWDASLTEINKRLYKVVGLSAMRMKGRNVDYATIKLKQHEDARLSTELKAKNGAFKQGEELRPSIIMLHTQLNALVQGYDFEINELGEIKRLK

SEQ ID NO: 8548 - protein, 1230 aa, synthetic construct
  REGION 1..1230: note = Synthetic
LLFQIKNDIFTEFFETNCKYRIMTKILGIDTGTNSLGWAIINKDAEGKHLLEKGVNIFQEGVKVEKGVESSKAAERTEHRSTRVRYYRIKLRKIRLLRILSDNHLCPPLTKEELAAWRLKKIYPKTELFMQWQRTDDNAGKNPYACRHRCLHEKLNMDILTDRYVLGRAFYHIIQRRGFLSNRKEQGGDDSGTVKEGISQLTQEMNAAGYEYLGDYFHALYNKGEKIRKHYTARNEHYLAEFRAICEKQELDQDLAQKIEKAIFDQRPLKSQKGQVGKCVFERNKTRCPASHPLYEEFRMLAFINNIKIKTPNDFELRPLNAEEREKILPLFFRKSKKQFVFEDIAKKLAPKKHYGFYKKSGDSGMPYLFNYPMDTPVSGSPVTAALRDLFGDDWVNALCEVYTLGEGKSRIDIVNDIWHVLFFYSDNVKLAQFAKDRLQLTEHEAQVFSEISLPSDYASLSLKAIRKILPYLRRGLIYSHAVFLANLCEVMPPYEWGNEGMREAAIGNIIREMGRYDARDERTFEVCIKDYIKEQYHVSDEALKKLYHPSMMEIYPRVRPNDKGEYRLGSPRIDSVRNPMAMRAMFRLRKLVNRLLEERKIDADTEIHIEFARELNDANMRKALANNALNNQKDNERARKNIIELYKEETGKTIEPTDRDILKYVLWEEQQHICLYTGKQIRIADFVGDNPAFDIEHTIPRSVGGDSTRMNLTLCDSTFNREVKKTKLPTELANHDDIMARIATWSDECEKLDKQIRKQKGLSKGATTKEQKDGIIEKRHELELKRNYWRGKYERFTMTSVPEGFSRRQGTDISVISKYARLYLKSLFKHVYTVKGIATSDFRKIWGIQELYSKKERVNHVHHCIDAIVIACIGLDEYNQLGAYYHDEENHQWYGASKASFQKPWPTFVEDIKKVQDEILVFHHTPDNMPKQGRRRIKIDGKKVLCKGDAARGSLHKDTYYGAIEREGEVKYVTRIALENLDEKGVDNIVDDSVKAIIKKAIAAQGFKAAMASTIWMNEEKRIPIKKVRCFTAVKKPLNIRTQRDKSTKEYKQQFHVANDDNYMLALYIGQDKNKREKREFELVNRLEAARYFRTSNDKVSVGHNIVPIKSAHDYPLAYTLKIGTMVLLYEKTPEEVWEATKTELSRRLYKVIGMSSMAVEGSSYGKITLRFHEEARQSKDVKAKNGAYKQGEDLRPAIVMLHTPTQFKALVQGYDFEINELGEIKRLR

SEQ ID NO: 8549 - protein, 1240 aa, synthetic construct
  REGION 1..1240: note = Synthetic
LQKYGKIFAIQNYLPYFYRYFFNLYLLLLKMKKILGIDTGTNSLGWAIVGREDDERWLIDKGVNIFQEGVKVEKGIESSKAAERTDHRSQRVRYYRIKLRKIKLLRVLSANHLCPPLTSAELRAWRMKKVYPANELFMRWQRTDELTGKNPYAYRHRCLHEQLDLSSVTDRYVLGRAFYHLAQRRGFLSNRKDAGGDDTGKVKQSISQLTEEMREAGYAYLGDYFHDLYNKGVKIRCHYTARNEHYLAEFNAICERQGLDADLVSKIRHAIFDQRPLKSQKGQVGKCVFEKNKAKCPASHPRYEEFRMLSFLNNIKVKAPGDLALRPLTGEERAKVTPLFYRKTKRQFLFEDIAKKLAPKKQYGFCKRSEDSQMPYLFNYPMDTPVVGCPVTAALRDLFGDDWEQGLCEVYTLAKGKSREDIVNDVWHALFFYSDNDKLSQFAEDRLQLSPDEARAFSDITLPSDYASLSLKAIRKLLPYLRRGLIYSHAVFLANLGKVMPAYEWGNEAMREAAIGHVIEAMDSHDERDDRSMEQRVKDCLRERYCVTDEALSHLYHPSMMDVYPPVPQNENRLGSPRIGSVRNPMAMRSMFRLRHLVNQLLAEGRIDRDTEVHIEFARELNDANMRKALDSQARANQKANDAARKHIAELYKEETGRDIELTDRDVLKYVLWDEQKHICLYTGQQIKLADFVGDNPRFDIEHTIPRSVGGDSTRMNLTLCDSHFNRAVKKTKLPTELACHDDIMQRIAEWKDKVEDLDKQIHKLKGASKGTTTKEQKDRIIQRRHELELQRNYWRGKYERFTMTSVPEGFSRRQGTDISVISKYARLYLKSYFHHVYTVKGLATSDFRKIWGVQEVYSRKERVNHVHHCIDAIVIACIGLDDYNKLGAYYHDEENHEWYGASKASFPKPWPTFVEDVKRVQDEILIYHHTPDNMPKQGRRRIRVDGKRVLSCGDAARGSLHKDTYYGAIEHEGDIRYVKRMALADLKDAKDVEKIVDETVKSIVKQAIKEKGFKAAIDPSNTIWMNEEKRVPIRKVRCYQPSVTNPLHIRQLRDVSPKEYKRQFHVANDDNYLLAVYASKDKKGKDKRTFELVNRLQAAEFFKTSNDKEAAGHNLVPVKSREDYPLAFTLKIGTMVLLYEKSPDEVWEATPKELNRRLYKVVGLSSMVIGGNPYATIKMRHHEEARQSKDIKAKNGAYKQGEELRPAILMLHTQLRALVQGYDFAINELGEIKWLRTHD

SEQ ID NO: 8550 - protein, 1221 aa, synthetic construct
  REGION 1..1221: note = Synthetic
MKERILGIDTGTNSIGWSIVEYNDEISENKYTLIDRGVNIFQEGVKIEKGKEFSKASERTMHKHQRVGYWRRKIRKIKLLKILIRNQLCPSLSVVELKQWRSLKKYPLNEDFMAWQRTDDNIGDNPYYFRYLCLTEKLDLTNLKNRYIVGRAIYHLNQRRGFLSNRKENTRENDGKVKQGIETLAQSMKDCETEYLGEYFNLLYQKGEKIRSHYTSRIDCERELLAICKKQGLSEELTQELRHTIITQRPLKSQKHVVGRCVYEPSKPRCPMSHPLYEQYRMYAFINNIKMQGPGDHILRPLTEVEKQTIIPLFLRKSKKEFKFEDIAKKLSGGKKIFCYYKDKTECAYRFNYYMDTLVSGCSVIAQLSEVFDVKDNVDDWLERACEVYTHGDGKNRYEIMNDIWHVLFFFDSEDKLKEFALEKLQMDEAHAILFSKIHLPSDYASLSLKAIRKILPYMKEYGMIYSHAVFLANLPSVIPCKVDKEALLPMLLREEADDIVRAFYEYDPSMSAIRTQEEYVKRYIAYKYNLDEKDERKLKNLYHPSMIETFPKVRQQTAEGYYQLGSPRTSSMRNPMAMHSLFRLRHVINALLKEGKIDEYTTIRIEFARELNDANKRAAIRQWQNENNKNNTEAIERIKEYLGKDYVPSSTDILKYQLWEEQNHLCLYTGETINLADLFDSNKYDIEHTIPRSVGGDSTAMNLTVCNSRYNREVKLAQIPTQLSCHEQILERIASWKETIEKLGKEIRKINTRGVSDKEVKDRMIQKRYRLMLERDYWKGKYDRFVMTEVPEGFSRRQGVDISIISKYARLYLKSLFHNVYIVKGIVTSDFRKIWGIQDEYEKKQRINHCHHAIDAVTIACIGKTEYDKLAQYYRDEERWEWGLDNRRAVFPKPWKTFTEDMKRLDETLLVSHYTTDNMNKQTRKKVRKNGKFTGQYMQGDTARGSLHQDTYYGAIEHEGEIKYVVRKPLDQLEEKNVKNIVDNVVRGKIETAIEQYGNLKKAVEAGIWMNREKGVAIKKVRIYTSQVKRPLDIRQQRDLSPKEYKRNFHVANDSNYMMGIYAGKSKNGKEKREFELINNLNAVEYYNSGVSVQDIDILPSESKNGYPLKWKLRVGTMVLLYDETPEEIYELDEIQLCKRLYKITGMSSMIVTGCNYGVLSLLFHQEARPSKDVTLKNGIYKHGEATRSGITLLHTQFKALVQGYDFEMDDLGKIKFKNR

SEQ ID NO: 8551 - protein, 1330 aa, synthetic construct
  REGION 1..1330: note = Synthetic
LHLLRQKSSAPTDASPEDYSGFFLKYGAVGSLRSSIFGTPESGEPYLLLAQINKTALSASYKKRKLPPKREYRFYPSAIAGLIVIRCRKSYSGCKNTTLFLFKQIFYCNFTEKFKTASKMTKILGIDTGTNSLGWAIVEKKAEQYCLLDKGVNIFQEGVNIDKDNESSKAAERTGYRAIRVRYYRIKLRKIRLLHILTQHHLCPPLTSWELRQWRLKSIYPTDELFMQWQRTDEEKGQNPYAYRHLCLHEKLDLPQVANRYILGRVFYHFAQRRGFLSNRKDQSGEDVGVVNDGISALSEEMREAGCEYLGDYFYQLYEKGKKIRKHYTARNEHYLKEFHAICEKQQLDASLVSELEKAIFTQRPLKSQKRQVGKCVFEKNKAKCPASHPLYEEFRMLSFINHIKIKTPKEDELRPLNHEEREKILPLFFRKTKKTFNFEDIAKKLAPKKLYGFYKKAADTEMPYLFNYPMDTSVSGCPVTAALQDIFGDDWLDSICKVYTLADGKSRLEILNDIWHALFFYSDQDKLAEFAKVRLQLDDEQAQAFSNINLPSAYASLSLKAICKILPYLRRGLVYSHAVFLGNLCEVMPAYEWGIEEMRQAAIDCVIKEINSYDPKTDGRTLETCIKEYLKERYHVSDENLKKLYHPSMLETYPRVRPGQDGIYQLGSPRTDSVRNPMAMRSLFCLRKLVNRLLKEGKIDQETEIHIEFSRELNDANKRSALKRYGRNNQKAHDTARKHIVEDYKAETGKAIEPTPTDILKYELWEEQQHICLYTGQQIRISDFIGPNPKFDIEHTLPRSRGGDSTKMNLTLCDSRFNRDVKKTHLPTELANHDEIMARIAIWQEKYEELSQQIRKQKRKSQAATTKEQKDKAISYRHYLELQRDYLRGKHERFTMESVPEGFNRRQGVDIGIISKYARLYLKSVFKRVYPVKGLATSDFRKIWGLQDIYSAKERVNHVHHCIDAIVVACIGLDEYGKLAEYYHDEEKHEWYGASKATFAKPWPTFVEDVRRMQNELLVYHHTPDNMAKQGRRRIIINGKKVLAKGDAVRGSLHKETYYGAIEREGEVKYVKRVELSQLEEKNIKYIVDDTVRQIVQEAVDRLGFTEAMASTIWMNEEKQIPIKKVRCYTPQVTQPLHIRYQRDVSDKEYKRKYHVVNDKNYLLAIYIGADKKGKEKRDFELVNNLQAAKYYRTSNDRTGSGDPIVPVKSSHDYPLAYTLKIGTMLLLYENSPAELYEASQAELNRRLYKVTGLSSMTVGTRSYGVIVMKYHTEARQSKDLKGKNGAYQTGEELRPVIRMLHTQIKAAVQGVHFRINELGEIKWLARYD

SEQ ID NO: 8552 - protein, 1204 aa, synthetic construct
  REGION 1..1204: note = Synthetic
MNRILGIDTGTNSLGWAIVDKEGDEYRLVHKGTNIFTEGVKIEKNIESSRAAERTEHRSVRRHYWRRKVRKIRLLTLLADNHLCPPLAKESLREWRLKKVYPQDDGFMDWLLTEDKTGVNPYHFRYLCLTQKLDLSIVSQRYILGRALYHLNQRRGFLSNRKENTKASEGDVNKGISDLTQEIEQAGCTYLGEYFYRLYERGEKIRKHYTARKEHYLKEFHAICEKQGLDSTLVKKLEGAIFAQRPLKSQKGLVGTCTFEKGKPRCPVSHPLYEDFRMYAFLNNIKIQMPSDAELRPLTHQEIDCLIPLFKRKSKRSFNFEDIAKKLAPKNSYCFYKDKVQKPYRFNYPMDTSVSGSIVSAQLEDIFGHQWLDAICETYTLGAGKSRFEILNDVWHALFFFDDEDKLKEFAKNRLQLTDDEATRFSKISLPQDYASLSLKAIRKILPYMRDYGLIYSHAVFLGNLKEVLPSHVWGVPQVREAAIEEIIKVLLSVQQTSDTRTQERCVKDFLKERYQVDEEPLDKLYHPSMIDLYPRVKPNDEGIYQLGSPRISSVRNPMAMHSLFRLRKVVNLLLQKGYIDEETTIHIEFSRDLNDANRRWAIQQWQRQNEKERERCKKEIEKLFQEATGKPIVEVSDRDILKYQLWEEQHHKCLYTGEEISLSDFLGAHPKYDIEHTIPRSAGGDSTKMNLTLCSSSYNREVKKTHLPTELAEHETILQRIEEWKERYEDLDRQIRKTKGVFAATKEEKDKKIRRRHLLSLERDYWRGKYQRFTMTEVPEGFSRRQGTDISVISRYARLFLKSVFRHVYIVKGIATSDFRKIWGIQNEYEKKERVNHVHHCIDAITIACIGPDEYAKLAQYYHDEENHEWYGKSKGHFTPPWPTFAEDISKIQDELLVAHYTEDRMQKRAKKKIRKSDGTVVRNNKGIIRYAQGDTARGILHQDTFYGAIMHQGELKYVGRKELTKITEKDVDNIVDDVVRRKVQEAIQEHRGLKGAIAAKIWMNKEKGIEIKKVRIFVKQTTPLTIKAHRDLSRHDYKQQYLVWNDSNYLLAIYEGKDKKGNLARAFKEIKVIDAAKYYAQRHSSHIVPAISNEGYVLKYELRIGAMILLYDKSPDEIWNGTPQTMKERLYVITGMSLTNGRMTVVHHQEARQAKELKPEAAAYDYDGNLRPMLRISLSKFKALIQGFDFDINDLGEIQRLR

SEQ ID NO: 8553 - protein, 1020 aa, synthetic construct
  REGION 1..1020: note = Synthetic
MTKILGIDTGTNSHGWAIVEKQADEYHLLDKGVDIFQEGVLKTEKGKEYSKAAERTAHKAARVRNYRIKLRKIRLLRILSDAHLCPPLSKVELSVWRLKKEYPKNELFMQWQSTDDESEKTPYAYRHKCLHESLDFSSITDRHILGRAFYHMIQRRGFLSNRKDQSADDTGKVKESISNLTQEMHDAGYEYLGDYFYSLYNKGEKIRNHYTARNEHYLAEFKAICEKQDLDKNLGPEVVRQIEKAIFDQRPLKSQKGQVGKCVFEKNKTRCASSHPMYEEFRMLSFINNIKIQTPNDDVLRPLSSEERALIMPLFFRKSKKLFDFEDIAKKLAPKKQYGFYKKCSDAEMPYLFNYPMDTSVSGCPVTTALKDIFGDNWIDSLCETYTLAEGKSRLNVVNDIWHVLFFYTDDTKLAEFAKNRLQLNDEEARKFCKISLPGDYASLSLKAICKILPYLRRGLIYSHAVFLGNLCEVMPQYEWDIEEMRNAAIEHIIHEMNQIDSKDESTLEKRIKEYLKNQYHVSDDKLKKLYHPSKMDKYPRVLRTNDHGVYQLGSPRIDSVRNPMAMRSIFRLRKLVNRLLEEGKIDLDTEIHIEFARELNDANKRRAIAKFAKDNQKKNDEARKKIIDKMGEKYNVKDDDILKCILWEEQGHICLYTGRQIAIPDFVGTSQKFDIEHTIPRSVDGDSTRMNLTLCDSRFNREIKKTKLPAELPNHDEIMARINDWREKYESLDGQIRKLRGKSKGATTKKLKDDIIYNRHLLELQRDYWRGKYLRFTMEIVPEGFSRRQGTDVGVISKYARLYLKSLFKHVYTVNGIATSDFRKIWGVQDVYGKKERVNHVHHCIDAIVVACISRDEYDKLSAYYHNEENHKWYGMSKAYFKKPWPTFVEDLKNVQDEILVYHYTPDNMPKQGRRKILLDVEVDGIKKKKKVLCKGDAARGLLHSDTYYGAIENDGVVRYVKRINLASMKVTDVKNIVDDAVRGIVEAAIREKGFKEAMAGTIWMNEEKQIPIKLKFRK

SEQ ID NO: 8554 - protein, 1208 aa, synthetic construct
  REGION 1..1208: note = Synthetic
MKRILGIDTGTNSLGWAIVEKEDDDYQLLDKGVNIFQEGVKIEKGIEASKAADRTSHRSIRIRYYRIKLRKIRLLRILSDNHLCPPLSTSELSLWRQKKEYPNTNELFMQWQRTDDHEGKNPYADRHRCLHEKLDMDNINDRYVLGRAFYHIIQRRGFLSNRKEQGGDDSGKVKEGINSLTQEMEEAGCQYLGDYFYSLYNKGEKIRNHYTDRIEHYLTEFIAICKQQNLDDDLKEKIGKAIFDQRPLKSQKGQVGECVFEKNKTKCPSSHPLFEEFRMLSFVNNIKIKTPKDDVMRSLNKEERESISPLFYRKSKKHFEFEDIAKKLAPKKQYGFYKKSSDVEMPYLFNYPMDTPVSGCPVTAALKDIFGENWIDAVCEVYTNANGKSRLEIINDIWHVLFFYSDSDKLALFARTKLQLGEKEAKAFSDISIPADYASLSLKAICKILPYLRKGLIYSHAVFLGNLCEVIPSYIWKVKEMREAAIDSVIKEMDTYDSRDKRTFELCIKEYLKEQYHLTDEIVEKLYHPSMMEVYPKVRLNHQGIYQLQSPRIESVRNPMAMRSMFRLRKLINRLLEMGKIDEETEIHIEFARELNDANKRQAIAELVKNNFAENEKARKAIKELYKEETGTEVEPTDVDILKYTLWKEQNSVCPYTGKNIRISDFIGANPMFDIEHTIPQSVGGDSTKMNLTLCDSRFNREIKKTKLPAELSNHDEVLQRIKGWKERYENLNQKIRKQKKLSKGATIKEQKDSIIKKRHLLELERDYWRGKYERFTMTNVPEGFSRRQGTDISVISKYARLYLKSIFKHVYTVKGIATSDFRKIWGIQEIYSKKERVNHVHHCIDAIVIACIGLDEYNKLGAYYHDEENKKWYGMSGASFPKPWSTFVEDIKNIQNELLVYHYTPDNMPKQGRRRIMIDGKKVLSKGDAARGSLHKDTYYGAIEKEGEVKYVKRIAIEELDEKSVDAIVDETVKAIVKKAIAAKGLKEAKASTIWMNEEKQIPIKKVRCYTPSVTKPLNIRKQRDLSTKEYKQQYHVVNDDNYLLALYAGQDKKGKEKRDFEIVNMLEAAQYYKTSNDKETTGYNMVPFKSKHDYPFAYSLKIGTMVLLYENSPEEVWDASKREMVKRLYKIVGMSSMVVSGCSYATITMRHHEEARSSKNLKAKNGTYKQNEEFRPVIVMLHTQIKALVQGYDFDINELGEIKRLR

SEQ ID NO: 8555 - protein, 1198 aa, synthetic construct
  REGION 1..1198: note = Synthetic
MNKILGIDTGTNSIGWAIVEKVENKDYKLLEYGTNIFQEGVKVEKGDKPSKAAERTMHRNIRKHYWRRKVRKIRLLTILIENNLCPPITKQELREWRTKKKYPQNELFLDWQRTEDKEDINPYHFRYNCLMQKLDMSDITQRYILGRALYHLNQRRGFLSNRKESTKESEGQVKQDISQLTADIKSAGCSYLGEYFYQLYQKGEKIRTHYTARNEHYLAEFHAICKKQELDNELIEKLEKAIFNQRPLKSQKQQVGKCTFETKKSCCPTSHPLFEDFRMYSFINNIRIQTPQDDGLRPLSASERKTITPLFLHKPKRTFLFEEIAKKLAGKNNYCYITDKVDKPYKFNYYMDINVNGCPVNAQLTEIFGDNWLDGVNELYTLAKSKSRIEILNDIWHVLFFYDDEKKLKDFAKDRLQLNEKDAEKFSQIHMPQEYASLSLKAIKKILPYLKDYGLIYSDAVFLANLCEVLPSHVWCVKEMRNAAIERIIEVIHEKHSIIESRGIEHRIKAFLKEYYHVEDEKLKKLYHPSMIDAYPRQQLNNVGLYQLGSPRINSVRNPMAMHSLFRLRKVINLLLKERKIDEETIIHIEFSRELNNTNRRKAIQANQRNNEKYRDECRKKIAELYKEQKIGREPSDTDILKYQLWEEQFHKCLYTGDEISLIDFLGDNPKYDIEHTVPRSVGGDSTKMNLTLCQSKFNREIKKTKLPSQLANHEEILQRINSWKEEYEKIDKQIRKLKGSHNTTKEAKDRNIQRRHELSLLRDYWRGKYQRFIMTEVPEGFSRRQGTDISIISRYARLYLKSVFHHVYTVKGITTSDFRKIWGIQDEYTKKERINHAHHCIDAITVACIGANEYSQLAQYYHTLEDHEKYGMSKPHFPKPWTTFADDIKHIQDNLLVAHYTQDNMPKAAKRRIMTSQGKIMAQGDVARGSLHLGTYYGKIERDGEIKSVIRKPLNNVTNIDNIIDEIVKEKVKQAISTHGSLKKAVEAGIWMNEEKGIPIKKVRCFTSIQRNTLDIRKHRDISRHDYKQTFHVWNENNYMIAIYEGQDEKGRIKREFEEIKNIDAARYYRTSNDRLVTGDSIVPIQSASGYDLLYKLQIGTMVLLYENTPEEVWEQDKLGLQKRLYKVTGISLADGRMVLFHQQEARLSTEVIQKDGAFSVNEEFRSKIRVSLNQFQALIGGIDFKINDLGEIKRII

SEQ ID NO: 8556 - protein, 1208 aa, synthetic construct
  REGION 1..1208: note = Synthetic
MGKILGIDTGTNSLGWAIVEKSNEGCKLLDKGVHIFQEGVKIEKGIEASKAAEKTGHRATRVRYYRIRVRKIQLLKILIDNHLCPPLSEDELKKWKQRKVYPLNEQFMCWQRTNDNEGKNPYADRHKCLHEKLDLENLMDRYILGRAFYHLIQRRGFLSNRKDQDGDDTGKVKEGISSLSEEMQKAGFEYLGDYFYSLYNKGGKIRGHYTARNEHYLKEFKAICEIQELDKRLGVDVVKAIEKAIFNQRPLKSQKGQIGKCVFEKNKSKCPVSHPLFEEFRMLSFLNNVRIRTPKDEVLRPLNVEEREKIMPLFFRKSKKNFDFEDIAKKLAPKKMYAFNKQNPNMPYLFNYPMDVSVSGCVVSACLRDIFGEDWLSAICEVYTLGNGKSRLQILNDVWHALFFYSDKEKLAEFAKVRLQLNDEDARKFSEISMPSEYASLSLKAICKILPYLRRGMIYSHAVFLGNLCEVMPRYVWKTAEMREAAIEKILSEMDNYNPNIDGAALEVCIKDYLKREYGVTDEDLKKLYHPSMMETYPPVRPNGDGLYQLGSPRISSVRNPMAMRSMFRLRKLINRLLQEGKIDKDTTINIEFARELNDANKRKAIADNVRENQKQREDARKRIIELYKVDTGKDIVPNDDEIVKYILWEEQGHVCLYTGKQIRISDFIGADPKFDIEHTVPQSVGGDSTRMNLTLCDSRYNRDVKKTQLPSELFNHDEILSRIESWKKKYEEFDKQMRRLRTNGVATKAVKDKIIQRRHLLQLKRDYWKGKYERFIMTEVPEGFSRRQGTDISIISKYARLYLRSVFDKVYTVKGIATSDFRKIWGIQGIYASKERVNHVHHCIDAIVIACIGKAEYDKLAQYYHDKENHVWYGYAKADFVKPWPTFVEDIKNVQNEIFVSHYTPDNMSKQGRKHTVVNGKKVLSKGDAARGTLHNDTYYGAIERDGDVKYVVRRELASLEEKDIKNIVDDAVRGKIEAAIAEKGFKEAMAGTIWMNEEKRIPIKKVRCYTPSVTNPLNIRKHRDESLKEYKRQFHVANDSNYAMAIYIGNDAKGKEKRDFELVNMIDAASYYKTSNDKEVVGHSMVPIKSKHDYPLAYILKIGTMVLLYEKSSEEIWEGNGVERSKRLYKIVGMSSMRVSGCSYGVILLRYHEEARPAVEIKAKNGAYLQGEEFRPGIKMLHTQLNALIQSYDFDINELGEIKRLR

SEQ ID NO: 8557 - protein, 1216 aa, synthetic construct
  REGION 1..1216: note = Synthetic
MTKILGIDTGTNSHGWAIVEKQADEYHLLDKGVDIFQEGVLKTEKGKEYSKAAERTAHKAARVRNYRIKLRKIRLLRILSDAHLCPPLSKVELSAWRLKKEYPKNELFMQWQSTDDESEKTPYAYRHKCLHESLDFSSITDRHILGRAFYHMIQRRGFLSNRKDQSADDTGKVKESISNLTQEMHDAGYEYLGDYFYSLYNKGEKIRNHYTARNEHYLAEFKAICEKQDLDKNLGPKVVRQIEKAIFDQRPLKSQKGQVGKCVFEKNKTRCPSSHPMFEEFRMLSFINNIKIQTPNDGELRSLSAEERELIMPLFFRKSIIKKKQFVFEDIAKKLARREQYGFYKKSTDVEMPYLFNFPMDTSVSGCPVTAALIDIFGENWVDTLCETYTLAEGKSRLDIVNDIWHVLFFYTDEAKLAEFGKNRLQLNDEDAKKFSKITLQNGYGRLCLKVICKILPYLRRGLVKDHAILLGNLCEVMPQYEWDIKEMRIAAIDNIIREINKTDSKDESTLEKRTKLEKRIKEYLKNQYHVSDDKLKKLYHPSKMDKYPRVLRTNDHGVYQLGSPRIDCVRNPMAMRSIFRLRKLVNRLLEEGKIDLDTEIHIEFARELNDANKRRAIAKFAKDNQKKNDEARKKIIDKMGEEYNVKDDDILKCILWEEQGHICLYTGRQIAIPDFVGTSQKFDIEHTIPRSVDGDSTRMNLTLCDSRFNREIKKTKLPAELPNHDEIMARINDWREKYESLDGQIRKLRGKSKGATTKKLKDDIIYNRHLLELQRDYWRGKYLRFTMEIVPEGFSRRQGTDIGVISKYARLYLKSLFKHVYTVNGIATSDFRKIWGVQDVYGKKERVNHVHHCIDAIVVACISRDEYDKLSAYYHNEENHKWYGMSKAYFKKPWPTFVEDLKNVQDEILVYHYTPDNMPKQGRRKILLDVEVDGIKKKKKVLCKGDAARGLLHSDTYYGAIENDGVVRYVKRINLASMKVTDVKNIVDDAVRGIVEAAIREKGFKEAMAGTIWMNEEKQIPIKKVRCYTSIKNPISFDKKKQRDLSDKEYKRNYYVATKGNYIVALYVGSTKTGKRKTFYEFVNMMEAAGYYKTSNDKSVVGHNIVPLEKDDCQLAFILKKGTMVIFYKETKEEVWDYSQKETVRNLYYVSGIESDGRVTFKYHQEARRDEELPRNASDTSDIKPKIRVGLASAKILVQGYDFEINELGEIKRLR

SEQ ID NO: 8558 - protein, 1203 aa, synthetic construct
  REGION 1..1203: note = Synthetic
MTKILGIDTGTNSLGWAIVERNEETNEYTLLDHGTHIFAEGVKIEKGIESSRASERTEHRGVRRHYWRRKVRKIRLLKVLIDNHLCPPLSDADLRRWRLNKHYPIDEAFMAWQRTEDKEGINPYRFRHICLSERLNLDDLTQRYILGRALYHINQRRGFLSNRKESTKESDGKVKEGISKLEDEMRAAGCAYIGDYFFTLYERGERIRTHYTSRKEHYLAEFRAICAKQQLDTELTSRLEKAIFFQRPLKSQKQSVGVCTFEKGKARCPVSHPLYEEYRMWSFINNIKMQGPGDTALRPLKPEEINRIIPLFMRKSKSSFPMEDIAKTLGGKKNYCCIKEDSPKQYKFNYFMDTSVSGCPVTAQLIDIFGDDWKSVICQVYTAAGNKSEEQIVNDAWHALFFFDDDDRLRDFARAKLQLSDEDAAKFAAIKMPQDYAALSIKAIRKILPYLRDYGLIYSEAVFLANLCAVLPAGVWEDEKRRAHAIEGAIEAIHRPGDDTMEQRLKDYLRLSYDVDDEHLARIFHPSMLETYPDCKPDERGIYRLGSPRVNSVKNPMAMHSMFRLRRVVNRLLAEGKIDNETVIHIEFARELNDANRRKAIKDFQRDNEKTREECRKKIAEVFKDLDIAREPSDNDILRYRLWEEQNHVCIYTGESISLSDFLGSNPKYDIEHTVPQSAGGDSTMMNLTLCQNRFNREVKKTALPSQLANIEEILPRIAHWKEKAEELGKQIRRLKSARPAAKEDKDRNIQRRHLLSLQRDYWLGKYRRFTMTEVPEGFSRRQGTDISVISRYARLYLKSVFKKVFVVKGIATSDFRKMWGIQEEYSRKERVNHAHHCIDAITIACIGPHEYARLAQYYHEEADNKFYGREKPQNFPKPWRTFVEDIRHIQDSLLVSHYTADNIAKSARRRIDTPDGRLLCRGDVARGSLHLDTCYGAIDRDGDIKYVVRRSLDSLDEKDIKLIVDDEVRARVEQSVKEYGSLKKAVEADGVWMNREKGVRIRKVRVFTPSVTRPVNIRHHRDVSRHEYKQQIHVMNDRNYAMAIYIGKDAKGKEKRDFKLVNMLDAANHYRRSNKRDANEPLVEPTSPKGYPLAYFLKPGTMVLLYENSPKEVLEARKEELQRRLYKVTGLSILVSGNSSYGRIYITHNQEARSTTEYKFQNGAFASNEAIRPAIMLLSSQLNALVEGKDFVMNEIGEIVFK

SEQ ID NO: 8559 - protein, 1195 aa, synthetic construct
  REGION 1..1195: note = Synthetic
MERILGIDTGTNSLGWAIVEHDNDQYKLLYKGTNIFAEGVKIEKGIESSRAAERTEHRSVRKHYWRRKVRKISLLSILVDNDLCPPVGKNDLRLWRLKKQYPMNDEFMAWQRTEDKEGVNPYRYRYICLTQKLDLSDQTQRYILGRALYHLNQRRGFLSNRKEATKESEGAVKEGISELSQDIEKAGCTYLGEYFYHLYNEGKKIRSRYTARKEHYLKEFRAICEMQELDHQLVEKLEKAIFTQRPLKSQKGTVGVCTFEKGKARCPSSHPLYEDFRMYSFLNNIKMQTPQDHQLRYLTGDEKALVIPLFKRKSKKTFPFEDIAKKLAGKNNYCYDGDEVAKPYRFNYQMDVSVSGSTVNAQLEELFGTDWLDAVCEVYTLAEGKSRFQILNDIWHALFFFDDEDRLKNFAKNRLQMDEEQAAKFSKITLPSDYASLSLKAIRKMLPYLKDFGLIYSQAVFLGNLVEVLPQHVWGIKETREAAIENVIKVMQSYDKRTDSRTLEFCVKDYLRERYQADEQQLKKLYHPSMIDLYPHAQPDDEGKYQLGSPRISSVRNPMAMHSLFRLRKVVNLLLKEGKIDENTIIHIEFSRDLNDANRRKAIQDYQRENEKDREACRKKIEELGFSHVTDTDILKYQLWEEQHHKCLYTGEEIKLADFLGSNPKYDIEHTVPQSVGGDSTKANLTLCNSKFNREVKKAKLPSELANHEEILQRIADWKETYEELDKRIRKLKGSRASTKEEKDSIIRRRHLLSLQRDYWRGKYQRFTMTQVPEGFSRRQGTDISVISRYARLYLKSVFKQVYIVKGIATSDFRKIWGIQEEYSKKERVNHVHHCIDAITIACIGKSEYDKLAQYYHDDEAHRWGQSLDKAQFSQPWPTFVSDIKNIQNELLIAHYSKDNMRKHTRKRGENGYVQGDTARASLHNDTYYGAIEVDGEVKYVVRKNLDSLVEKDVKNIVDDAVRQKVEDAIEKHGNLKKALENTIWMNEEKQIPIRKVRIFTGSVTRPIHIRQQRDLSRHEYKRQFHVQNDRNYLMAIYIGKDKKGKEKREFEIVNNIEAARHFKRSNGSIDGLVPQTSAKSGYPMAYCLKIGTMVLLYENSPEEVWELDQRNLVRRLYKVTGLSSMVISSYNYGTINLIHHQEARPSTDVKQKNGVFKANEEFRSGIKMLHTQINALVQGVDFELNDLGEIKRLI

SEQ ID NO: 8560 - protein, 1206 aa, synthetic construct
  REGION 1..1206: note = Synthetic
MEKVLGLDLGTNSIGWAIIERNEKVRLVDRGVHIFQEGVKIESGIESSKAADRTSHRSLRKHYWRRRARKVETLKILSDMGFCPKLSADQLKAWQQKGEYPDTEDFMAWQRTNQNSMANPYYYRYLAVNEKLDLSLVTHRYILGRALYHIAQRRGFLSNRLEKTKASEGEVKKSISTLSQEIINAGCVFLGEYFYQSYQSGKKIRNHYTSRVEHYKPEFDKICELQGLSIEDKKNLEKAIFFQRPLRSQKGLVGKCTFERTKPRCPVSHPRYEYYRTLCFLNNIRIKTPSDEQLRQLNSAEREKILPLFYRKSKENFDFEDIAKLVAGRGNYSYFKEPQGKPYLFNFKMNTNVSGSPVTAQLKDVFGADWMGRIERCYVDSGNKTRKQIINDIWHVLFSFDDEARLFEFAQSKLLLDEQKAKKFTNINIPQDYASLSLNAIDKIIPLLEEGLIYSHAVFLANLAKVVPKEIWASLENRKFITAEIIKLVDDHKVQPDVTIQPKIIDFLRDNFDLKPFAENKLYHPSLIETYPEVRETKGDFFQLESPRTNVIRNPMAMRALFQLRRLINQLLRQGRIDRQTKINIELSRELNNANTRKAIEQWQREIEKENKGYRDDIKQDVGIAEYEPNELDILKYRLWMEQNKICLYTGRNISVEDFIGANPRFDIEHTIPRSIGGDNSQMNKTLADQVYNREIKKARMPVEMANHDDILVRIEKWKAKIDELEKQIETSKKRRFFLSKEDKDKHITARQKVIIELRYIKGKYDRFIQKEVDPGFRNSQGVDAGIISKYARLYLQSLFPRVYSVKGEITAEFRKLWGLQDAISKKDRSNHVHHCIDAITIACIGKSENDSLSDYYRHDEEYHWGKRGKPRFDKPWATFTEDVKNVENELLVSHYTASNLVKQTKKKVRVSGKIILDVTGKPLMKQGDSARGSLHKETFYGAIRKGEEIKYVVRKSLAQLKDTDVEKIVDKAVREKVKKAIAQLGFKAAIVSTIWMNEQKGVPIKKVRCLTPTITDPLHIRQQRDQSRFAYKRQYHVANDGNFMMAVYEGIDGKGRTKRDFELVNNLEAAALLKQSAGKTGLSNLFPDKKGNLTFKCRLRIGSMVIFYENSSEEVWGLDEADVKKRLYKVIGLSTIPVGTSYGKITLLHHQEARPAKDLNARNGAYKCNEEYRAQIVITHNQLNALVQGFDFQITVLGQIEWIKS

SEQ ID NO: 8561 - protein, 1201 aa, synthetic construct
  REGION 1..1201: note = Synthetic
MEKILGIDTGTNSLGWAVVNKYDDGHYELLDKGVDIFQEGVNRDQSGESSKAAARTEKRALRVRYYRIRLRKIELLHILTENHLCPPLSKDELSLWRHKKIYPKNELFMEWQSTDDKTGKNPYHDRYVCLTQKLDLTDLQNRYMLGRALYHINQRRGFKSNRKDLSKEDKDTGTVNEGISELSQEIKAAGCTYLGEYFYHLYEKGEKIRKHYTAREEHYHKEFQAICERQGLDSELVSKLEHAIFYQRPLKSQKGLVGHCVFEPKKTKCPVSHPLFEEFRMLSFINAIKIQTPSDTEMRPLNDDERSKIKPLFYRKSKRDFDFSDIAKKLAGKSKYAYYKGGIAPYLFNYFKDSNVSGCPVTASLRDLFGEDWLNGIKEVYDKVDGKSDLQIINDIWSALFFYTDNDKLAEFGKRHLQLSDEDAKKFGNIPIDEGYASLSLKAITKILPYLRRGMIYSHAAFMGNLVEVLPADVWNDPQRREEAIKELETTIHNYGKVAEARTLEQCLKDHLSVKYGVPDERLEKLYHPSMIEMYPKVPLGVNKLGSPRNNSLRNPMAMRSLFQMRHTINQLLKEGKIDRNTTIHIEFARELNDANKRIALAHYTRDNQKEHDNCKKKIIELYKEETGQTIEPTETDILKYQLWEEQNHICLYTGKQIGIADFIGPDPSYDIEHTIPRSKGGDSTRMNLTLCSSKFNRDVKQTMLPSELPDHELILHRVEDWKKKYEDLDAQIRKVRTWSGMEKNTKDHLIQKRHRLQLQRDYWYGKYHRFEMTEVPEGFSRRQGVDISVISRYGRLYLKSFFDRVFIVKGLATSDFRKIWGLQDEYSKKERVNHVHHCIDAIVIACIGPHEYSQLAEYYHDEENHEWYGTSKPHVQLPWDTFVTDIKDIQNEIFVVHNTNDNVPKQGRRVRRKDGTMSKPCDSARVQLHLDTYYGAIEQNGNIKYVVRKALDSNFKESDIKNIVDETVREKVQEAVKRLGFKEAMASTIWMNEEKRIPINKVRCLTSITRPLPIRHHRDQSEKDYKQTYHVANNGNYAMAIYIGKDKRGKEKRAMETVNNIEATRLFKASTDKEMTDNNLVPLSKNDFPLAYVLKKGMMVLLYEKTPEELKECSKEELVKRLYKVTGLATMVISKNTYGVIELTFHEEARASTEVKGKNGAYKIGEELRSKIVMLHTQFRALVEGKDFELSATGEIKFKD

SEQ ID NO: 8562 - protein, 1206 aa, synthetic construct
  REGION 1..1206: note = Synthetic
MERILGIDTGTNSLGWAIVDKDENGYRLVSKGTNIFSEGVKIEKGIESSKAAERTEHRSVRKHYWRRKVRKIRLLTILSENNLCPPLKTSDLRQWRLKKVYPKDEDFMEWQRTEDKANVNPYKFRYICLNQKLDLSDIAQRFILGRALYHLNQRRGFLSNRKESTKESEGAVKEGISNLSEDMNAAGCEYLGEYFYQLYQKGERIRNHYTARKEHYLKEFRAICSKQELDEDLVTKLEHAIFDQRPLKSQKGQVGTCTFEKGKSRCPSSHPLYEDFRMYSFLNNIKVQVNTMFEKGERYLTNDEKQKIIPLFKRKSKRAFPFEDIAKKLAGKNNYCYNKSGEDKPYMFNYQMDTQVSGSPVNAQLEEIFGEDWLTSVCEVYTLSKDKSRFQIMNDIWHALFFYDDEDKLKEFAKNRLQLGDDDAERFSKISIPNDYAALSLKAIRKIIPYMRNNGLIYSEAVFLANLVEVLPQHVWGVKEVREAAIENVIDVMHSYDKNNVDGITLETCVKTFLKERYQVSDEGLKKLYHPSMLELYPRQRPNDDGIFQLGSPRISSVRNPMAMHSLFRLRKVVNLMLKEGYVTPDTKIHIEFSRDLNDANTRKALQAWQRENEKDRNQCRDKIKEFGIANPSDTDILKYQLWEEQKHICLYTGETIKEEDFLGKNPKYDIEHTIPRSAGGDSTKMNLTLCSNRFNRDEKKTKLPSKLANHEEILERIKDWKEKYEDLDRQIRKITTKGATSKDDKDRKIQRRRFLIEQSRYWRGKYERFTMPQVPEGFSRRQGTDISVISRYARMYLKSVFKQVYIVKGLATSEFRKMWGIQEEYTKKERVNHVHHCIDAITIACIGKAEYDQLAQYHHQNDEFEYYGRGKRPEFVMPWPSFVNDIKKIQDELLIAHYSKDNLEKYTRKNLRGKDGRIIRDKQGNKLQMKGDTSRNSLHNDKFYGAINHEGTIRYVYRTNIEDLDAKSVGNIVDPAVRNIIETAIATHGSMKAALSCGIWMNEEKRIPIKKVRIFRNDVKKPLELKDQRDLSDKGYKQHYYVTNDGNYMMLIFSKINNKGREIREHVVINSLEATEVIKSHKRTQNGKVAWESYYSKEGYDLIYKLKSGTMVLLYENNGDEIWDLDKRNLQRRLYIITKMKFDGRIYMMHHQEAREKKDLEEKSGSFKIDEDYRPIIVNSYNQFKALIQGVDFEINDLGEIRRLI

SEQ ID NO: 8563 - protein, 1206 aa, synthetic construct
  REGION 1..1206: note = Synthetic
METKVLGIDTGTNSLGWAIVSRDEELGTCHLEEHGVNIFQEGVKREKGIESSKAAERTEKRSSRKHYWRRKVRKINLLRILIANRLCPPLANDALKDWRSKRIYPMDELFIQWQRTDDHHNINPYYYRYLCLKEKLNLELPEKRFILGRALYHLNQRRGFLSNRKSQDKEDETGKVKKGISQLSADMESARCEYLGEYFYHLYEKGERIRNHYTAREEHYLKEFKAICEKQQLEESLVNKLQLAIFYQRPLMSQKQNVGRCPFEPKKSRCPISHPLFEEFRMYQLLNNIRMRDPLDSEMRLLSEEEKDKIRPLFYRKSKKLFDFSDIAKALAGTKTTKNVAYYKGDTEGAQYLFNYQMDFGVAGCPVTAQLKEIFGEDWLSEASSLYVQSAGKTQSQIMDDIWHILFNFEDACHLKQFAMEKLQLSEELADKFSKISVPQDYASLSLCAIRKILPWMKESGLRYDQAVFLANLEKVLPAYVWDNEETRQSALNILLDIVNKYDYKNSETTLEAYLKSYIKEYWPESHVEKFYHPSMIELYPKAKPNDEGLYQLGSPRLNSVKNPMAMHSLFRLRHVINTLLREGKITPDTTINIEFARELNDANRRKAIEHYQRDLKKMREDYKKIIEEHHEASETDILKYQLWIEQDRRCIYTGETIGLNDFIGDNPSYDIEHTIPRSKGGDSTQANLTLCSNRFNREIKRTFLPSELVNHDEILQRIASWKEKYEDFDAKIRIAKRRAKAATTKEQKDRAIEDKHYLTLQRDYWRGKYQRFLMATVPEGFARRQSVDISVISRYARLYLQTVFKHVYIVKGLATSDFRKIWGIQEEYTKKERVNHVHHCIDAITIACIGRNEYGHLAQYYHEMEDWKWFHKDKPHFPQPWATFASDIKKIGDDLMVAHTSPDLMPKQTKKKSKTGDGTHIQGDTARGPLHLDKFYGAIDRGEGVRYVVRKPLDGLKETDLKNIVDDVVREKVQQAVIRYSSIKTALANGIWMNEDKHIPIRKVRLYTPNVTRPLKGFKKQRDISPKEYKREYHVMSDRNYMMAIYADPKSPQKREFELVSNLQAATFFKSSNEMKKEGYTLVPVKSPQNGYPLLYQLKIGQMVLLYETSPDEIWGGTTESMSRRLYKIIGFSSMISSETRTYGKISLVYHQEARPSSEVSLKNGSYRKEEQLRSGILMLHTQFNALVEGVDFRINDLGEIIRLI

SEQ ID NO: 8564 - protein, 939 aa, synthetic construct
  REGION 1..939: note = Synthetic
MYEEFRMLSFINNIKIQTPNDSALRPLSAEERELIMPLFFRKSKKQFDFEDIAKKLAPKKHYGFYKKSSDAEMPYLFNYPMDTSVSGCPVTAALKDIFGDNWIDSLCETYTLAEGKSRLNVVNDIWHALFFYTDETKLAEFGKNRLQLDDEEAKKFCEISLPSDYASLSLKAICKILPYLRKGLIYSHAVFLGNLCEVMPQYEWNMEEMRNAAIDNIIYEMNQIDSKDARTFEVCIKEYLKEQYHVSDEKLQKLYHPSMMEMYPRVQRTNNHGVYQLGSPRIDSVRNPMAMRSMFRLRKLVNRLLEEGKIDQDTEIHIEFARELNDANKRNAIAAYTKENQNKNDEARKKIRNLFKAETGNDIEPTDADVLKYVLWEEQGHICLYTGKQIRISDFVGANPKFDIEHTIPRSVGGDSTRMNLTLCDSRFNREVKKTKLPTELPNHDEIMARINDWREKYESLDGQIRRQKKMSKGATTKDQKDAIIRKRHLLELQRDYWRGKYLRFTMESVPDGFSRRQGTDISVISKYARLYLKSLFKHVYTVKGIATSDFRKIWGIQKVYSQKERVNHVHHYIDAIVIACIGLDEYNKLGAYYHDEENHEWYGMSKAYFKKPWSTFVEDVEKVQDEIMVYHYTPDNMPKQGRRRILIDGKKVLAKGDAARGSLHNDTYYGAIESDGVVKYVKRINFASMKENDVKNIVDDTVRGIIEAAINEKGFKEAMSGTIWMNEEKQIPIKKVRCYTPSVTKPLNIRQQRDVSSKEYKQQYHVTNDSNYLLALYIGKDKKGKEKREFEIINMLQTAQYFKTSNDKVAVGKNIVPLKSEHDYPFAYSLKIGTMVLLYEKSPNEIWDASLMDNNKRLYKVVGLSAMRMKGRNVDYATIKLKHHEEARLSTELKVKNGAFKQGEELRPSIIMLHTQLNALVQGYDFEINELGEIKRLR

SEQ ID NO: 8565 - protein, 1236 aa, synthetic construct
  REGION 1..1236: note = Synthetic
MKYSLGLDIGTASIGWAVVNLDKNRIEDLGVRIFERPEHPKSGESLAKPRRVARSARRRLRRRRQRLNYLKQFFISQKLLTKEQIDQLTAPDHAKGWHPQNPYALRVKGTTERLSPDELLIVLYHIAKRRGYKSNRKTIEEKDTTGDGKAVNSAIAQNAKVLSQYTTVGEALVKDDKFYDRKRNTTGDFRHSFARVDFLNEIRRILLCQQRYYPNQLAGDQIDHLLGIKISSLPADRPINDNDINRLTKLQSDNINGLFYQRPFMTSDLINKMRGKCPLESEQPRAPKASYSFEIFRLAQDLAHLQYIIDADKAEGNTEPTSQRAITKFLTSDQIKTCINKCLTTKKVTYRAIREVLGYAKNDPHFQFKYIRGKNPKDEEQKKDPLAKEKNTFAELKFYHSVKSGLKNLPDDWRKVGSNPELFDQIGEILTCNKDDYSIKEGLRKLEVLSDDAVDALLPIDFSGFGHLSLIALRNITPYLKEGNGITYDKAMEKAGYHFAARHSGDKTCLPPLNKDDAQQITNPVVKRAVSQTIKVVNAIIRKYGSPYRIGVECAGELAKSHDERKKIKDAQDENAFENEKLKKKLREEYNILTPTGTQITKFRLYKQQDGKCAYSGKPLDLDRLFDPGSRKDESYAEIDHIIPFSRCGNDTRANKVLVLNSYNQIKGNRTPYETWGNDPDFWQRLEANTKANPKLGQAKQRRLLTHTIPAEDWASRAINDTRYISKFISRYLKNHLEFSPYDESPDQASDSQPRQRQRVIMPAGAITTHLRRMWHQPGKNREADLLHHAVDATIIALTTQATIQDCAVYSAYIDDHTKQRFTGNTKTTGSDRLLRQLERITNTETGEISQADYEELMQSLLPWPNFDQELRKRASLPGENDTISTWRDQFRDIYSDQDSDFYNHLHPIFVSRMPKRRVSGKTNKDTVYSTKTRDNDGKTRSSRVGLADLTLDKLKNSAIRNVDETLYKQLEQYVADRKKWLDENKKWKVARREQKKLLKKSPVDEAVSTPAELPPEPIEPKIYKNGKHFDKNGNPISPIKSIKIYSPNPDTSGLLVNQGKAYVSNDSMVRLDVYKRPNKKGKIEHFFVPVYANMIRRGHPEVKPTRILPPPKKGIPPEIDDSFTFVCSLYPNDYVKVVLDGEVKEGYYAAYDIAGCKIKLLPHAGTSKDLPTKKKDKSSNGDQTDQSTDEAGDNDKKKTKIKHPNRYPAFRIAPRSATKIERLDINVLGDNYKWD

SEQ ID NO: 8566 - protein, 749 aa, synthetic construct
  REGION 1..749: note = Synthetic
MTYDKAVEEAGYQFNAKLSGHKNLLPPLSEEESHQITNPVVKRAVSQTIKVVNAIIHKYGAPYRIGIECAGELAKSFKEREDIKKRQDKNAENNQEAVKELRSGKLVSDGEQFEAQIAPTGTSITKLNFYKQQDCKCPYCGEPINLSKIFSDDNYAEIDHIIPFSICGNDTKANKVLVHTTCNQIKGNKTPYQTWGNDPERWKIIEATARANHKLGAAKRRRLLTQTLPDEDWSLHAINDTRYISKFISRYIKSNLKFRPMDDTDDDGHTQRQRVIMPAGAITSYLRRMWHIGHKDREEDCLHHSVDAVIVALTTQAIIQDCSVYSAYIDDHTKMQFGDNASQAGSAKLVRALQRITDPATGEIKEADYKELMQDMLPWPRFDEELRKREEQPDPVNDNLAIWRNKFSDLYKDQDSDFINRIHPIFVSRMPKRQGAGAVNKETVRSNKTKDDDGKTRSAKVKLRDLTLKQLSNSAISSNEGVYEQIKQYIVDRDKWKDEIKAWRKAKKASKQTSNTDEANDGRDEPSVPAEPREPKVYKSNRRFDRNGNPISPIKSIKVYDPHPMTSGFLVNNDTAYVNNGSMVRLDVYKRPNKRGKIEHFFVPVYAHMIKKGHPEIKPTKILPEPKKGTPKEIDSSFSFVCSLFPNDYVKVTLGSEVKEGYYVAYDITNCKIKLLPHAGTSKDLPTKGKDKSNSDQSDQSADETNDNDKKKTGVKHPNRYPAFRIAPRSATKIERLDINVLGDNYRWD

SEQ ID NO: 8567 - protein, 1336 aa, synthetic construct
  REGION 1..1336: note = Synthetic
MGKDNVKTKKVLGLDIGTESIGYAIVEIHESTKKDKERERECKEKSHIVLSGVRLFDKLSEDRFSVPLSAVRRANKSNRNRFVRRHKRMQEMESIFRDIGFLNSDYDHDSFFINFLGKIRKTRDNKTLVPYNLRELGIKERLEKDEIFAIMYHICRHRGYRSGPVLEESKKKKDTDKEGSKTKIINAKKHMGDSTFGAYLVKKAAEVETQPAYKKYRNVSMADKDMIEDEVRKILQKQAEFYKELDSNFIDKVVDIINYKAPALSTEQLIKMLGKCTFEKDELRAPKHALTTILSVLLQKLNNLKFDDKSLSTEHLSILTSLFFEKGCQLTYKDLRDVLILQAKFKDINYAQKCQEFIKKGLEGCKLSDESTIKTFPALRYQLASSINDETNFISLLESSLDKNGNIPDYKKFYSKIKKDYEAIEKNEIFYKQDKIKKILEHYSVNDLASALGNREYVDSIVEIFSIQKDYVTFQEKLQKELDSQGRLELEESLIGLFESGILGTSNLSLKALKNIEPFLLQGQKYIEACQSAGYKLQDNTKKYKHLPTITKAQKENLIFATNPKLRKIANQVVILINTILKKRHKFDYVHIELARDLPKTEEEKRREIEQNKFFKNENENAKQLVDKNASKKTWLKARLLLNQDYQCPYCKDENGNPKKLNKHELDSYEIDHIIPYSISFDNSFSNKILVHRDCNQKKGNRIPMLMFTNDEDKEAYISGVKILHLQKTKEANLLITKEELETKLEDSLKSGRVLSDTRYAGKFIKNYIERHLQFEGNCSDLTDKNEDGTTRQRVYVRNGNTTTIMRNLWHIGTQEKNEDSVSIERYKKDRKLHTHHAEDAIIIACTTQSIIQKVSNEAIKHESDFTNGEEAKSKNAKIEKALLKALHNSEPILNMKEKVRQNLQEIFPSRKVDRLKEHGDTHEETINSIRYKKDGRYLKVTKDMFQQLKINPIPTLSIPLESLNIESLELLYGKDDNNKKLYSLLKEFLQNEKKKDCPAYKKLLKIFQKKEEVELLKCEIVIKDLSKYSAENLVVIKRVLLRDLLSKLDIKGEKDKSKIKQNINETLESLVQKDSGAKYLYNLLVTYIIRDEGDENSTSFKPLLDYFHKKNKVELLECKISIEDKGTDNNIVNKLFVRDGVANKGSQQKFLLYKTKKDTFHIGVVYFSDKIKDDKTAKVQIVAKIPYDKRDMSNKIDESGNLVYKYVDTLYKNDLIYYEIKEDNKTKEYVYYLSGIDITNAQVNLIHPIIHQKLALVKGGKLTEQIEQKTPTIGGLQAKIVRLEKLQVDVLGKVYRRNKEGRYVYFPKAKKIMLRDLREYGEEQAKLIRSYKAKE

SEQ ID NO: 8568 - protein, 1240 aa, synthetic construct
  REGION 1..1240: note = Synthetic
MIEVKRVLGLDIGTESIGYAIVEIHEIKDNKKDKDKIEERKCKEASHIITSGVRLFDKLSEDRFSKPISAVRRANKSNRNRFARRHKRMQEMESIFKDIGFLNSDYDHDSFFTNFLGKIRKARDNKTLVPYNLRELGLKERLEKDEIFAIMYHICRHRGYRSGPVLEASKGKKGKDKEGTKDKILKARSSMGDLTFSTHLIQEAIKKHVPPAHMKYRNEVMADKDMIEDEARRILTKQAEFYKELDSTFINKVIDTINAKAPALSAEQLEKMLGKCTFEKGELRAPKHSLTTILSILLQKLNNLKFDDSSLNTQHLSALASLFFEKGCQLSYKDLRDVLKSESKFKDIDYVKRCQETIQKGLEGCRLKEDSDIKSFVTLSYRLALNVDNEADFIALLESSLDVNSHTPDSKKFYSKVKKDYEAIEKKEIFYKQDSIKEILELYSVKDLASALGRDDVDSIVEIFSREKDYVAFQEKLHDELARQGKLELKERLLGLFENSILGTSNLSLKALKKIEPFLLQGQKYIEACQSAGYELQDNTKKYKYLPTITRAQKENLIFATNPKLRKIANQVVILINTLIKKTYISNGEHKHYKFDHVHIELARDLPKTKEEIRREIEQNKFFRNENANAETFVGKNASKKTLLKARLLLNQNERCPYCGKTLYKNDLASYEIDHIIPYSISFDNSFSNKVLAHRDCNQKKANRIPMLMFANDENKEDYVTRVKSLHLQKTKEANLLITKEELETKLEESLKNGRVLSDTRYAGKFIKNYIERHLQFEGNCSDLTDKNEDGTTRQRVYVRNGNTTTIMRNLWHIGTQEKNEDSISVERYKKDRKLHTHHAEDAIIIACTTQGMIQKISTLAKDSEGEFVNGDDASSKNAKIEQKLLKTLHQSEPILNMKEKVRQNLQEIFPSRKVDRLKEHGDTHEETISSLRNAKAGYAKVDKEGFLELKQKDPCALTMVKRISLSELKLINLESLVNKDTSNKKPYNLLKTFLKDSKSEDSSAFKPLLNYFHKTSLEDLLSCKVSIEDKGSNINVINKVFIRDGVANKGSQQKYLLYKTKKGTFHIGVVYFADCIKDDKNAVVQIVSRETYDKRDMSDKKDKDGNLVYEYVDTLYKNDLIYIKIKEKGSINEYIHYLSEVDISNTQATMLHPVIHEELSINKKGDIEAKTYAWKPAIGGTKILEIEKLQVDILGNVYKKDETGKYKKYNYHQVKKLMLRDLNLYKEEQEKFLKEHKKL

SEQ ID NO: 8569 - protein, 1182 aa, synthetic construct
  REGION 1..1182: note = Synthetic
MEKVLGLDLGTNSIGFALNEIEEKDGIVIFNELSSNSIIFSEYMNAEDRRNFRSGRRRNERTSRRKENTRKLLVSFNLATKEIIKNPIEYFNNLTKLCKEPYTIREEAVKGKKLTKEEFTFSLYTIVSRRGYTNLFATQDDDKEAKESEKINSAIQNNKNIYKNSNFVLPSKVLTAKKENLEKDGFINVAIRNKKDNYNNSLDRKLWQEELEKLCDSQKNNKELFKDLETFEKFKDKLLNGVNENSLGVFEQRDLKSVEDMVGYCSFYNLYHENKQKRVVNAHIKAIEFILRQRIENSILGNLIINKETGEFVSLLKEDIETTIKFWLETPNVQKITTKNIFKNAGLKDLEIKTSDKQDDTVQDITTYKAILEIISYEMIVKNEDFYSKLLEVLHYYVSKEQIITEIIKIDKEKILTNEQIEKIANINKNSSSYISFSLKFINEILEKMIKGISYQDSLTELGYFKKYTNIKAYDYLPPLNPNNEDIKFLKNKIPNFNPQELFYQPLVSPNVKRVISILRRLINELIKRYGKIDKIVIETARELNSKKDEEKIKKSQEQSNKDKKEAEKLLESMNKEISSKNILRARLLKEQKSRCLYSGENLTLEDALDENITEIEHFIPRSKIWIDSYKNKILVLKKFNQNKSNQNPVLFLKSIGEWENFQGRVNEYIISKDKKNWLIDESNIEKIYNDEKLEDRFLNDTRSATKIVANYLEHYLFPKQNEHGKGESNDKVIRVTGKAISELKKLWGIHEAQPTNEDGKKDRQTNYHHTIDAIVISLLNNSSKKALNDFFKQKENHFKTKAILEKLKTRFPISKDGKSLFEFVKDKVEKYEKNELYICPFMKKRENIRGFKDGNIKLIWDEELNNFAQIDKIDINKNLLLNNFGKDLKDDEVKKIFETIKNRLEFPKQNNIKKALEDYEKRLLETRARINAIKDEIKQEENKLPRDKKAIDMQESLAIKEKIETLKINQKELLKEMETPCYFLTKDAKKQIVRSLKLKTNSVTKADSIIITDKKQNNRVQRLDKEVYESLKESKTPFVAKLNDNTLSVDLYNTEKGQVIGLNYFSSIKSNILPKINEKKVSLIKNFEDKITISKNDILEVSDLKNRTKEYFVFNGGGDVTATNHTVVLEFINLKSVTKVNKKGKEEKISTKKVTINETTIVKLVKINFFGEISYEEFKKN

SEQ ID NO: 8570 - protein, 1176 aa, synthetic construct
  REGION 1..1176: note = Synthetic
MSKIAKKILGLDIGTNSIGFCLNKIYIENEQTIFEELASNSIIFSEYIKAEDRRKFRSGRRRNERNSRRKEIVRKLLCDFGFTDKSIITQPIKYFNKISKNKNPYVLRELAVKGKNLTKDEFTFALFTAISRRGYSNQFKTEDSKDDGVINSAISKNRDFYKQNNLVIPSLVLLNKKTEFENDGFINVAIRNKKDDYNNSLDRELWQEEVEKLLESQQNNIELFENKEKYETFKNKLLHGVNENSLGIFEQRPLKSMEDMVGYCSFYNAYHKNPQKRVAKSNISSIEFTLRQRIENSKELIYNDKTELSYSPTKEEIQNTIEVWLKRPPTQTINTKNIFDKAGLKNIKIKVSEKQDDTILDIKLHSQLLEIFKNANIDIFEKHRELYTKILEKIHYFVNKEQIAKEIKKLDTQNILDDETIKKLSNVDKGNKESYASFSLLFIDEILQKLRVGINYQDSLTQLGYFKKYIGIEAYDYLPPLNPSQDDIKWLEKNVKNFKVEHLFYQPLISPNVKRVISILRKLVNDLIKKYGKIDEIIIETARELNTKSEEEQIKDSQAQSKKEIKEAQKLLEAYKYELTNKNIERARLFTEQKAKCLYSNDSMTIQEALDETVSEVEHFIPRSKIWINSYKNKILVFKKHNQNKGDKHPIIYLKSKNAWEDFTHRVSEVLSNKSKVFWLTNEDNINKIYDENNKEYGKLLEDRFLNDTRSATKIIANYLEHYLFPKQNEHGKGETNSNIIRVTGKAISELKRLWGIDKVQPKNEDDKKDRSTNYHHTIDAIVISLLNQSSKKALNDFFKQNENGFKTKAILENLSARFPKTKDGISLVDFVKEKVRKYENDEIYVCPIMKKRDNIVGFKDGNIKLYFDKEKEIFCQIDKKPIDKNLLFDQNGKDVSDGEVEKRVEELIKSLDLPKQNNIKEAILNYKEKLLNTRKNIKSLEEQIKDIRGNLPNKKDFIETPDTLKIKKQIEELNNQKIKQINIQNEPCYFMTNKGQKQIVKNIKIKSKDTSKVDSIIITDKNKQNRVQRLTKDIYEDLKSNQTPFVAKLNDTTLNVDLYNTSKGQVIGLNYFSSVKNDIPAKINESKINFIKNHQDKITIQKGDLLEIENLKENSKKYFIFNGGGNIAGGNNKIEVKSINKKDEKRLFITLNKDTVAKKIFITYNGDISYEEFKK
